United States Patent Application Publication US 2026/0240958 A1 - sequence listing, part 5

SEQ ID NO: 5986 - RNA, 5797 nt, synthetic construct
  source 1..5797: mol_type = other RNA
aggaaataagagagaaaagaagagtaagaagaaatataagagccaccatggcccctaagaagaagcgtaaagtgagccggatggaacgcctcgtctacgaggtgcggcagaagtgcagaaacatcgaggacatctgcatctcctgcggatctctgaacgtgaccctggagcacccactgttcatcggcggcatgtgccagaactgtaaaaactgttttctggagtgtgcctatcaatacgacgatgacggctaccagagctactgcaccatctgttgcggcggaagagaggtgctgatgtgtggaaataacaactgctgccggtgcttctgcgtggaatgcgtggacctgctggtgggccccggcgccgcccaggccgctattaaggaagatccttggaactgctacatgtgcggccacaagggcacatacggcctgctgagacggagagaggactggcctagcagactgcagatgttcttcgccaataaccacgaccaggagttcgacccccctaaggtgtaccctcccgtccccgccgagaagagaaagcccatccgggtcctgagcctgttcgatggcatcgccaccggtctgctggtgctgaaggacctgggcatccaggtggataggtacattgcctccgaggtgtgcgaggactccatcaccgtgggaatggtgcgtcatcagggcaagatcatgtacgtgggcgacgtgcggagcgtgacacagaagcatatccaggagtggggccctttcgacctggtgatcggcggcagcccttgcaatgacctgagcatcgtgaacccagcccggaagggcctgtacgagggaaccggcagactgttcttcgagttttacagactgctgcacgacgcccggcctaaggaaggcgacgaccggcccttcttttggctgttcgagaatgtggtggccatgggagtcagcgacaagcgggatattagccggttcctggagagcaaccccgtgatgatcgatgccaaggaagtgagcgccgcccaccgggccagatacttctggggcaatctgcctggcatgaacagacccctggccagcaccgtgaacgacaagctggagctgcaggagtgcctggagcacggccggatcgccaagttcagcaaggtgagaaccatcaccacccgaagcaacagcatcaaacaaggcaaggaccagcactttcctgtgttcatgaacgagaaggaggacatcctgtggtgtaccgagatggagagagtgttcgggttcccagtccactacacagatgtcagcaacatgtctagactggccagacagagactgctgggaagaagctggtccgtccctgtgatcagacacctgttcgcccctctgaaggagtacttcgcctgcgtgagcagcggcaacagcaacgccaacagccggggccccagcttctctagcggcctggtgccactgtccctgagagggagccacatgggccccatggagatctacaaaaccgtgagcgcctggaagcggcagcctgtgcgcgtgctgagcctgtttcggaatatcgataaagtcctgaaaagcctgggattcctggagagcggctctggctccggcggtggcaccctgaagtacgtggaggatgtgacaaacgtggtcagacgggatgtggagaagtggggccccttcgatctggtgtacggcagcacccaacccctgggcagctcttgtgaccggtgccctggctggtacatgtttcagttccaccggatcctgcagtacgccctgccgagacaggagtcccagcggccattcttttggattttcatggacaacttgctgctgaccgaggatgaccaggaaactaccactcggttcctgcagaccgaagccgtgaccctgcaggacgtgagaggccgggactaccagaacgccatgcgggtgtggtccaacatccctggactgaaaagcaagcacgcacctctgacccctaaagaagaggagtacctgcaggcccaggtgcggagcagaagcaagctggacgcccctaaggtggatctgctggtgaagaattgcctcctgcccctgagagagtacttcaagtatttcagccagaatagtctgcccctgggcggcccaagcagcggcgcccctcctcccagcggcggcagcccagccggctccccaacctctaccgaggagggcacctctgagtccgccacccccgagagcggccctggcacctccaccgagcccagcgagggcagcgcacccggcagccctgccggcagccccacctccacagaggagggaaccagcaccgagcccagcgaaggcagcgccccaggcaccagcaccgagcctagtgagggcggctctggcggcggcagcgcccaggagattaaacggatcaacaagatcagaagaagacttgtgaaagacagcaacaccaagaaggccggcaagacaggccccatgaaaaccctgctggttagagtgatgacacccgatctgagagagcggctggaaaacctgagaaagaagcctgaaaatatcccccagcccatcagcaatacatctagagccaacctgaataagctgctgaccgattacaccgaaatgaagaaggcgatcctgcatgtgtactgggaagagttccagaaggaccctgtgggcctgatgagccgggtggcccagcctgccagcaagaagatcgatcagaacaagctgaaacctgagatggacgagaagggcaacctgaccaccgccggctttgcctgctctcagtgtggccagcccctgttcgtgtacaagctggagcaggtgtctgagaagggcaaggcttacaccaactacttcggacggtgcaatgtggccgagcacgaaaagctgatcctgctggcccagctgaagcccgagaaggatagcgacgaagccgtgacatatagcctgggaaagtttgggcagagggccctggatttctacagcattcatgtgaccaaggagtccacccaccccgtgaagcccctggcccagatcgccggaaacagatacgcctccggacctgtgggaaaggccctgagcgacgcatgtatgggcacaatcgcctccttcctgtctaagtaccaggacatcatcatcgaacaccagaaggtggtgaagggcaaccagaagagactggagagcctgcgggagctggccggcaaggaaaacctggaataccctagcgtgaccctgccacctcagcctcacaccaaggagggcgttgatgcctacaacgaagtgatcgcccgggtgcgaatgtgggtgaacctgaacctgtggcagaagctgaagctaagcagagatgatgccaagcctctgctgagactgaagggattcccttcctttcctctggtcgagagacaggccaacgaagtggactggtgggacatggtgtgtaacgtgaagaagctgatcaacgagaaaaaggaggatggcaaggtgttttggcagaatctggctggctacaagagacaggaagccctgagaccatacctgagcagcgaggaagatcggaagaagggaaagaaattcgctcggtaccagctgggcgacctgctgctgcacctggaaaagaagcacggcgaggactggggaaaggtgtacgacgaggcctgggagcggattgacaagaaagtggaaggcctgagcaagcacatcaagctggaagaggaacggagaagcgaggacgcccagagcaaggccgccctgaccgactggctgcgggctaaggccagcttcgtgatcgagggcctgaaggaggccgacaaggacgagttctgcagatgcgagctgaagctgcagaagtggtacggggacctgcggggaaagcccttcgccatcgaagccgagaacagcatcctggacatcagcggcttcagcaagcagtacaactgtgccttcatctggcagaaggacggcgtgaagaagctgaacctgtacctgatcatcaactacttcaagggcggcaagctgcggttcaagaagatcaaacctgaagccttcgaagccaacagattctacaccgtgatcaacaaaaagagcggcgagatcgtgcccatggaggtgaacttcaacttcgacgaccccaacctgatcatcctgcctctggcctttggcaagagacagggcagagaattcatctggaacgacctgctgtccctggaaaccggcagcctgaagctggccaacggaagagtgatcgagaagacactgtacaacagaagaacccggcaggatgagcctgccctgttcgtggccctgaccttcgagcggcgggaggtcctggactcctccaatatcaaaccaatgaacctgatcggcgtggcaagaggcgaaaacatccccgccgtgatcgccctgaccgaccccgagggctgcccactgagccggtttaaggatagcctgggaaacccaacccacatcctgagaatcggcgagagctataaggagaagcagcggaccatccaggccaagaaggaggtggagcagcggagagccggcggctacagccggaagtacgccagcaaagccaagaatctggcagacgatatggtgagaaacaccgctagagatctgctgtactacgccgtgacccaggatgccatgctgatcttcgccaacctgagccggggcttcggccggcagggcaagcggaccttcatggccgagagacagtacacacggatggaggactggctgaccgccaagctggcctacgagggcctgagcaagacctacctgtccaagacactggcccagtacacctccaagacatgcagcaactgtgggtttaccatcaccagcgccgactacgacagggtgctggagaagctgaagaagacagcaacaggctggatgaccacaattaacggcaaggagctgaaggtggagggccagattacctactacaacagatacaagagacagaacgtagtcaaggacctgtccgtcgagctggatagactgagcgaagaatctgtgaacaacgacatctcctcctggacaaagggcagaagcggagaagctctgagcctcctgaagaaaagattctcccatagacccgtgcaggagaagttcgtgtgcctgaactgcggcttcgagacacacgcagccgagcaagccgccctgaacatcgccagatcctggctgttcctgcggagccaggagtacaagaaataccagacaaacaagacaaccggcaacaccgataagagagccttcgtcgagacctggcagtccttttaccggaagaagcttaaggaggtgtggaaacctgccgtgcggtctggcggatctggcggaggctccacaagcagcgtgatgttcaacgacatcagcatcgtgttcagccaggaggagtgggagtacctggacctggagcagaaggacctgtacaaggacgtgatgctggagaactacggcaacctggtgagcctgggctgcttcatcgccaagcccgacgtgatcagcctgctggagcagggcaaggagccctggaaggtgatcaggaagggcaggaggggctaccccgacctggagaccaggtacgagaccaagaccagccccaagaaaaagagaaaagtctaagctgccttctgcggggcttgccttctggccatgcccttcttctctcccttgcacctgtacctcttggtctttgaataaagcctgagtaggaaggctagcaaaaaaaaaaaaaaaaaaaaaaaaaaaaaaaaaaaaaaaaaaaaaaaaaaaaaaaaaaaaaaaaaaaaaaaaaaaaaaaa

SEQ ID NO: 5987 - RNA, 5797 nt, synthetic construct
  source 1..5797: mol_type = other RNA
aggaaataagagagaaaagaagagtaagaagaaatataagagccaccatggcccctaagaagaagcgtaaagtgagccggatggaacgcctcgtctacgaggtgcggcagaagtgcagaaacatcgaggacatctgcatctcctgcggatctctgaacgtgaccctggagcacccactgttcatcggcggcatgtgccagaactgtaaaaactgttttctggagtgtgcctatcaatacgacgatgacggctaccagagctactgcaccatctgttgcggcggaagagaggtgctgatgtgtggaaataacaactgctgccggtgcttctgcgtggaatgcgtggacctgctggtgggccccggcgccgcccaggccgctattaaggaagatccttggaactgctacatgtgcggccacaagggcacatacggcctgctgagacggagagaggactggcctagcagactgcagatgttcttcgccaataaccacgaccaggagttcgacccccctaaggtgtaccctcccgtccccgccgagaagagaaagcccatccgggtcctgagcctgttcgatggcatcgccaccggtctgctggtgctgaaggacctgggcatccaggtggataggtacattgcctccgaggtgtgcgaggactccatcaccgtgggaatggtgcgtcatcagggcaagatcatgtacgtgggcgacgtgcggagcgtgacacagaagcatatccaggagtggggccctttcgacctggtgatcggcggcagcccttgcaatgacctgagcatcgtgaacccagcccggaagggcctgtacgagggaaccggcagactgttcttcgagttttacagactgctgcacgacgcccggcctaaggaaggcgacgaccggcccttcttttggctgttcgagaatgtggtggccatgggagtcagcgacaagcgggatattagccggttcctggagagcaaccccgtgatgatcgatgccaaggaagtgagcgccgcccaccgggccagatacttctggggcaatctgcctggcatgaacagacccctggccagcaccgtgaacgacaagctggagctgcaggagtgcctggagcacggccggatcgccaagttcagcaaggtgagaaccatcaccacccgaagcaacagcatcaaacaaggcaaggaccagcactttcctgtgttcatgaacgagaaggaggacatcctgtggtgtaccgagatggagagagtgttcgggttcccagtccactacacagatgtcagcaacatgtctagactggccagacagagactgctgggaagaagctggtccgtccctgtgatcagacacctgttcgcccctctgaaggagtacttcgcctgcgtgagcagcggcaacagcaacgccaacagccggggccccagcttctctagcggcctggtgccactgtccctgagagggagccacatgggccccatggagatctacaaaaccgtgagcgcctggaagcggcagcctgtgcgcgtgctgagcctgtttcggaatatcgataaagtcctgaaaagcctgggattcctggagagcggctctggctccggcggtggcaccctgaagtacgtggaggatgtgacaaacgtggtcagacgggatgtggagaagtggggccccttcgatctggtgtacggcagcacccaacccctgggcagctcttgtgaccggtgccctggctggtacatgtttcagttccaccggatcctgcagtacgccctgccgagacaggagtcccagcggccattcttttggattttcatggacaacttgctgctgaccgaggatgaccaggaaactaccactcggttcctgcagaccgaagccgtgaccctgcaggacgtgagaggccgggactaccagaacgccatgcgggtgtggtccaacatccctggactgaaaagcaagcacgcacctctgacccctaaagaagaggagtacctgcaggcccaggtgcggagcagaagcaagctggacgcccctaaggtggatctgctggtgaagaattgcctcctgcccctgagagagtacttcaagtatttcagccagaatagtctgcccctgggcggcccaagcagcggcgcccctcctcccagcggcggcagcccagccggctccccaacctctaccgaggagggcacctctgagtccgccacccccgagagcggccctggcacctccaccgagcccagcgagggcagcgcacccggcagccctgccggcagccccacctccacagaggagggaaccagcaccgagcccagcgaaggcagcgccccaggcaccagcaccgagcctagtgagggcggctctggcggcggcagcgcccaggagattaaacggatcaacaagatcagaagaagacttgtgaaagacagcaacaccaagaaggccggcaagacaggccccatgaaaaccctgctggttagagtgatgacacccgatctgagagagcggctggaaaacctgagaaagaagcctgaaaatatcccccagcccatcagcaatacatctagagccaacctgaataagctgctgaccgattacaccgaaatgaagaaggcgatcctgcatgtgtactgggaagagttccagaaggaccctgtgggcctgatgagccgggtggcccagcctgccagcaagaagatcgatcagaacaagctgaaacctgagatggacgagaagggcaacctgaccaccgccggctttgcctgctctcagtgtggccagcccctgttcgtgtacaagctggagcaggtgtctgagaagggcaaggcttacaccaactacttcggacggtgcaatgtggccgagcacgaaaagctgatcctgctggcccagctgaagcccgagaaggatagcgacgaagccgtgacatatagcctgggaaagtttgggcagagggccctggatttctacagcattcatgtgaccaaggagtccacccaccccgtgaagcccctggcccagatcgccggaaacagatacgcctccggacctgtgggaaaggccctgagcgacgcatgtatgggcacaatcgcctccttcctgtctaagtaccaggacatcatcatcgaacaccagaaggtggtgaagggcaaccagaagagactggagagcctgcgggagctggccggcaaggaaaacctggaataccctagcgtgaccctgccacctcagcctcacaccaaggagggcgttgatgcctacaacgaagtgatcgcccgggtgcgaatgtgggtgaacctgaacctgtggcagaagctgaagctaagcagagatgatgccaagcctctgctgagactgaagggattcccttcctttcctctggtcgagagacaggccaacgaagtggactggtgggacatggtgtgtaacgtgaagaagctgatcaacgagaaaaaggaggatggcaaggtgttttggcagaatctggctggctacaagagacaggaagccctgagaccatacctgagcagcgaggaagatcggaagaagggaaagaaattcgctcggtaccagctgggcgacctgctgctgcacctggaaaagaagcacggcgaggactggggaaaggtgtacgacgaggcctgggagcggattgacaagaaagtggaaggcctgagcaagcacatcaagctggaagaggaacggagaagcgaggacgcccagagcaaggccgccctgaccgactggctgcgggctaaggccagcttcgtgatcgagggcctgaaggaggccgacaaggacgagttctgcagatgcgagctgaagctgcagaagtggtacggggacctgcggggaaagcccttcgccatcgaagccgagaacagcatcctggacatcagcggcttcagcaagcagtacaactgtgccttcatctggcagaaggacggcgtgaagaagctgaacctgtacctgatcatcaactacttcaagggcggcaagctgcggttcaagaagatcaaacctgaagccttcgaagccaacagattctacaccgtgatcaacaaaaagagcggcgagatcgtgcccatggaggtgaacttcaacttcgacgaccccaacctgatcatcctgcctctggcctttggcaagagacagggcagagaattcatctggaacgacctgctgtccctggaaaccggcagcctgaagctggccaacggaagagtgatcgagaagacactgtacaacagaagaacccggcaggatgagcctgccctgttcgtggccctgaccttcgagcggcgggaggtcctggactcctccaatatcaaaccaatgaacctgatcggcgtggcaagaggcgaaaacatccccgccgtgatcgccctgaccgaccccgagggctgcccactgagccggtttaaggatagcctgggaaacccaacccacatcctgagaatcggcgagagctataaggagaagcagcggaccatccaggccaagaaggaggtggagcagcggagagccggcggctacagccggaagtacgccagcaaagccaagaatctggcagacgatatggtgagaaacaccgctagagatctgctgtactacgccgtgacccaggatgccatgctgatcttcgccaacctgagccggggcttcggccggcagggcaagcggaccttcatggccgagagacagtacacacggatggaggactggctgaccgccaagctggcctacgagggcctgagcaagacctacctgtccaagacactggcccagtacacctccaagacatgcagcaactgtgggtttaccatcaccagcgccgactacgacagggtgctggagaagctgaagaagacagcaacaggctggatgaccacaattaacggcaaggagctgaaggtggagggccagattacctactacaacagatacaagagacagaacgtagtcaaggacctgtccgtcgagctggatagactgagcgaagaatctgtgaacaacgacatctcctcctggacaaagggcagaagcggagaagctctgagcctcctgaagaaaagattctcccatagacccgtgcaggagaagttcgtgtgcctgaactgcggcttcgagacacacgcagccgagcaagccgccctgaacatcgccagatcctggctgttcctgcggagccaggagtacaagaaataccagacaaacaagacaaccggcaacaccgataagagagccttcgtcgagacctggcagtccttttaccggaagaagcttaaggaggtgtggaaacctgccgtgcggtctggcggatctggcggaggctccacaagcatgatcaactaccagacccccgtgagcttcagggacgtggtggtgggcttcacccaggaggagtggcacaggctgaaccccacccagagggccctgtacagggacgtgatgctggagacctacagcaacctggtgagcgtgggctacgagggcaccaagcccgacgtgatcctgaggctggagcaggaggaggccccctggatcggcgaggccgcctgcctgggctgccactgctggggcaagaccagccccaagaaaaagagaaaagtctaagctgccttctgcggggcttgccttctggccatgcccttcttctctcccttgcacctgtacctcttggtctttgaataaagcctgagtaggaaggctagcaaaaaaaaaaaaaaaaaaaaaaaaaaaaaaaaaaaaaaaaaaaaaaaaaaaaaaaaaaaaaaaaaaaaaaaaaaaaaaaa

SEQ ID NO: 5988 - RNA, 5797 nt, synthetic construct
  source 1..5797: mol_type = other RNA
aggaaataagagagaaaagaagagtaagaagaaatataagagccaccatggcccctaagaagaagcgtaaagtgagccggatggaacgcctcgtctacgaggtgcggcagaagtgcagaaacatcgaggacatctgcatctcctgcggatctctgaacgtgaccctggagcacccactgttcatcggcggcatgtgccagaactgtaaaaactgttttctggagtgtgcctatcaatacgacgatgacggctaccagagctactgcaccatctgttgcggcggaagagaggtgctgatgtgtggaaataacaactgctgccggtgcttctgcgtggaatgcgtggacctgctggtgggccccggcgccgcccaggccgctattaaggaagatccttggaactgctacatgtgcggccacaagggcacatacggcctgctgagacggagagaggactggcctagcagactgcagatgttcttcgccaataaccacgaccaggagttcgacccccctaaggtgtaccctcccgtccccgccgagaagagaaagcccatccgggtcctgagcctgttcgatggcatcgccaccggtctgctggtgctgaaggacctgggcatccaggtggataggtacattgcctccgaggtgtgcgaggactccatcaccgtgggaatggtgcgtcatcagggcaagatcatgtacgtgggcgacgtgcggagcgtgacacagaagcatatccaggagtggggccctttcgacctggtgatcggcggcagcccttgcaatgacctgagcatcgtgaacccagcccggaagggcctgtacgagggaaccggcagactgttcttcgagttttacagactgctgcacgacgcccggcctaaggaaggcgacgaccggcccttcttttggctgttcgagaatgtggtggccatgggagtcagcgacaagcgggatattagccggttcctggagagcaaccccgtgatgatcgatgccaaggaagtgagcgccgcccaccgggccagatacttctggggcaatctgcctggcatgaacagacccctggccagcaccgtgaacgacaagctggagctgcaggagtgcctggagcacggccggatcgccaagttcagcaaggtgagaaccatcaccacccgaagcaacagcatcaaacaaggcaaggaccagcactttcctgtgttcatgaacgagaaggaggacatcctgtggtgtaccgagatggagagagtgttcgggttcccagtccactacacagatgtcagcaacatgtctagactggccagacagagactgctgggaagaagctggtccgtccctgtgatcagacacctgttcgcccctctgaaggagtacttcgcctgcgtgagcagcggcaacagcaacgccaacagccggggccccagcttctctagcggcctggtgccactgtccctgagagggagccacatgggccccatggagatctacaaaaccgtgagcgcctggaagcggcagcctgtgcgcgtgctgagcctgtttcggaatatcgataaagtcctgaaaagcctgggattcctggagagcggctctggctccggcggtggcaccctgaagtacgtggaggatgtgacaaacgtggtcagacgggatgtggagaagtggggccccttcgatctggtgtacggcagcacccaacccctgggcagctcttgtgaccggtgccctggctggtacatgtttcagttccaccggatcctgcagtacgccctgccgagacaggagtcccagcggccattcttttggattttcatggacaacttgctgctgaccgaggatgaccaggaaactaccactcggttcctgcagaccgaagccgtgaccctgcaggacgtgagaggccgggactaccagaacgccatgcgggtgtggtccaacatccctggactgaaaagcaagcacgcacctctgacccctaaagaagaggagtacctgcaggcccaggtgcggagcagaagcaagctggacgcccctaaggtggatctgctggtgaagaattgcctcctgcccctgagagagtacttcaagtatttcagccagaatagtctgcccctgggcggcccaagcagcggcgcccctcctcccagcggcggcagcccagccggctccccaacctctaccgaggagggcacctctgagtccgccacccccgagagcggccctggcacctccaccgagcccagcgagggcagcgcacccggcagccctgccggcagccccacctccacagaggagggaaccagcaccgagcccagcgaaggcagcgccccaggcaccagcaccgagcctagtgagggcggctctggcggcggcagcgcccaggagattaaacggatcaacaagatcagaagaagacttgtgaaagacagcaacaccaagaaggccggcaagacaggccccatgaaaaccctgctggttagagtgatgacacccgatctgagagagcggctggaaaacctgagaaagaagcctgaaaatatcccccagcccatcagcaatacatctagagccaacctgaataagctgctgaccgattacaccgaaatgaagaaggcgatcctgcatgtgtactgggaagagttccagaaggaccctgtgggcctgatgagccgggtggcccagcctgccagcaagaagatcgatcagaacaagctgaaacctgagatggacgagaagggcaacctgaccaccgccggctttgcctgctctcagtgtggccagcccctgttcgtgtacaagctggagcaggtgtctgagaagggcaaggcttacaccaactacttcggacggtgcaatgtggccgagcacgaaaagctgatcctgctggcccagctgaagcccgagaaggatagcgacgaagccgtgacatatagcctgggaaagtttgggcagagggccctggatttctacagcattcatgtgaccaaggagtccacccaccccgtgaagcccctggcccagatcgccggaaacagatacgcctccggacctgtgggaaaggccctgagcgacgcatgtatgggcacaatcgcctccttcctgtctaagtaccaggacatcatcatcgaacaccagaaggtggtgaagggcaaccagaagagactggagagcctgcgggagctggccggcaaggaaaacctggaataccctagcgtgaccctgccacctcagcctcacaccaaggagggcgttgatgcctacaacgaagtgatcgcccgggtgcgaatgtgggtgaacctgaacctgtggcagaagctgaagctaagcagagatgatgccaagcctctgctgagactgaagggattcccttcctttcctctggtcgagagacaggccaacgaagtggactggtgggacatggtgtgtaacgtgaagaagctgatcaacgagaaaaaggaggatggcaaggtgttttggcagaatctggctggctacaagagacaggaagccctgagaccatacctgagcagcgaggaagatcggaagaagggaaagaaattcgctcggtaccagctgggcgacctgctgctgcacctggaaaagaagcacggcgaggactggggaaaggtgtacgacgaggcctgggagcggattgacaagaaagtggaaggcctgagcaagcacatcaagctggaagaggaacggagaagcgaggacgcccagagcaaggccgccctgaccgactggctgcgggctaaggccagcttcgtgatcgagggcctgaaggaggccgacaaggacgagttctgcagatgcgagctgaagctgcagaagtggtacggggacctgcggggaaagcccttcgccatcgaagccgagaacagcatcctggacatcagcggcttcagcaagcagtacaactgtgccttcatctggcagaaggacggcgtgaagaagctgaacctgtacctgatcatcaactacttcaagggcggcaagctgcggttcaagaagatcaaacctgaagccttcgaagccaacagattctacaccgtgatcaacaaaaagagcggcgagatcgtgcccatggaggtgaacttcaacttcgacgaccccaacctgatcatcctgcctctggcctttggcaagagacagggcagagaattcatctggaacgacctgctgtccctggaaaccggcagcctgaagctggccaacggaagagtgatcgagaagacactgtacaacagaagaacccggcaggatgagcctgccctgttcgtggccctgaccttcgagcggcgggaggtcctggactcctccaatatcaaaccaatgaacctgatcggcgtggcaagaggcgaaaacatccccgccgtgatcgccctgaccgaccccgagggctgcccactgagccggtttaaggatagcctgggaaacccaacccacatcctgagaatcggcgagagctataaggagaagcagcggaccatccaggccaagaaggaggtggagcagcggagagccggcggctacagccggaagtacgccagcaaagccaagaatctggcagacgatatggtgagaaacaccgctagagatctgctgtactacgccgtgacccaggatgccatgctgatcttcgccaacctgagccggggcttcggccggcagggcaagcggaccttcatggccgagagacagtacacacggatggaggactggctgaccgccaagctggcctacgagggcctgagcaagacctacctgtccaagacactggcccagtacacctccaagacatgcagcaactgtgggtttaccatcaccagcgccgactacgacagggtgctggagaagctgaagaagacagcaacaggctggatgaccacaattaacggcaaggagctgaaggtggagggccagattacctactacaacagatacaagagacagaacgtagtcaaggacctgtccgtcgagctggatagactgagcgaagaatctgtgaacaacgacatctcctcctggacaaagggcagaagcggagaagctctgagcctcctgaagaaaagattctcccatagacccgtgcaggagaagttcgtgtgcctgaactgcggcttcgagacacacgcagccgagcaagccgccctgaacatcgccagatcctggctgttcctgcggagccaggagtacaagaaataccagacaaacaagacaaccggcaacaccgataagagagccttcgtcgagacctggcagtccttttaccggaagaagcttaaggaggtgtggaaacctgccgtgcggtctggcggatctggcggaggctccacaagcggcctgctgagcttcgaggacgtggccctgtacttcaccagggaggagtgggacaccctggactgggcccagaaggccctgtacagggacgtgatgctggacaactacaggcacatcgtgagcctgggcttccccttccccaagcccgaggtgatctgccagctggagcagtgggaggagccctggatcctggacctgcccagggccggcaccaggaaggccagcggcagcgcctgccccgacaccagccccaagaaaaagagaaaagtctaagctgccttctgcggggcttgccttctggccatgcccttcttctctcccttgcacctgtacctcttggtctttgaataaagcctgagtaggaaggctagcaaaaaaaaaaaaaaaaaaaaaaaaaaaaaaaaaaaaaaaaaaaaaaaaaaaaaaaaaaaaaaaaaaaaaaaaaaaaaaaa

SEQ ID NO: 5989 - RNA, 5797 nt, synthetic construct
  source 1..5797: mol_type = other RNA
aggaaataagagagaaaagaagagtaagaagaaatataagagccaccatggcccctaagaagaagcgtaaagtgagccggatggaacgcctcgtctacgaggtgcggcagaagtgcagaaacatcgaggacatctgcatctcctgcggatctctgaacgtgaccctggagcacccactgttcatcggcggcatgtgccagaactgtaaaaactgttttctggagtgtgcctatcaatacgacgatgacggctaccagagctactgcaccatctgttgcggcggaagagaggtgctgatgtgtggaaataacaactgctgccggtgcttctgcgtggaatgcgtggacctgctggtgggccccggcgccgcccaggccgctattaaggaagatccttggaactgctacatgtgcggccacaagggcacatacggcctgctgagacggagagaggactggcctagcagactgcagatgttcttcgccaataaccacgaccaggagttcgacccccctaaggtgtaccctcccgtccccgccgagaagagaaagcccatccgggtcctgagcctgttcgatggcatcgccaccggtctgctggtgctgaaggacctgggcatccaggtggataggtacattgcctccgaggtgtgcgaggactccatcaccgtgggaatggtgcgtcatcagggcaagatcatgtacgtgggcgacgtgcggagcgtgacacagaagcatatccaggagtggggccctttcgacctggtgatcggcggcagcccttgcaatgacctgagcatcgtgaacccagcccggaagggcctgtacgagggaaccggcagactgttcttcgagttttacagactgctgcacgacgcccggcctaaggaaggcgacgaccggcccttcttttggctgttcgagaatgtggtggccatgggagtcagcgacaagcgggatattagccggttcctggagagcaaccccgtgatgatcgatgccaaggaagtgagcgccgcccaccgggccagatacttctggggcaatctgcctggcatgaacagacccctggccagcaccgtgaacgacaagctggagctgcaggagtgcctggagcacggccggatcgccaagttcagcaaggtgagaaccatcaccacccgaagcaacagcatcaaacaaggcaaggaccagcactttcctgtgttcatgaacgagaaggaggacatcctgtggtgtaccgagatggagagagtgttcgggttcccagtccactacacagatgtcagcaacatgtctagactggccagacagagactgctgggaagaagctggtccgtccctgtgatcagacacctgttcgcccctctgaaggagtacttcgcctgcgtgagcagcggcaacagcaacgccaacagccggggccccagcttctctagcggcctggtgccactgtccctgagagggagccacatgggccccatggagatctacaaaaccgtgagcgcctggaagcggcagcctgtgcgcgtgctgagcctgtttcggaatatcgataaagtcctgaaaagcctgggattcctggagagcggctctggctccggcggtggcaccctgaagtacgtggaggatgtgacaaacgtggtcagacgggatgtggagaagtggggccccttcgatctggtgtacggcagcacccaacccctgggcagctcttgtgaccggtgccctggctggtacatgtttcagttccaccggatcctgcagtacgccctgccgagacaggagtcccagcggccattcttttggattttcatggacaacttgctgctgaccgaggatgaccaggaaactaccactcggttcctgcagaccgaagccgtgaccctgcaggacgtgagaggccgggactaccagaacgccatgcgggtgtggtccaacatccctggactgaaaagcaagcacgcacctctgacccctaaagaagaggagtacctgcaggcccaggtgcggagcagaagcaagctggacgcccctaaggtggatctgctggtgaagaattgcctcctgcccctgagagagtacttcaagtatttcagccagaatagtctgcccctgggcggcccaagcagcggcgcccctcctcccagcggcggcagcccagccggctccccaacctctaccgaggagggcacctctgagtccgccacccccgagagcggccctggcacctccaccgagcccagcgagggcagcgcacccggcagccctgccggcagccccacctccacagaggagggaaccagcaccgagcccagcgaaggcagcgccccaggcaccagcaccgagcctagtgagggcggctctggcggcggcagcgcccaggagattaaacggatcaacaagatcagaagaagacttgtgaaagacagcaacaccaagaaggccggcaagacaggccccatgaaaaccctgctggttagagtgatgacacccgatctgagagagcggctggaaaacctgagaaagaagcctgaaaatatcccccagcccatcagcaatacatctagagccaacctgaataagctgctgaccgattacaccgaaatgaagaaggcgatcctgcatgtgtactgggaagagttccagaaggaccctgtgggcctgatgagccgggtggcccagcctgccagcaagaagatcgatcagaacaagctgaaacctgagatggacgagaagggcaacctgaccaccgccggctttgcctgctctcagtgtggccagcccctgttcgtgtacaagctggagcaggtgtctgagaagggcaaggcttacaccaactacttcggacggtgcaatgtggccgagcacgaaaagctgatcctgctggcccagctgaagcccgagaaggatagcgacgaagccgtgacatatagcctgggaaagtttgggcagagggccctggatttctacagcattcatgtgaccaaggagtccacccaccccgtgaagcccctggcccagatcgccggaaacagatacgcctccggacctgtgggaaaggccctgagcgacgcatgtatgggcacaatcgcctccttcctgtctaagtaccaggacatcatcatcgaacaccagaaggtggtgaagggcaaccagaagagactggagagcctgcgggagctggccggcaaggaaaacctggaataccctagcgtgaccctgccacctcagcctcacaccaaggagggcgttgatgcctacaacgaagtgatcgcccgggtgcgaatgtgggtgaacctgaacctgtggcagaagctgaagctaagcagagatgatgccaagcctctgctgagactgaagggattcccttcctttcctctggtcgagagacaggccaacgaagtggactggtgggacatggtgtgtaacgtgaagaagctgatcaacgagaaaaaggaggatggcaaggtgttttggcagaatctggctggctacaagagacaggaagccctgagaccatacctgagcagcgaggaagatcggaagaagggaaagaaattcgctcggtaccagctgggcgacctgctgctgcacctggaaaagaagcacggcgaggactggggaaaggtgtacgacgaggcctgggagcggattgacaagaaagtggaaggcctgagcaagcacatcaagctggaagaggaacggagaagcgaggacgcccagagcaaggccgccctgaccgactggctgcgggctaaggccagcttcgtgatcgagggcctgaaggaggccgacaaggacgagttctgcagatgcgagctgaagctgcagaagtggtacggggacctgcggggaaagcccttcgccatcgaagccgagaacagcatcctggacatcagcggcttcagcaagcagtacaactgtgccttcatctggcagaaggacggcgtgaagaagctgaacctgtacctgatcatcaactacttcaagggcggcaagctgcggttcaagaagatcaaacctgaagccttcgaagccaacagattctacaccgtgatcaacaaaaagagcggcgagatcgtgcccatggaggtgaacttcaacttcgacgaccccaacctgatcatcctgcctctggcctttggcaagagacagggcagagaattcatctggaacgacctgctgtccctggaaaccggcagcctgaagctggccaacggaagagtgatcgagaagacactgtacaacagaagaacccggcaggatgagcctgccctgttcgtggccctgaccttcgagcggcgggaggtcctggactcctccaatatcaaaccaatgaacctgatcggcgtggcaagaggcgaaaacatccccgccgtgatcgccctgaccgaccccgagggctgcccactgagccggtttaaggatagcctgggaaacccaacccacatcctgagaatcggcgagagctataaggagaagcagcggaccatccaggccaagaaggaggtggagcagcggagagccggcggctacagccggaagtacgccagcaaagccaagaatctggcagacgatatggtgagaaacaccgctagagatctgctgtactacgccgtgacccaggatgccatgctgatcttcgccaacctgagccggggcttcggccggcagggcaagcggaccttcatggccgagagacagtacacacggatggaggactggctgaccgccaagctggcctacgagggcctgagcaagacctacctgtccaagacactggcccagtacacctccaagacatgcagcaactgtgggtttaccatcaccagcgccgactacgacagggtgctggagaagctgaagaagacagcaacaggctggatgaccacaattaacggcaaggagctgaaggtggagggccagattacctactacaacagatacaagagacagaacgtagtcaaggacctgtccgtcgagctggatagactgagcgaagaatctgtgaacaacgacatctcctcctggacaaagggcagaagcggagaagctctgagcctcctgaagaaaagattctcccatagacccgtgcaggagaagttcgtgtgcctgaactgcggcttcgagacacacgcagccgagcaagccgccctgaacatcgccagatcctggctgttcctgcggagccaggagtacaagaaataccagacaaacaagacaaccggcaacaccgataagagagccttcgtcgagacctggcagtccttttaccggaagaagcttaaggaggtgtggaaacctgccgtgcggtctggcggatctggcggaggctccacaagcgtgttccagggcagcctgagcttcgaggacgtgaccgtggacttcagcagggaggagtggaggctgctggacctggcccagaagagcctgtacagggacgtgatgctggagaactacttcaacctgatcagcgtgggctgccaggtgcccaagcaggaggtgctgttcagcctggagcaggaggagcccaggatgctggacggcgagatcagcagccacaactgcctgggcggcgacatcggcaccagccccaagaaaaagagaaaagtctaagctgccttctgcggggcttgccttctggccatgcccttcttctctcccttgcacctgtacctcttggtctttgaataaagcctgagtaggaaggctagcaaaaaaaaaaaaaaaaaaaaaaaaaaaaaaaaaaaaaaaaaaaaaaaaaaaaaaaaaaaaaaaaaaaaaaaaaaaaaaaa

SEQ ID NO: 5990 - RNA, 5797 nt, synthetic construct
  source 1..5797: mol_type = other RNA
aggaaataagagagaaaagaagagtaagaagaaatataagagccaccatggcccctaagaagaagcgtaaagtgagccggatggaacgcctcgtctacgaggtgcggcagaagtgcagaaacatcgaggacatctgcatctcctgcggatctctgaacgtgaccctggagcacccactgttcatcggcggcatgtgccagaactgtaaaaactgttttctggagtgtgcctatcaatacgacgatgacggctaccagagctactgcaccatctgttgcggcggaagagaggtgctgatgtgtggaaataacaactgctgccggtgcttctgcgtggaatgcgtggacctgctggtgggccccggcgccgcccaggccgctattaaggaagatccttggaactgctacatgtgcggccacaagggcacatacggcctgctgagacggagagaggactggcctagcagactgcagatgttcttcgccaataaccacgaccaggagttcgacccccctaaggtgtaccctcccgtccccgccgagaagagaaagcccatccgggtcctgagcctgttcgatggcatcgccaccggtctgctggtgctgaaggacctgggcatccaggtggataggtacattgcctccgaggtgtgcgaggactccatcaccgtgggaatggtgcgtcatcagggcaagatcatgtacgtgggcgacgtgcggagcgtgacacagaagcatatccaggagtggggccctttcgacctggtgatcggcggcagcccttgcaatgacctgagcatcgtgaacccagcccggaagggcctgtacgagggaaccggcagactgttcttcgagttttacagactgctgcacgacgcccggcctaaggaaggcgacgaccggcccttcttttggctgttcgagaatgtggtggccatgggagtcagcgacaagcgggatattagccggttcctggagagcaaccccgtgatgatcgatgccaaggaagtgagcgccgcccaccgggccagatacttctggggcaatctgcctggcatgaacagacccctggccagcaccgtgaacgacaagctggagctgcaggagtgcctggagcacggccggatcgccaagttcagcaaggtgagaaccatcaccacccgaagcaacagcatcaaacaaggcaaggaccagcactttcctgtgttcatgaacgagaaggaggacatcctgtggtgtaccgagatggagagagtgttcgggttcccagtccactacacagatgtcagcaacatgtctagactggccagacagagactgctgggaagaagctggtccgtccctgtgatcagacacctgttcgcccctctgaaggagtacttcgcctgcgtgagcagcggcaacagcaacgccaacagccggggccccagcttctctagcggcctggtgccactgtccctgagagggagccacatgggccccatggagatctacaaaaccgtgagcgcctggaagcggcagcctgtgcgcgtgctgagcctgtttcggaatatcgataaagtcctgaaaagcctgggattcctggagagcggctctggctccggcggtggcaccctgaagtacgtggaggatgtgacaaacgtggtcagacgggatgtggagaagtggggccccttcgatctggtgtacggcagcacccaacccctgggcagctcttgtgaccggtgccctggctggtacatgtttcagttccaccggatcctgcagtacgccctgccgagacaggagtcccagcggccattcttttggattttcatggacaacttgctgctgaccgaggatgaccaggaaactaccactcggttcctgcagaccgaagccgtgaccctgcaggacgtgagaggccgggactaccagaacgccatgcgggtgtggtccaacatccctggactgaaaagcaagcacgcacctctgacccctaaagaagaggagtacctgcaggcccaggtgcggagcagaagcaagctggacgcccctaaggtggatctgctggtgaagaattgcctcctgcccctgagagagtacttcaagtatttcagccagaatagtctgcccctgggcggcccaagcagcggcgcccctcctcccagcggcggcagcccagccggctccccaacctctaccgaggagggcacctctgagtccgccacccccgagagcggccctggcacctccaccgagcccagcgagggcagcgcacccggcagccctgccggcagccccacctccacagaggagggaaccagcaccgagcccagcgaaggcagcgccccaggcaccagcaccgagcctagtgagggcggctctggcggcggcagcgcccaggagattaaacggatcaacaagatcagaagaagacttgtgaaagacagcaacaccaagaaggccggcaagacaggccccatgaaaaccctgctggttagagtgatgacacccgatctgagagagcggctggaaaacctgagaaagaagcctgaaaatatcccccagcccatcagcaatacatctagagccaacctgaataagctgctgaccgattacaccgaaatgaagaaggcgatcctgcatgtgtactgggaagagttccagaaggaccctgtgggcctgatgagccgggtggcccagcctgccagcaagaagatcgatcagaacaagctgaaacctgagatggacgagaagggcaacctgaccaccgccggctttgcctgctctcagtgtggccagcccctgttcgtgtacaagctggagcaggtgtctgagaagggcaaggcttacaccaactacttcggacggtgcaatgtggccgagcacgaaaagctgatcctgctggcccagctgaagcccgagaaggatagcgacgaagccgtgacatatagcctgggaaagtttgggcagagggccctggatttctacagcattcatgtgaccaaggagtccacccaccccgtgaagcccctggcccagatcgccggaaacagatacgcctccggacctgtgggaaaggccctgagcgacgcatgtatgggcacaatcgcctccttcctgtctaagtaccaggacatcatcatcgaacaccagaaggtggtgaagggcaaccagaagagactggagagcctgcgggagctggccggcaaggaaaacctggaataccctagcgtgaccctgccacctcagcctcacaccaaggagggcgttgatgcctacaacgaagtgatcgcccgggtgcgaatgtgggtgaacctgaacctgtggcagaagctgaagctaagcagagatgatgccaagcctctgctgagactgaagggattcccttcctttcctctggtcgagagacaggccaacgaagtggactggtgggacatggtgtgtaacgtgaagaagctgatcaacgagaaaaaggaggatggcaaggtgttttggcagaatctggctggctacaagagacaggaagccctgagaccatacctgagcagcgaggaagatcggaagaagggaaagaaattcgctcggtaccagctgggcgacctgctgctgcacctggaaaagaagcacggcgaggactggggaaaggtgtacgacgaggcctgggagcggattgacaagaaagtggaaggcctgagcaagcacatcaagctggaagaggaacggagaagcgaggacgcccagagcaaggccgccctgaccgactggctgcgggctaaggccagcttcgtgatcgagggcctgaaggaggccgacaaggacgagttctgcagatgcgagctgaagctgcagaagtggtacggggacctgcggggaaagcccttcgccatcgaagccgagaacagcatcctggacatcagcggcttcagcaagcagtacaactgtgccttcatctggcagaaggacggcgtgaagaagctgaacctgtacctgatcatcaactacttcaagggcggcaagctgcggttcaagaagatcaaacctgaagccttcgaagccaacagattctacaccgtgatcaacaaaaagagcggcgagatcgtgcccatggaggtgaacttcaacttcgacgaccccaacctgatcatcctgcctctggcctttggcaagagacagggcagagaattcatctggaacgacctgctgtccctggaaaccggcagcctgaagctggccaacggaagagtgatcgagaagacactgtacaacagaagaacccggcaggatgagcctgccctgttcgtggccctgaccttcgagcggcgggaggtcctggactcctccaatatcaaaccaatgaacctgatcggcgtggcaagaggcgaaaacatccccgccgtgatcgccctgaccgaccccgagggctgcccactgagccggtttaaggatagcctgggaaacccaacccacatcctgagaatcggcgagagctataaggagaagcagcggaccatccaggccaagaaggaggtggagcagcggagagccggcggctacagccggaagtacgccagcaaagccaagaatctggcagacgatatggtgagaaacaccgctagagatctgctgtactacgccgtgacccaggatgccatgctgatcttcgccaacctgagccggggcttcggccggcagggcaagcggaccttcatggccgagagacagtacacacggatggaggactggctgaccgccaagctggcctacgagggcctgagcaagacctacctgtccaagacactggcccagtacacctccaagacatgcagcaactgtgggtttaccatcaccagcgccgactacgacagggtgctggagaagctgaagaagacagcaacaggctggatgaccacaattaacggcaaggagctgaaggtggagggccagattacctactacaacagatacaagagacagaacgtagtcaaggacctgtccgtcgagctggatagactgagcgaagaatctgtgaacaacgacatctcctcctggacaaagggcagaagcggagaagctctgagcctcctgaagaaaagattctcccatagacccgtgcaggagaagttcgtgtgcctgaactgcggcttcgagacacacgcagccgagcaagccgccctgaacatcgccagatcctggctgttcctgcggagccaggagtacaagaaataccagacaaacaagacaaccggcaacaccgataagagagccttcgtcgagacctggcagtccttttaccggaagaagcttaaggaggtgtggaaacctgccgtgcggtctggcggatctggcggaggctccacaagcatgcccgtgaccttcgaggaggtggccgtgtacttcacccagggccagggcgccctgctggaccccgcccagagggccctgtacagggacgtgatgcaggagaactacgagaccgtgaccagcctgggcttccccatccccaagcccgagctgatcgccaggctggagaggggcgaggagccctgggtgcccgacctgcaggcctgcaaggagaggaggctgcccaggtgcaccaggaccggcaccagccccaagaaaaagagaaaagtctaagctgccttctgcggggcttgccttctggccatgcccttcttctctcccttgcacctgtacctcttggtctttgaataaagcctgagtaggaaggctagcaaaaaaaaaaaaaaaaaaaaaaaaaaaaaaaaaaaaaaaaaaaaaaaaaaaaaaaaaaaaaaaaaaaaaaaaaaaaaaaa

SEQ ID NO: 5991 - RNA, 5797 nt, synthetic construct
  source 1..5797: mol_type = other RNA
aggaaataagagagaaaagaagagtaagaagaaatataagagccaccatggcccctaagaagaagcgtaaagtgagccggatggaacgcctcgtctacgaggtgcggcagaagtgcagaaacatcgaggacatctgcatctcctgcggatctctgaacgtgaccctggagcacccactgttcatcggcggcatgtgccagaactgtaaaaactgttttctggagtgtgcctatcaatacgacgatgacggctaccagagctactgcaccatctgttgcggcggaagagaggtgctgatgtgtggaaataacaactgctgccggtgcttctgcgtggaatgcgtggacctgctggtgggccccggcgccgcccaggccgctattaaggaagatccttggaactgctacatgtgcggccacaagggcacatacggcctgctgagacggagagaggactggcctagcagactgcagatgttcttcgccaataaccacgaccaggagttcgacccccctaaggtgtaccctcccgtccccgccgagaagagaaagcccatccgggtcctgagcctgttcgatggcatcgccaccggtctgctggtgctgaaggacctgggcatccaggtggataggtacattgcctccgaggtgtgcgaggactccatcaccgtgggaatggtgcgtcatcagggcaagatcatgtacgtgggcgacgtgcggagcgtgacacagaagcatatccaggagtggggccctttcgacctggtgatcggcggcagcccttgcaatgacctgagcatcgtgaacccagcccggaagggcctgtacgagggaaccggcagactgttcttcgagttttacagactgctgcacgacgcccggcctaaggaaggcgacgaccggcccttcttttggctgttcgagaatgtggtggccatgggagtcagcgacaagcgggatattagccggttcctggagagcaaccccgtgatgatcgatgccaaggaagtgagcgccgcccaccgggccagatacttctggggcaatctgcctggcatgaacagacccctggccagcaccgtgaacgacaagctggagctgcaggagtgcctggagcacggccggatcgccaagttcagcaaggtgagaaccatcaccacccgaagcaacagcatcaaacaaggcaaggaccagcactttcctgtgttcatgaacgagaaggaggacatcctgtggtgtaccgagatggagagagtgttcgggttcccagtccactacacagatgtcagcaacatgtctagactggccagacagagactgctgggaagaagctggtccgtccctgtgatcagacacctgttcgcccctctgaaggagtacttcgcctgcgtgagcagcggcaacagcaacgccaacagccggggccccagcttctctagcggcctggtgccactgtccctgagagggagccacatgggccccatggagatctacaaaaccgtgagcgcctggaagcggcagcctgtgcgcgtgctgagcctgtttcggaatatcgataaagtcctgaaaagcctgggattcctggagagcggctctggctccggcggtggcaccctgaagtacgtggaggatgtgacaaacgtggtcagacgggatgtggagaagtggggccccttcgatctggtgtacggcagcacccaacccctgggcagctcttgtgaccggtgccctggctggtacatgtttcagttccaccggatcctgcagtacgccctgccgagacaggagtcccagcggccattcttttggattttcatggacaacttgctgctgaccgaggatgaccaggaaactaccactcggttcctgcagaccgaagccgtgaccctgcaggacgtgagaggccgggactaccagaacgccatgcgggtgtggtccaacatccctggactgaaaagcaagcacgcacctctgacccctaaagaagaggagtacctgcaggcccaggtgcggagcagaagcaagctggacgcccctaaggtggatctgctggtgaagaattgcctcctgcccctgagagagtacttcaagtatttcagccagaatagtctgcccctgggcggcccaagcagcggcgcccctcctcccagcggcggcagcccagccggctccccaacctctaccgaggagggcacctctgagtccgccacccccgagagcggccctggcacctccaccgagcccagcgagggcagcgcacccggcagccctgccggcagccccacctccacagaggagggaaccagcaccgagcccagcgaaggcagcgccccaggcaccagcaccgagcctagtgagggcggctctggcggcggcagcgcccaggagattaaacggatcaacaagatcagaagaagacttgtgaaagacagcaacaccaagaaggccggcaagacaggccccatgaaaaccctgctggttagagtgatgacacccgatctgagagagcggctggaaaacctgagaaagaagcctgaaaatatcccccagcccatcagcaatacatctagagccaacctgaataagctgctgaccgattacaccgaaatgaagaaggcgatcctgcatgtgtactgggaagagttccagaaggaccctgtgggcctgatgagccgggtggcccagcctgccagcaagaagatcgatcagaacaagctgaaacctgagatggacgagaagggcaacctgaccaccgccggctttgcctgctctcagtgtggccagcccctgttcgtgtacaagctggagcaggtgtctgagaagggcaaggcttacaccaactacttcggacggtgcaatgtggccgagcacgaaaagctgatcctgctggcccagctgaagcccgagaaggatagcgacgaagccgtgacatatagcctgggaaagtttgggcagagggccctggatttctacagcattcatgtgaccaaggagtccacccaccccgtgaagcccctggcccagatcgccggaaacagatacgcctccggacctgtgggaaaggccctgagcgacgcatgtatgggcacaatcgcctccttcctgtctaagtaccaggacatcatcatcgaacaccagaaggtggtgaagggcaaccagaagagactggagagcctgcgggagctggccggcaaggaaaacctggaataccctagcgtgaccctgccacctcagcctcacaccaaggagggcgttgatgcctacaacgaagtgatcgcccgggtgcgaatgtgggtgaacctgaacctgtggcagaagctgaagctaagcagagatgatgccaagcctctgctgagactgaagggattcccttcctttcctctggtcgagagacaggccaacgaagtggactggtgggacatggtgtgtaacgtgaagaagctgatcaacgagaaaaaggaggatggcaaggtgttttggcagaatctggctggctacaagagacaggaagccctgagaccatacctgagcagcgaggaagatcggaagaagggaaagaaattcgctcggtaccagctgggcgacctgctgctgcacctggaaaagaagcacggcgaggactggggaaaggtgtacgacgaggcctgggagcggattgacaagaaagtggaaggcctgagcaagcacatcaagctggaagaggaacggagaagcgaggacgcccagagcaaggccgccctgaccgactggctgcgggctaaggccagcttcgtgatcgagggcctgaaggaggccgacaaggacgagttctgcagatgcgagctgaagctgcagaagtggtacggggacctgcggggaaagcccttcgccatcgaagccgagaacagcatcctggacatcagcggcttcagcaagcagtacaactgtgccttcatctggcagaaggacggcgtgaagaagctgaacctgtacctgatcatcaactacttcaagggcggcaagctgcggttcaagaagatcaaacctgaagccttcgaagccaacagattctacaccgtgatcaacaaaaagagcggcgagatcgtgcccatggaggtgaacttcaacttcgacgaccccaacctgatcatcctgcctctggcctttggcaagagacagggcagagaattcatctggaacgacctgctgtccctggaaaccggcagcctgaagctggccaacggaagagtgatcgagaagacactgtacaacagaagaacccggcaggatgagcctgccctgttcgtggccctgaccttcgagcggcgggaggtcctggactcctccaatatcaaaccaatgaacctgatcggcgtggcaagaggcgaaaacatccccgccgtgatcgccctgaccgaccccgagggctgcccactgagccggtttaaggatagcctgggaaacccaacccacatcctgagaatcggcgagagctataaggagaagcagcggaccatccaggccaagaaggaggtggagcagcggagagccggcggctacagccggaagtacgccagcaaagccaagaatctggcagacgatatggtgagaaacaccgctagagatctgctgtactacgccgtgacccaggatgccatgctgatcttcgccaacctgagccggggcttcggccggcagggcaagcggaccttcatggccgagagacagtacacacggatggaggactggctgaccgccaagctggcctacgagggcctgagcaagacctacctgtccaagacactggcccagtacacctccaagacatgcagcaactgtgggtttaccatcaccagcgccgactacgacagggtgctggagaagctgaagaagacagcaacaggctggatgaccacaattaacggcaaggagctgaaggtggagggccagattacctactacaacagatacaagagacagaacgtagtcaaggacctgtccgtcgagctggatagactgagcgaagaatctgtgaacaacgacatctcctcctggacaaagggcagaagcggagaagctctgagcctcctgaagaaaagattctcccatagacccgtgcaggagaagttcgtgtgcctgaactgcggcttcgagacacacgcagccgagcaagccgccctgaacatcgccagatcctggctgttcctgcggagccaggagtacaagaaataccagacaaacaagacaaccggcaacaccgataagagagccttcgtcgagacctggcagtccttttaccggaagaagcttaaggaggtgtggaaacctgccgtgcggtctggcggatctggcggaggctccacaagcagccagagcctggtgaccttcggcgacgtggccgtgaacttcagccaggaggagtgggagtggctgaacagcgcccagaggaacctgtacaggagcgtgatgctggagaactacaggaacctggtgagcctgggcctgtgcgtgagcaagcccgacatgatcagcagcctggagcagaggaaggagccctggatggtgaagaggaagctgaccaggggcaggtgccccgacctgaaggccgtgaccagccccaagaaaaagagaaaagtctaagctgccttctgcggggcttgccttctggccatgcccttcttctctcccttgcacctgtacctcttggtctttgaataaagcctgagtaggaaggctagcaaaaaaaaaaaaaaaaaaaaaaaaaaaaaaaaaaaaaaaaaaaaaaaaaaaaaaaaaaaaaaaaaaaaaaaaaaaaaaaa

SEQ ID NO: 5992 - RNA, 5797 nt, synthetic construct
  source 1..5797: mol_type = other RNA
aggaaataagagagaaaagaagagtaagaagaaatataagagccaccatggcccctaagaagaagcgtaaagtgagccggatggaacgcctcgtctacgaggtgcggcagaagtgcagaaacatcgaggacatctgcatctcctgcggatctctgaacgtgaccctggagcacccactgttcatcggcggcatgtgccagaactgtaaaaactgttttctggagtgtgcctatcaatacgacgatgacggctaccagagctactgcaccatctgttgcggcggaagagaggtgctgatgtgtggaaataacaactgctgccggtgcttctgcgtggaatgcgtggacctgctggtgggccccggcgccgcccaggccgctattaaggaagatccttggaactgctacatgtgcggccacaagggcacatacggcctgctgagacggagagaggactggcctagcagactgcagatgttcttcgccaataaccacgaccaggagttcgacccccctaaggtgtaccctcccgtccccgccgagaagagaaagcccatccgggtcctgagcctgttcgatggcatcgccaccggtctgctggtgctgaaggacctgggcatccaggtggataggtacattgcctccgaggtgtgcgaggactccatcaccgtgggaatggtgcgtcatcagggcaagatcatgtacgtgggcgacgtgcggagcgtgacacagaagcatatccaggagtggggccctttcgacctggtgatcggcggcagcccttgcaatgacctgagcatcgtgaacccagcccggaagggcctgtacgagggaaccggcagactgttcttcgagttttacagactgctgcacgacgcccggcctaaggaaggcgacgaccggcccttcttttggctgttcgagaatgtggtggccatgggagtcagcgacaagcgggatattagccggttcctggagagcaaccccgtgatgatcgatgccaaggaagtgagcgccgcccaccgggccagatacttctggggcaatctgcctggcatgaacagacccctggccagcaccgtgaacgacaagctggagctgcaggagtgcctggagcacggccggatcgccaagttcagcaaggtgagaaccatcaccacccgaagcaacagcatcaaacaaggcaaggaccagcactttcctgtgttcatgaacgagaaggaggacatcctgtggtgtaccgagatggagagagtgttcgggttcccagtccactacacagatgtcagcaacatgtctagactggccagacagagactgctgggaagaagctggtccgtccctgtgatcagacacctgttcgcccctctgaaggagtacttcgcctgcgtgagcagcggcaacagcaacgccaacagccggggccccagcttctctagcggcctggtgccactgtccctgagagggagccacatgggccccatggagatctacaaaaccgtgagcgcctggaagcggcagcctgtgcgcgtgctgagcctgtttcggaatatcgataaagtcctgaaaagcctgggattcctggagagcggctctggctccggcggtggcaccctgaagtacgtggaggatgtgacaaacgtggtcagacgggatgtggagaagtggggccccttcgatctggtgtacggcagcacccaacccctgggcagctcttgtgaccggtgccctggctggtacatgtttcagttccaccggatcctgcagtacgccctgccgagacaggagtcccagcggccattcttttggattttcatggacaacttgctgctgaccgaggatgaccaggaaactaccactcggttcctgcagaccgaagccgtgaccctgcaggacgtgagaggccgggactaccagaacgccatgcgggtgtggtccaacatccctggactgaaaagcaagcacgcacctctgacccctaaagaagaggagtacctgcaggcccaggtgcggagcagaagcaagctggacgcccctaaggtggatctgctggtgaagaattgcctcctgcccctgagagagtacttcaagtatttcagccagaatagtctgcccctgggcggcccaagcagcggcgcccctcctcccagcggcggcagcccagccggctccccaacctctaccgaggagggcacctctgagtccgccacccccgagagcggccctggcacctccaccgagcccagcgagggcagcgcacccggcagccctgccggcagccccacctccacagaggagggaaccagcaccgagcccagcgaaggcagcgccccaggcaccagcaccgagcctagtgagggcggctctggcggcggcagcgcccaggagattaaacggatcaacaagatcagaagaagacttgtgaaagacagcaacaccaagaaggccggcaagacaggccccatgaaaaccctgctggttagagtgatgacacccgatctgagagagcggctggaaaacctgagaaagaagcctgaaaatatcccccagcccatcagcaatacatctagagccaacctgaataagctgctgaccgattacaccgaaatgaagaaggcgatcctgcatgtgtactgggaagagttccagaaggaccctgtgggcctgatgagccgggtggcccagcctgccagcaagaagatcgatcagaacaagctgaaacctgagatggacgagaagggcaacctgaccaccgccggctttgcctgctctcagtgtggccagcccctgttcgtgtacaagctggagcaggtgtctgagaagggcaaggcttacaccaactacttcggacggtgcaatgtggccgagcacgaaaagctgatcctgctggcccagctgaagcccgagaaggatagcgacgaagccgtgacatatagcctgggaaagtttgggcagagggccctggatttctacagcattcatgtgaccaaggagtccacccaccccgtgaagcccctggcccagatcgccggaaacagatacgcctccggacctgtgggaaaggccctgagcgacgcatgtatgggcacaatcgcctccttcctgtctaagtaccaggacatcatcatcgaacaccagaaggtggtgaagggcaaccagaagagactggagagcctgcgggagctggccggcaaggaaaacctggaataccctagcgtgaccctgccacctcagcctcacaccaaggagggcgttgatgcctacaacgaagtgatcgcccgggtgcgaatgtgggtgaacctgaacctgtggcagaagctgaagctaagcagagatgatgccaagcctctgctgagactgaagggattcccttcctttcctctggtcgagagacaggccaacgaagtggactggtgggacatggtgtgtaacgtgaagaagctgatcaacgagaaaaaggaggatggcaaggtgttttggcagaatctggctggctacaagagacaggaagccctgagaccatacctgagcagcgaggaagatcggaagaagggaaagaaattcgctcggtaccagctgggcgacctgctgctgcacctggaaaagaagcacggcgaggactggggaaaggtgtacgacgaggcctgggagcggattgacaagaaagtggaaggcctgagcaagcacatcaagctggaagaggaacggagaagcgaggacgcccagagcaaggccgccctgaccgactggctgcgggctaaggccagcttcgtgatcgagggcctgaaggaggccgacaaggacgagttctgcagatgcgagctgaagctgcagaagtggtacggggacctgcggggaaagcccttcgccatcgaagccgagaacagcatcctggacatcagcggcttcagcaagcagtacaactgtgccttcatctggcagaaggacggcgtgaagaagctgaacctgtacctgatcatcaactacttcaagggcggcaagctgcggttcaagaagatcaaacctgaagccttcgaagccaacagattctacaccgtgatcaacaaaaagagcggcgagatcgtgcccatggaggtgaacttcaacttcgacgaccccaacctgatcatcctgcctctggcctttggcaagagacagggcagagaattcatctggaacgacctgctgtccctggaaaccggcagcctgaagctggccaacggaagagtgatcgagaagacactgtacaacagaagaacccggcaggatgagcctgccctgttcgtggccctgaccttcgagcggcgggaggtcctggactcctccaatatcaaaccaatgaacctgatcggcgtggcaagaggcgaaaacatccccgccgtgatcgccctgaccgaccccgagggctgcccactgagccggtttaaggatagcctgggaaacccaacccacatcctgagaatcggcgagagctataaggagaagcagcggaccatccaggccaagaaggaggtggagcagcggagagccggcggctacagccggaagtacgccagcaaagccaagaatctggcagacgatatggtgagaaacaccgctagagatctgctgtactacgccgtgacccaggatgccatgctgatcttcgccaacctgagccggggcttcggccggcagggcaagcggaccttcatggccgagagacagtacacacggatggaggactggctgaccgccaagctggcctacgagggcctgagcaagacctacctgtccaagacactggcccagtacacctccaagacatgcagcaactgtgggtttaccatcaccagcgccgactacgacagggtgctggagaagctgaagaagacagcaacaggctggatgaccacaattaacggcaaggagctgaaggtggagggccagattacctactacaacagatacaagagacagaacgtagtcaaggacctgtccgtcgagctggatagactgagcgaagaatctgtgaacaacgacatctcctcctggacaaagggcagaagcggagaagctctgagcctcctgaagaaaagattctcccatagacccgtgcaggagaagttcgtgtgcctgaactgcggcttcgagacacacgcagccgagcaagccgccctgaacatcgccagatcctggctgttcctgcggagccaggagtacaagaaataccagacaaacaagacaaccggcaacaccgataagagagccttcgtcgagacctggcagtccttttaccggaagaagcttaaggaggtgtggaaacctgccgtgcggtctggcggatctggcggaggctccacaagcgaggagctgcccgtggtgttcgaggacgtggccgtgtacttcaccagggaggagtggggcatgctggtgaagaggcagaaggagctgtacagggacgtgatgaggatgaactacgagctgctggccgccctgggccccgccgccgccaagcccgacctgatcagcaagctggagaggagggccgccccctggatcaaggaccccaacaggcccaagtggggcaagggcaggcccctgggcaagaccagccccaagaaaaagagaaaagtctaagctgccttctgcggggcttgccttctggccatgcccttcttctctcccttgcacctgtacctcttggtctttgaataaagcctgagtaggaaggctagcaaaaaaaaaaaaaaaaaaaaaaaaaaaaaaaaaaaaaaaaaaaaaaaaaaaaaaaaaaaaaaaaaaaaaaaaaaaaaaaa

SEQ ID NO: 5993 - RNA, 5797 nt, synthetic construct
  source 1..5797: mol_type = other RNA
aggaaataagagagaaaagaagagtaagaagaaatataagagccaccatggcccctaagaagaagcgtaaagtgagccggatggaacgcctcgtctacgaggtgcggcagaagtgcagaaacatcgaggacatctgcatctcctgcggatctctgaacgtgaccctggagcacccactgttcatcggcggcatgtgccagaactgtaaaaactgttttctggagtgtgcctatcaatacgacgatgacggctaccagagctactgcaccatctgttgcggcggaagagaggtgctgatgtgtggaaataacaactgctgccggtgcttctgcgtggaatgcgtggacctgctggtgggccccggcgccgcccaggccgctattaaggaagatccttggaactgctacatgtgcggccacaagggcacatacggcctgctgagacggagagaggactggcctagcagactgcagatgttcttcgccaataaccacgaccaggagttcgacccccctaaggtgtaccctcccgtccccgccgagaagagaaagcccatccgggtcctgagcctgttcgatggcatcgccaccggtctgctggtgctgaaggacctgggcatccaggtggataggtacattgcctccgaggtgtgcgaggactccatcaccgtgggaatggtgcgtcatcagggcaagatcatgtacgtgggcgacgtgcggagcgtgacacagaagcatatccaggagtggggccctttcgacctggtgatcggcggcagcccttgcaatgacctgagcatcgtgaacccagcccggaagggcctgtacgagggaaccggcagactgttcttcgagttttacagactgctgcacgacgcccggcctaaggaaggcgacgaccggcccttcttttggctgttcgagaatgtggtggccatgggagtcagcgacaagcgggatattagccggttcctggagagcaaccccgtgatgatcgatgccaaggaagtgagcgccgcccaccgggccagatacttctggggcaatctgcctggcatgaacagacccctggccagcaccgtgaacgacaagctggagctgcaggagtgcctggagcacggccggatcgccaagttcagcaaggtgagaaccatcaccacccgaagcaacagcatcaaacaaggcaaggaccagcactttcctgtgttcatgaacgagaaggaggacatcctgtggtgtaccgagatggagagagtgttcgggttcccagtccactacacagatgtcagcaacatgtctagactggccagacagagactgctgggaagaagctggtccgtccctgtgatcagacacctgttcgcccctctgaaggagtacttcgcctgcgtgagcagcggcaacagcaacgccaacagccggggccccagcttctctagcggcctggtgccactgtccctgagagggagccacatgggccccatggagatctacaaaaccgtgagcgcctggaagcggcagcctgtgcgcgtgctgagcctgtttcggaatatcgataaagtcctgaaaagcctgggattcctggagagcggctctggctccggcggtggcaccctgaagtacgtggaggatgtgacaaacgtggtcagacgggatgtggagaagtggggccccttcgatctggtgtacggcagcacccaacccctgggcagctcttgtgaccggtgccctggctggtacatgtttcagttccaccggatcctgcagtacgccctgccgagacaggagtcccagcggccattcttttggattttcatggacaacttgctgctgaccgaggatgaccaggaaactaccactcggttcctgcagaccgaagccgtgaccctgcaggacgtgagaggccgggactaccagaacgccatgcgggtgtggtccaacatccctggactgaaaagcaagcacgcacctctgacccctaaagaagaggagtacctgcaggcccaggtgcggagcagaagcaagctggacgcccctaaggtggatctgctggtgaagaattgcctcctgcccctgagagagtacttcaagtatttcagccagaatagtctgcccctgggcggcccaagcagcggcgcccctcctcccagcggcggcagcccagccggctccccaacctctaccgaggagggcacctctgagtccgccacccccgagagcggccctggcacctccaccgagcccagcgagggcagcgcacccggcagccctgccggcagccccacctccacagaggagggaaccagcaccgagcccagcgaaggcagcgccccaggcaccagcaccgagcctagtgagggcggctctggcggcggcagcgcccaggagattaaacggatcaacaagatcagaagaagacttgtgaaagacagcaacaccaagaaggccggcaagacaggccccatgaaaaccctgctggttagagtgatgacacccgatctgagagagcggctggaaaacctgagaaagaagcctgaaaatatcccccagcccatcagcaatacatctagagccaacctgaataagctgctgaccgattacaccgaaatgaagaaggcgatcctgcatgtgtactgggaagagttccagaaggaccctgtgggcctgatgagccgggtggcccagcctgccagcaagaagatcgatcagaacaagctgaaacctgagatggacgagaagggcaacctgaccaccgccggctttgcctgctctcagtgtggccagcccctgttcgtgtacaagctggagcaggtgtctgagaagggcaaggcttacaccaactacttcggacggtgcaatgtggccgagcacgaaaagctgatcctgctggcccagctgaagcccgagaaggatagcgacgaagccgtgacatatagcctgggaaagtttgggcagagggccctggatttctacagcattcatgtgaccaaggagtccacccaccccgtgaagcccctggcccagatcgccggaaacagatacgcctccggacctgtgggaaaggccctgagcgacgcatgtatgggcacaatcgcctccttcctgtctaagtaccaggacatcatcatcgaacaccagaaggtggtgaagggcaaccagaagagactggagagcctgcgggagctggccggcaaggaaaacctggaataccctagcgtgaccctgccacctcagcctcacaccaaggagggcgttgatgcctacaacgaagtgatcgcccgggtgcgaatgtgggtgaacctgaacctgtggcagaagctgaagctaagcagagatgatgccaagcctctgctgagactgaagggattcccttcctttcctctggtcgagagacaggccaacgaagtggactggtgggacatggtgtgtaacgtgaagaagctgatcaacgagaaaaaggaggatggcaaggtgttttggcagaatctggctggctacaagagacaggaagccctgagaccatacctgagcagcgaggaagatcggaagaagggaaagaaattcgctcggtaccagctgggcgacctgctgctgcacctggaaaagaagcacggcgaggactggggaaaggtgtacgacgaggcctgggagcggattgacaagaaagtggaaggcctgagcaagcacatcaagctggaagaggaacggagaagcgaggacgcccagagcaaggccgccctgaccgactggctgcgggctaaggccagcttcgtgatcgagggcctgaaggaggccgacaaggacgagttctgcagatgcgagctgaagctgcagaagtggtacggggacctgcggggaaagcccttcgccatcgaagccgagaacagcatcctggacatcagcggcttcagcaagcagtacaactgtgccttcatctggcagaaggacggcgtgaagaagctgaacctgtacctgatcatcaactacttcaagggcggcaagctgcggttcaagaagatcaaacctgaagccttcgaagccaacagattctacaccgtgatcaacaaaaagagcggcgagatcgtgcccatggaggtgaacttcaacttcgacgaccccaacctgatcatcctgcctctggcctttggcaagagacagggcagagaattcatctggaacgacctgctgtccctggaaaccggcagcctgaagctggccaacggaagagtgatcgagaagacactgtacaacagaagaacccggcaggatgagcctgccctgttcgtggccctgaccttcgagcggcgggaggtcctggactcctccaatatcaaaccaatgaacctgatcggcgtggcaagaggcgaaaacatccccgccgtgatcgccctgaccgaccccgagggctgcccactgagccggtttaaggatagcctgggaaacccaacccacatcctgagaatcggcgagagctataaggagaagcagcggaccatccaggccaagaaggaggtggagcagcggagagccggcggctacagccggaagtacgccagcaaagccaagaatctggcagacgatatggtgagaaacaccgctagagatctgctgtactacgccgtgacccaggatgccatgctgatcttcgccaacctgagccggggcttcggccggcagggcaagcggaccttcatggccgagagacagtacacacggatggaggactggctgaccgccaagctggcctacgagggcctgagcaagacctacctgtccaagacactggcccagtacacctccaagacatgcagcaactgtgggtttaccatcaccagcgccgactacgacagggtgctggagaagctgaagaagacagcaacaggctggatgaccacaattaacggcaaggagctgaaggtggagggccagattacctactacaacagatacaagagacagaacgtagtcaaggacctgtccgtcgagctggatagactgagcgaagaatctgtgaacaacgacatctcctcctggacaaagggcagaagcggagaagctctgagcctcctgaagaaaagattctcccatagacccgtgcaggagaagttcgtgtgcctgaactgcggcttcgagacacacgcagccgagcaagccgccctgaacatcgccagatcctggctgttcctgcggagccaggagtacaagaaataccagacaaacaagacaaccggcaacaccgataagagagccttcgtcgagacctggcagtccttttaccggaagaagcttaaggaggtgtggaaacctgccgtgcggtctggcggatctggcggaggctccacaagcccccagaagagcgtgaccttcgaggacgtggccgtgtacttcacccagaccgagtgggacggcctgagccccgcccagagggccctgtacagggacgtgatgctggagaactacggcaacgtggccagcctgggcttcagcctgctgaagcccgccgtgatcagccagctggagggcgccggcgagctgggcaggcccagccccctggtggccggcaccgagatcggcctgcagggcctgtggaccagccccaagaaaaagagaaaagtctaagctgccttctgcggggcttgccttctggccatgcccttcttctctcccttgcacctgtacctcttggtctttgaataaagcctgagtaggaaggctagcaaaaaaaaaaaaaaaaaaaaaaaaaaaaaaaaaaaaaaaaaaaaaaaaaaaaaaaaaaaaaaaaaaaaaaaaaaaaaaaa

SEQ ID NO: 5994 - RNA, 5797 nt, synthetic construct
  source 1..5797: mol_type = other RNA
aggaaataagagagaaaagaagagtaagaagaaatataagagccaccatggcccctaagaagaagcgtaaagtgagccggatggaacgcctcgtctacgaggtgcggcagaagtgcagaaacatcgaggacatctgcatctcctgcggatctctgaacgtgaccctggagcacccactgttcatcggcggcatgtgccagaactgtaaaaactgttttctggagtgtgcctatcaatacgacgatgacggctaccagagctactgcaccatctgttgcggcggaagagaggtgctgatgtgtggaaataacaactgctgccggtgcttctgcgtggaatgcgtggacctgctggtgggccccggcgccgcccaggccgctattaaggaagatccttggaactgctacatgtgcggccacaagggcacatacggcctgctgagacggagagaggactggcctagcagactgcagatgttcttcgccaataaccacgaccaggagttcgacccccctaaggtgtaccctcccgtccccgccgagaagagaaagcccatccgggtcctgagcctgttcgatggcatcgccaccggtctgctggtgctgaaggacctgggcatccaggtggataggtacattgcctccgaggtgtgcgaggactccatcaccgtgggaatggtgcgtcatcagggcaagatcatgtacgtgggcgacgtgcggagcgtgacacagaagcatatccaggagtggggccctttcgacctggtgatcggcggcagcccttgcaatgacctgagcatcgtgaacccagcccggaagggcctgtacgagggaaccggcagactgttcttcgagttttacagactgctgcacgacgcccggcctaaggaaggcgacgaccggcccttcttttggctgttcgagaatgtggtggccatgggagtcagcgacaagcgggatattagccggttcctggagagcaaccccgtgatgatcgatgccaaggaagtgagcgccgcccaccgggccagatacttctggggcaatctgcctggcatgaacagacccctggccagcaccgtgaacgacaagctggagctgcaggagtgcctggagcacggccggatcgccaagttcagcaaggtgagaaccatcaccacccgaagcaacagcatcaaacaaggcaaggaccagcactttcctgtgttcatgaacgagaaggaggacatcctgtggtgtaccgagatggagagagtgttcgggttcccagtccactacacagatgtcagcaacatgtctagactggccagacagagactgctgggaagaagctggtccgtccctgtgatcagacacctgttcgcccctctgaaggagtacttcgcctgcgtgagcagcggcaacagcaacgccaacagccggggccccagcttctctagcggcctggtgccactgtccctgagagggagccacatgggccccatggagatctacaaaaccgtgagcgcctggaagcggcagcctgtgcgcgtgctgagcctgtttcggaatatcgataaagtcctgaaaagcctgggattcctggagagcggctctggctccggcggtggcaccctgaagtacgtggaggatgtgacaaacgtggtcagacgggatgtggagaagtggggccccttcgatctggtgtacggcagcacccaacccctgggcagctcttgtgaccggtgccctggctggtacatgtttcagttccaccggatcctgcagtacgccctgccgagacaggagtcccagcggccattcttttggattttcatggacaacttgctgctgaccgaggatgaccaggaaactaccactcggttcctgcagaccgaagccgtgaccctgcaggacgtgagaggccgggactaccagaacgccatgcgggtgtggtccaacatccctggactgaaaagcaagcacgcacctctgacccctaaagaagaggagtacctgcaggcccaggtgcggagcagaagcaagctggacgcccctaaggtggatctgctggtgaagaattgcctcctgcccctgagagagtacttcaagtatttcagccagaatagtctgcccctgggcggcccaagcagcggcgcccctcctcccagcggcggcagcccagccggctccccaacctctaccgaggagggcacctctgagtccgccacccccgagagcggccctggcacctccaccgagcccagcgagggcagcgcacccggcagccctgccggcagccccacctccacagaggagggaaccagcaccgagcccagcgaaggcagcgccccaggcaccagcaccgagcctagtgagggcggctctggcggcggcagcgcccaggagattaaacggatcaacaagatcagaagaagacttgtgaaagacagcaacaccaagaaggccggcaagacaggccccatgaaaaccctgctggttagagtgatgacacccgatctgagagagcggctggaaaacctgagaaagaagcctgaaaatatcccccagcccatcagcaatacatctagagccaacctgaataagctgctgaccgattacaccgaaatgaagaaggcgatcctgcatgtgtactgggaagagttccagaaggaccctgtgggcctgatgagccgggtggcccagcctgccagcaagaagatcgatcagaacaagctgaaacctgagatggacgagaagggcaacctgaccaccgccggctttgcctgctctcagtgtggccagcccctgttcgtgtacaagctggagcaggtgtctgagaagggcaaggcttacaccaactacttcggacggtgcaatgtggccgagcacgaaaagctgatcctgctggcccagctgaagcccgagaaggatagcgacgaagccgtgacatatagcctgggaaagtttgggcagagggccctggatttctacagcattcatgtgaccaaggagtccacccaccccgtgaagcccctggcccagatcgccggaaacagatacgcctccggacctgtgggaaaggccctgagcgacgcatgtatgggcacaatcgcctccttcctgtctaagtaccaggacatcatcatcgaacaccagaaggtggtgaagggcaaccagaagagactggagagcctgcgggagctggccggcaaggaaaacctggaataccctagcgtgaccctgccacctcagcctcacaccaaggagggcgttgatgcctacaacgaagtgatcgcccgggtgcgaatgtgggtgaacctgaacctgtggcagaagctgaagctaagcagagatgatgccaagcctctgctgagactgaagggattcccttcctttcctctggtcgagagacaggccaacgaagtggactggtgggacatggtgtgtaacgtgaagaagctgatcaacgagaaaaaggaggatggcaaggtgttttggcagaatctggctggctacaagagacaggaagccctgagaccatacctgagcagcgaggaagatcggaagaagggaaagaaattcgctcggtaccagctgggcgacctgctgctgcacctggaaaagaagcacggcgaggactggggaaaggtgtacgacgaggcctgggagcggattgacaagaaagtggaaggcctgagcaagcacatcaagctggaagaggaacggagaagcgaggacgcccagagcaaggccgccctgaccgactggctgcgggctaaggccagcttcgtgatcgagggcctgaaggaggccgacaaggacgagttctgcagatgcgagctgaagctgcagaagtggtacggggacctgcggggaaagcccttcgccatcgaagccgagaacagcatcctggacatcagcggcttcagcaagcagtacaactgtgccttcatctggcagaaggacggcgtgaagaagctgaacctgtacctgatcatcaactacttcaagggcggcaagctgcggttcaagaagatcaaacctgaagccttcgaagccaacagattctacaccgtgatcaacaaaaagagcggcgagatcgtgcccatggaggtgaacttcaacttcgacgaccccaacctgatcatcctgcctctggcctttggcaagagacagggcagagaattcatctggaacgacctgctgtccctggaaaccggcagcctgaagctggccaacggaagagtgatcgagaagacactgtacaacagaagaacccggcaggatgagcctgccctgttcgtggccctgaccttcgagcggcgggaggtcctggactcctccaatatcaaaccaatgaacctgatcggcgtggcaagaggcgaaaacatccccgccgtgatcgccctgaccgaccccgagggctgcccactgagccggtttaaggatagcctgggaaacccaacccacatcctgagaatcggcgagagctataaggagaagcagcggaccatccaggccaagaaggaggtggagcagcggagagccggcggctacagccggaagtacgccagcaaagccaagaatctggcagacgatatggtgagaaacaccgctagagatctgctgtactacgccgtgacccaggatgccatgctgatcttcgccaacctgagccggggcttcggccggcagggcaagcggaccttcatggccgagagacagtacacacggatggaggactggctgaccgccaagctggcctacgagggcctgagcaagacctacctgtccaagacactggcccagtacacctccaagacatgcagcaactgtgggtttaccatcaccagcgccgactacgacagggtgctggagaagctgaagaagacagcaacaggctggatgaccacaattaacggcaaggagctgaaggtggagggccagattacctactacaacagatacaagagacagaacgtagtcaaggacctgtccgtcgagctggatagactgagcgaagaatctgtgaacaacgacatctcctcctggacaaagggcagaagcggagaagctctgagcctcctgaagaaaagattctcccatagacccgtgcaggagaagttcgtgtgcctgaactgcggcttcgagacacacgcagccgagcaagccgccctgaacatcgccagatcctggctgttcctgcggagccaggagtacaagaaataccagacaaacaagacaaccggcaacaccgataagagagccttcgtcgagacctggcagtccttttaccggaagaagcttaaggaggtgtggaaacctgccgtgcggtctggcggatctggcggaggctccacaagcgcccaggaggtggtgagcttcaaggacgtggccgtggacttcaccagggaggagtggaggctgctgagccccccccagaaggagctgtacaaggaggtgatgctggagaacgccaggaacctgctgagcgtgggcctgcccgcccccagcgaggaggtgatcagctacctggagcagagggaggccccctggatcctggagcaggagggcctgaggaactgctgcagcgagggcgagatcaggaccagccccaagaaaaagagaaaagtctaagctgccttctgcggggcttgccttctggccatgcccttcttctctcccttgcacctgtacctcttggtctttgaataaagcctgagtaggaaggctagcaaaaaaaaaaaaaaaaaaaaaaaaaaaaaaaaaaaaaaaaaaaaaaaaaaaaaaaaaaaaaaaaaaaaaaaaaaaaaaaa

SEQ ID NO: 5995 - RNA, 5797 nt, synthetic construct
  source 1..5797: mol_type = other RNA
aggaaataagagagaaaagaagagtaagaagaaatataagagccaccatggcccctaagaagaagcgtaaagtgagccggatggaacgcctcgtctacgaggtgcggcagaagtgcagaaacatcgaggacatctgcatctcctgcggatctctgaacgtgaccctggagcacccactgttcatcggcggcatgtgccagaactgtaaaaactgttttctggagtgtgcctatcaatacgacgatgacggctaccagagctactgcaccatctgttgcggcggaagagaggtgctgatgtgtggaaataacaactgctgccggtgcttctgcgtggaatgcgtggacctgctggtgggccccggcgccgcccaggccgctattaaggaagatccttggaactgctacatgtgcggccacaagggcacatacggcctgctgagacggagagaggactggcctagcagactgcagatgttcttcgccaataaccacgaccaggagttcgacccccctaaggtgtaccctcccgtccccgccgagaagagaaagcccatccgggtcctgagcctgttcgatggcatcgccaccggtctgctggtgctgaaggacctgggcatccaggtggataggtacattgcctccgaggtgtgcgaggactccatcaccgtgggaatggtgcgtcatcagggcaagatcatgtacgtgggcgacgtgcggagcgtgacacagaagcatatccaggagtggggccctttcgacctggtgatcggcggcagcccttgcaatgacctgagcatcgtgaacccagcccggaagggcctgtacgagggaaccggcagactgttcttcgagttttacagactgctgcacgacgcccggcctaaggaaggcgacgaccggcccttcttttggctgttcgagaatgtggtggccatgggagtcagcgacaagcgggatattagccggttcctggagagcaaccccgtgatgatcgatgccaaggaagtgagcgccgcccaccgggccagatacttctggggcaatctgcctggcatgaacagacccctggccagcaccgtgaacgacaagctggagctgcaggagtgcctggagcacggccggatcgccaagttcagcaaggtgagaaccatcaccacccgaagcaacagcatcaaacaaggcaaggaccagcactttcctgtgttcatgaacgagaaggaggacatcctgtggtgtaccgagatggagagagtgttcgggttcccagtccactacacagatgtcagcaacatgtctagactggccagacagagactgctgggaagaagctggtccgtccctgtgatcagacacctgttcgcccctctgaaggagtacttcgcctgcgtgagcagcggcaacagcaacgccaacagccggggccccagcttctctagcggcctggtgccactgtccctgagagggagccacatgggccccatggagatctacaaaaccgtgagcgcctggaagcggcagcctgtgcgcgtgctgagcctgtttcggaatatcgataaagtcctgaaaagcctgggattcctggagagcggctctggctccggcggtggcaccctgaagtacgtggaggatgtgacaaacgtggtcagacgggatgtggagaagtggggccccttcgatctggtgtacggcagcacccaacccctgggcagctcttgtgaccggtgccctggctggtacatgtttcagttccaccggatcctgcagtacgccctgccgagacaggagtcccagcggccattcttttggattttcatggacaacttgctgctgaccgaggatgaccaggaaactaccactcggttcctgcagaccgaagccgtgaccctgcaggacgtgagaggccgggactaccagaacgccatgcgggtgtggtccaacatccctggactgaaaagcaagcacgcacctctgacccctaaagaagaggagtacctgcaggcccaggtgcggagcagaagcaagctggacgcccctaaggtggatctgctggtgaagaattgcctcctgcccctgagagagtacttcaagtatttcagccagaatagtctgcccctgggcggcccaagcagcggcgcccctcctcccagcggcggcagcccagccggctccccaacctctaccgaggagggcacctctgagtccgccacccccgagagcggccctggcacctccaccgagcccagcgagggcagcgcacccggcagccctgccggcagccccacctccacagaggagggaaccagcaccgagcccagcgaaggcagcgccccaggcaccagcaccgagcctagtgagggcggctctggcggcggcagcgcccaggagattaaacggatcaacaagatcagaagaagacttgtgaaagacagcaacaccaagaaggccggcaagacaggccccatgaaaaccctgctggttagagtgatgacacccgatctgagagagcggctggaaaacctgagaaagaagcctgaaaatatcccccagcccatcagcaatacatctagagccaacctgaataagctgctgaccgattacaccgaaatgaagaaggcgatcctgcatgtgtactgggaagagttccagaaggaccctgtgggcctgatgagccgggtggcccagcctgccagcaagaagatcgatcagaacaagctgaaacctgagatggacgagaagggcaacctgaccaccgccggctttgcctgctctcagtgtggccagcccctgttcgtgtacaagctggagcaggtgtctgagaagggcaaggcttacaccaactacttcggacggtgcaatgtggccgagcacgaaaagctgatcctgctggcccagctgaagcccgagaaggatagcgacgaagccgtgacatatagcctgggaaagtttgggcagagggccctggatttctacagcattcatgtgaccaaggagtccacccaccccgtgaagcccctggcccagatcgccggaaacagatacgcctccggacctgtgggaaaggccctgagcgacgcatgtatgggcacaatcgcctccttcctgtctaagtaccaggacatcatcatcgaacaccagaaggtggtgaagggcaaccagaagagactggagagcctgcgggagctggccggcaaggaaaacctggaataccctagcgtgaccctgccacctcagcctcacaccaaggagggcgttgatgcctacaacgaagtgatcgcccgggtgcgaatgtgggtgaacctgaacctgtggcagaagctgaagctaagcagagatgatgccaagcctctgctgagactgaagggattcccttcctttcctctggtcgagagacaggccaacgaagtggactggtgggacatggtgtgtaacgtgaagaagctgatcaacgagaaaaaggaggatggcaaggtgttttggcagaatctggctggctacaagagacaggaagccctgagaccatacctgagcagcgaggaagatcggaagaagggaaagaaattcgctcggtaccagctgggcgacctgctgctgcacctggaaaagaagcacggcgaggactggggaaaggtgtacgacgaggcctgggagcggattgacaagaaagtggaaggcctgagcaagcacatcaagctggaagaggaacggagaagcgaggacgcccagagcaaggccgccctgaccgactggctgcgggctaaggccagcttcgtgatcgagggcctgaaggaggccgacaaggacgagttctgcagatgcgagctgaagctgcagaagtggtacggggacctgcggggaaagcccttcgccatcgaagccgagaacagcatcctggacatcagcggcttcagcaagcagtacaactgtgccttcatctggcagaaggacggcgtgaagaagctgaacctgtacctgatcatcaactacttcaagggcggcaagctgcggttcaagaagatcaaacctgaagccttcgaagccaacagattctacaccgtgatcaacaaaaagagcggcgagatcgtgcccatggaggtgaacttcaacttcgacgaccccaacctgatcatcctgcctctggcctttggcaagagacagggcagagaattcatctggaacgacctgctgtccctggaaaccggcagcctgaagctggccaacggaagagtgatcgagaagacactgtacaacagaagaacccggcaggatgagcctgccctgttcgtggccctgaccttcgagcggcgggaggtcctggactcctccaatatcaaaccaatgaacctgatcggcgtggcaagaggcgaaaacatccccgccgtgatcgccctgaccgaccccgagggctgcccactgagccggtttaaggatagcctgggaaacccaacccacatcctgagaatcggcgagagctataaggagaagcagcggaccatccaggccaagaaggaggtggagcagcggagagccggcggctacagccggaagtacgccagcaaagccaagaatctggcagacgatatggtgagaaacaccgctagagatctgctgtactacgccgtgacccaggatgccatgctgatcttcgccaacctgagccggggcttcggccggcagggcaagcggaccttcatggccgagagacagtacacacggatggaggactggctgaccgccaagctggcctacgagggcctgagcaagacctacctgtccaagacactggcccagtacacctccaagacatgcagcaactgtgggtttaccatcaccagcgccgactacgacagggtgctggagaagctgaagaagacagcaacaggctggatgaccacaattaacggcaaggagctgaaggtggagggccagattacctactacaacagatacaagagacagaacgtagtcaaggacctgtccgtcgagctggatagactgagcgaagaatctgtgaacaacgacatctcctcctggacaaagggcagaagcggagaagctctgagcctcctgaagaaaagattctcccatagacccgtgcaggagaagttcgtgtgcctgaactgcggcttcgagacacacgcagccgagcaagccgccctgaacatcgccagatcctggctgttcctgcggagccaggagtacaagaaataccagacaaacaagacaaccggcaacaccgataagagagccttcgtcgagacctggcagtccttttaccggaagaagcttaaggaggtgtggaaacctgccgtgcggtctggcggatctggcggaggctccacaagcatggccttcgaggacgtggccgtgtacttcagcagggaggagtgggagctgctggacaccgcccagagggccctgtacaggcacgtgatgctggagaacttcgccctggtggccagcctgggcttcagccccagcaggccctgcgtggtgatccagctggagagcggcaaggagccctggctgcacagcggcatggacaccaccatgagcaggcacgcccacaagaggcccagcagcggcagcaccagccccaagaaaaagagaaaagtctaagctgccttctgcggggcttgccttctggccatgcccttcttctctcccttgcacctgtacctcttggtctttgaataaagcctgagtaggaaggctagcaaaaaaaaaaaaaaaaaaaaaaaaaaaaaaaaaaaaaaaaaaaaaaaaaaaaaaaaaaaaaaaaaaaaaaaaaaaaaaaa

SEQ ID NO: 5996 - RNA, 5797 nt, synthetic construct
  source 1..5797: mol_type = other RNA
aggaaataagagagaaaagaagagtaagaagaaatataagagccaccatggcccctaagaagaagcgtaaagtgagccggatggaacgcctcgtctacgaggtgcggcagaagtgcagaaacatcgaggacatctgcatctcctgcggatctctgaacgtgaccctggagcacccactgttcatcggcggcatgtgccagaactgtaaaaactgttttctggagtgtgcctatcaatacgacgatgacggctaccagagctactgcaccatctgttgcggcggaagagaggtgctgatgtgtggaaataacaactgctgccggtgcttctgcgtggaatgcgtggacctgctggtgggccccggcgccgcccaggccgctattaaggaagatccttggaactgctacatgtgcggccacaagggcacatacggcctgctgagacggagagaggactggcctagcagactgcagatgttcttcgccaataaccacgaccaggagttcgacccccctaaggtgtaccctcccgtccccgccgagaagagaaagcccatccgggtcctgagcctgttcgatggcatcgccaccggtctgctggtgctgaaggacctgggcatccaggtggataggtacattgcctccgaggtgtgcgaggactccatcaccgtgggaatggtgcgtcatcagggcaagatcatgtacgtgggcgacgtgcggagcgtgacacagaagcatatccaggagtggggccctttcgacctggtgatcggcggcagcccttgcaatgacctgagcatcgtgaacccagcccggaagggcctgtacgagggaaccggcagactgttcttcgagttttacagactgctgcacgacgcccggcctaaggaaggcgacgaccggcccttcttttggctgttcgagaatgtggtggccatgggagtcagcgacaagcgggatattagccggttcctggagagcaaccccgtgatgatcgatgccaaggaagtgagcgccgcccaccgggccagatacttctggggcaatctgcctggcatgaacagacccctggccagcaccgtgaacgacaagctggagctgcaggagtgcctggagcacggccggatcgccaagttcagcaaggtgagaaccatcaccacccgaagcaacagcatcaaacaaggcaaggaccagcactttcctgtgttcatgaacgagaaggaggacatcctgtggtgtaccgagatggagagagtgttcgggttcccagtccactacacagatgtcagcaacatgtctagactggccagacagagactgctgggaagaagctggtccgtccctgtgatcagacacctgttcgcccctctgaaggagtacttcgcctgcgtgagcagcggcaacagcaacgccaacagccggggccccagcttctctagcggcctggtgccactgtccctgagagggagccacatgggccccatggagatctacaaaaccgtgagcgcctggaagcggcagcctgtgcgcgtgctgagcctgtttcggaatatcgataaagtcctgaaaagcctgggattcctggagagcggctctggctccggcggtggcaccctgaagtacgtggaggatgtgacaaacgtggtcagacgggatgtggagaagtggggccccttcgatctggtgtacggcagcacccaacccctgggcagctcttgtgaccggtgccctggctggtacatgtttcagttccaccggatcctgcagtacgccctgccgagacaggagtcccagcggccattcttttggattttcatggacaacttgctgctgaccgaggatgaccaggaaactaccactcggttcctgcagaccgaagccgtgaccctgcaggacgtgagaggccgggactaccagaacgccatgcgggtgtggtccaacatccctggactgaaaagcaagcacgcacctctgacccctaaagaagaggagtacctgcaggcccaggtgcggagcagaagcaagctggacgcccctaaggtggatctgctggtgaagaattgcctcctgcccctgagagagtacttcaagtatttcagccagaatagtctgcccctgggcggcccaagcagcggcgcccctcctcccagcggcggcagcccagccggctccccaacctctaccgaggagggcacctctgagtccgccacccccgagagcggccctggcacctccaccgagcccagcgagggcagcgcacccggcagccctgccggcagccccacctccacagaggagggaaccagcaccgagcccagcgaaggcagcgccccaggcaccagcaccgagcctagtgagggcggctctggcggcggcagcgcccaggagattaaacggatcaacaagatcagaagaagacttgtgaaagacagcaacaccaagaaggccggcaagacaggccccatgaaaaccctgctggttagagtgatgacacccgatctgagagagcggctggaaaacctgagaaagaagcctgaaaatatcccccagcccatcagcaatacatctagagccaacctgaataagctgctgaccgattacaccgaaatgaagaaggcgatcctgcatgtgtactgggaagagttccagaaggaccctgtgggcctgatgagccgggtggcccagcctgccagcaagaagatcgatcagaacaagctgaaacctgagatggacgagaagggcaacctgaccaccgccggctttgcctgctctcagtgtggccagcccctgttcgtgtacaagctggagcaggtgtctgagaagggcaaggcttacaccaactacttcggacggtgcaatgtggccgagcacgaaaagctgatcctgctggcccagctgaagcccgagaaggatagcgacgaagccgtgacatatagcctgggaaagtttgggcagagggccctggatttctacagcattcatgtgaccaaggagtccacccaccccgtgaagcccctggcccagatcgccggaaacagatacgcctccggacctgtgggaaaggccctgagcgacgcatgtatgggcacaatcgcctccttcctgtctaagtaccaggacatcatcatcgaacaccagaaggtggtgaagggcaaccagaagagactggagagcctgcgggagctggccggcaaggaaaacctggaataccctagcgtgaccctgccacctcagcctcacaccaaggagggcgttgatgcctacaacgaagtgatcgcccgggtgcgaatgtgggtgaacctgaacctgtggcagaagctgaagctaagcagagatgatgccaagcctctgctgagactgaagggattcccttcctttcctctggtcgagagacaggccaacgaagtggactggtgggacatggtgtgtaacgtgaagaagctgatcaacgagaaaaaggaggatggcaaggtgttttggcagaatctggctggctacaagagacaggaagccctgagaccatacctgagcagcgaggaagatcggaagaagggaaagaaattcgctcggtaccagctgggcgacctgctgctgcacctggaaaagaagcacggcgaggactggggaaaggtgtacgacgaggcctgggagcggattgacaagaaagtggaaggcctgagcaagcacatcaagctggaagaggaacggagaagcgaggacgcccagagcaaggccgccctgaccgactggctgcgggctaaggccagcttcgtgatcgagggcctgaaggaggccgacaaggacgagttctgcagatgcgagctgaagctgcagaagtggtacggggacctgcggggaaagcccttcgccatcgaagccgagaacagcatcctggacatcagcggcttcagcaagcagtacaactgtgccttcatctggcagaaggacggcgtgaagaagctgaacctgtacctgatcatcaactacttcaagggcggcaagctgcggttcaagaagatcaaacctgaagccttcgaagccaacagattctacaccgtgatcaacaaaaagagcggcgagatcgtgcccatggaggtgaacttcaacttcgacgaccccaacctgatcatcctgcctctggcctttggcaagagacagggcagagaattcatctggaacgacctgctgtccctggaaaccggcagcctgaagctggccaacggaagagtgatcgagaagacactgtacaacagaagaacccggcaggatgagcctgccctgttcgtggccctgaccttcgagcggcgggaggtcctggactcctccaatatcaaaccaatgaacctgatcggcgtggcaagaggcgaaaacatccccgccgtgatcgccctgaccgaccccgagggctgcccactgagccggtttaaggatagcctgggaaacccaacccacatcctgagaatcggcgagagctataaggagaagcagcggaccatccaggccaagaaggaggtggagcagcggagagccggcggctacagccggaagtacgccagcaaagccaagaatctggcagacgatatggtgagaaacaccgctagagatctgctgtactacgccgtgacccaggatgccatgctgatcttcgccaacctgagccggggcttcggccggcagggcaagcggaccttcatggccgagagacagtacacacggatggaggactggctgaccgccaagctggcctacgagggcctgagcaagacctacctgtccaagacactggcccagtacacctccaagacatgcagcaactgtgggtttaccatcaccagcgccgactacgacagggtgctggagaagctgaagaagacagcaacaggctggatgaccacaattaacggcaaggagctgaaggtggagggccagattacctactacaacagatacaagagacagaacgtagtcaaggacctgtccgtcgagctggatagactgagcgaagaatctgtgaacaacgacatctcctcctggacaaagggcagaagcggagaagctctgagcctcctgaagaaaagattctcccatagacccgtgcaggagaagttcgtgtgcctgaactgcggcttcgagacacacgcagccgagcaagccgccctgaacatcgccagatcctggctgttcctgcggagccaggagtacaagaaataccagacaaacaagacaaccggcaacaccgataagagagccttcgtcgagacctggcagtccttttaccggaagaagcttaaggaggtgtggaaacctgccgtgcggtctggcggatctggcggaggctccacaagcatgatcgagtaccagatccccgtgagcttcaaggacgtggtggtgggcttcacccaggaggagtggcaccagctgagccccgcccagagggccctgtacagggacgtgatgctggagacctacagcaacctggtgagcgtgggctacgagggcaccaagcccgacgtgatcctgaggctggagcaggaggaggccccctggatcggcgaggccgcctgccccggctgccactgctggggcatcaccagccccaagaaaaagagaaaagtctaagctgccttctgcggggcttgccttctggccatgcccttcttctctcccttgcacctgtacctcttggtctttgaataaagcctgagtaggaaggctagcaaaaaaaaaaaaaaaaaaaaaaaaaaaaaaaaaaaaaaaaaaaaaaaaaaaaaaaaaaaaaaaaaaaaaaaaaaaaaaaa

SEQ ID NO: 5997 - RNA, 5797 nt, synthetic construct
  source 1..5797: mol_type = other RNA
aggaaataagagagaaaagaagagtaagaagaaatataagagccaccatggcccctaagaagaagcgtaaagtgagccggatggaacgcctcgtctacgaggtgcggcagaagtgcagaaacatcgaggacatctgcatctcctgcggatctctgaacgtgaccctggagcacccactgttcatcggcggcatgtgccagaactgtaaaaactgttttctggagtgtgcctatcaatacgacgatgacggctaccagagctactgcaccatctgttgcggcggaagagaggtgctgatgtgtggaaataacaactgctgccggtgcttctgcgtggaatgcgtggacctgctggtgggccccggcgccgcccaggccgctattaaggaagatccttggaactgctacatgtgcggccacaagggcacatacggcctgctgagacggagagaggactggcctagcagactgcagatgttcttcgccaataaccacgaccaggagttcgacccccctaaggtgtaccctcccgtccccgccgagaagagaaagcccatccgggtcctgagcctgttcgatggcatcgccaccggtctgctggtgctgaaggacctgggcatccaggtggataggtacattgcctccgaggtgtgcgaggactccatcaccgtgggaatggtgcgtcatcagggcaagatcatgtacgtgggcgacgtgcggagcgtgacacagaagcatatccaggagtggggccctttcgacctggtgatcggcggcagcccttgcaatgacctgagcatcgtgaacccagcccggaagggcctgtacgagggaaccggcagactgttcttcgagttttacagactgctgcacgacgcccggcctaaggaaggcgacgaccggcccttcttttggctgttcgagaatgtggtggccatgggagtcagcgacaagcgggatattagccggttcctggagagcaaccccgtgatgatcgatgccaaggaagtgagcgccgcccaccgggccagatacttctggggcaatctgcctggcatgaacagacccctggccagcaccgtgaacgacaagctggagctgcaggagtgcctggagcacggccggatcgccaagttcagcaaggtgagaaccatcaccacccgaagcaacagcatcaaacaaggcaaggaccagcactttcctgtgttcatgaacgagaaggaggacatcctgtggtgtaccgagatggagagagtgttcgggttcccagtccactacacagatgtcagcaacatgtctagactggccagacagagactgctgggaagaagctggtccgtccctgtgatcagacacctgttcgcccctctgaaggagtacttcgcctgcgtgagcagcggcaacagcaacgccaacagccggggccccagcttctctagcggcctggtgccactgtccctgagagggagccacatgggccccatggagatctacaaaaccgtgagcgcctggaagcggcagcctgtgcgcgtgctgagcctgtttcggaatatcgataaagtcctgaaaagcctgggattcctggagagcggctctggctccggcggtggcaccctgaagtacgtggaggatgtgacaaacgtggtcagacgggatgtggagaagtggggccccttcgatctggtgtacggcagcacccaacccctgggcagctcttgtgaccggtgccctggctggtacatgtttcagttccaccggatcctgcagtacgccctgccgagacaggagtcccagcggccattcttttggattttcatggacaacttgctgctgaccgaggatgaccaggaaactaccactcggttcctgcagaccgaagccgtgaccctgcaggacgtgagaggccgggactaccagaacgccatgcgggtgtggtccaacatccctggactgaaaagcaagcacgcacctctgacccctaaagaagaggagtacctgcaggcccaggtgcggagcagaagcaagctggacgcccctaaggtggatctgctggtgaagaattgcctcctgcccctgagagagtacttcaagtatttcagccagaatagtctgcccctgggcggcccaagcagcggcgcccctcctcccagcggcggcagcccagccggctccccaacctctaccgaggagggcacctctgagtccgccacccccgagagcggccctggcacctccaccgagcccagcgagggcagcgcacccggcagccctgccggcagccccacctccacagaggagggaaccagcaccgagcccagcgaaggcagcgccccaggcaccagcaccgagcctagtgagggcggctctggcggcggcagcgcccaggagattaaacggatcaacaagatcagaagaagacttgtgaaagacagcaacaccaagaaggccggcaagacaggccccatgaaaaccctgctggttagagtgatgacacccgatctgagagagcggctggaaaacctgagaaagaagcctgaaaatatcccccagcccatcagcaatacatctagagccaacctgaataagctgctgaccgattacaccgaaatgaagaaggcgatcctgcatgtgtactgggaagagttccagaaggaccctgtgggcctgatgagccgggtggcccagcctgccagcaagaagatcgatcagaacaagctgaaacctgagatggacgagaagggcaacctgaccaccgccggctttgcctgctctcagtgtggccagcccctgttcgtgtacaagctggagcaggtgtctgagaagggcaaggcttacaccaactacttcggacggtgcaatgtggccgagcacgaaaagctgatcctgctggcccagctgaagcccgagaaggatagcgacgaagccgtgacatatagcctgggaaagtttgggcagagggccctggatttctacagcattcatgtgaccaaggagtccacccaccccgtgaagcccctggcccagatcgccggaaacagatacgcctccggacctgtgggaaaggccctgagcgacgcatgtatgggcacaatcgcctccttcctgtctaagtaccaggacatcatcatcgaacaccagaaggtggtgaagggcaaccagaagagactggagagcctgcgggagctggccggcaaggaaaacctggaataccctagcgtgaccctgccacctcagcctcacaccaaggagggcgttgatgcctacaacgaagtgatcgcccgggtgcgaatgtgggtgaacctgaacctgtggcagaagctgaagctaagcagagatgatgccaagcctctgctgagactgaagggattcccttcctttcctctggtcgagagacaggccaacgaagtggactggtgggacatggtgtgtaacgtgaagaagctgatcaacgagaaaaaggaggatggcaaggtgttttggcagaatctggctggctacaagagacaggaagccctgagaccatacctgagcagcgaggaagatcggaagaagggaaagaaattcgctcggtaccagctgggcgacctgctgctgcacctggaaaagaagcacggcgaggactggggaaaggtgtacgacgaggcctgggagcggattgacaagaaagtggaaggcctgagcaagcacatcaagctggaagaggaacggagaagcgaggacgcccagagcaaggccgccctgaccgactggctgcgggctaaggccagcttcgtgatcgagggcctgaaggaggccgacaaggacgagttctgcagatgcgagctgaagctgcagaagtggtacggggacctgcggggaaagcccttcgccatcgaagccgagaacagcatcctggacatcagcggcttcagcaagcagtacaactgtgccttcatctggcagaaggacggcgtgaagaagctgaacctgtacctgatcatcaactacttcaagggcggcaagctgcggttcaagaagatcaaacctgaagccttcgaagccaacagattctacaccgtgatcaacaaaaagagcggcgagatcgtgcccatggaggtgaacttcaacttcgacgaccccaacctgatcatcctgcctctggcctttggcaagagacagggcagagaattcatctggaacgacctgctgtccctggaaaccggcagcctgaagctggccaacggaagagtgatcgagaagacactgtacaacagaagaacccggcaggatgagcctgccctgttcgtggccctgaccttcgagcggcgggaggtcctggactcctccaatatcaaaccaatgaacctgatcggcgtggcaagaggcgaaaacatccccgccgtgatcgccctgaccgaccccgagggctgcccactgagccggtttaaggatagcctgggaaacccaacccacatcctgagaatcggcgagagctataaggagaagcagcggaccatccaggccaagaaggaggtggagcagcggagagccggcggctacagccggaagtacgccagcaaagccaagaatctggcagacgatatggtgagaaacaccgctagagatctgctgtactacgccgtgacccaggatgccatgctgatcttcgccaacctgagccggggcttcggccggcagggcaagcggaccttcatggccgagagacagtacacacggatggaggactggctgaccgccaagctggcctacgagggcctgagcaagacctacctgtccaagacactggcccagtacacctccaagacatgcagcaactgtgggtttaccatcaccagcgccgactacgacagggtgctggagaagctgaagaagacagcaacaggctggatgaccacaattaacggcaaggagctgaaggtggagggccagattacctactacaacagatacaagagacagaacgtagtcaaggacctgtccgtcgagctggatagactgagcgaagaatctgtgaacaacgacatctcctcctggacaaagggcagaagcggagaagctctgagcctcctgaagaaaagattctcccatagacccgtgcaggagaagttcgtgtgcctgaactgcggcttcgagacacacgcagccgagcaagccgccctgaacatcgccagatcctggctgttcctgcggagccaggagtacaagaaataccagacaaacaagacaaccggcaacaccgataagagagccttcgtcgagacctggcagtccttttaccggaagaagcttaaggaggtgtggaaacctgccgtgcggtctggcggatctggcggaggctccacaagcgcccaggtgcccgtgaccttcgaggacgtggccgtgtacttcagcagggaggagtgggccgccctggacggcaggcagaaggagctgtacagggacgtgatgaggggcaactacgagctggtggccagcctgggctgccccgccgccaagcccgacctgatctgccagatcgagagggacgaggagctgggcgtgggcgagccccagggcaggcccgtgaggaggcagccccagaggaggagcaccagccccaagaaaaagagaaaagtctaagctgccttctgcggggcttgccttctggccatgcccttcttctctcccttgcacctgtacctcttggtctttgaataaagcctgagtaggaaggctagcaaaaaaaaaaaaaaaaaaaaaaaaaaaaaaaaaaaaaaaaaaaaaaaaaaaaaaaaaaaaaaaaaaaaaaaaaaaaaaaa

SEQ ID NO: 5998 - RNA, 5797 nt, synthetic construct
  source 1..5797: mol_type = other RNA
aggaaataagagagaaaagaagagtaagaagaaatataagagccaccatggcccctaagaagaagcgtaaagtgagccggatggaacgcctcgtctacgaggtgcggcagaagtgcagaaacatcgaggacatctgcatctcctgcggatctctgaacgtgaccctggagcacccactgttcatcggcggcatgtgccagaactgtaaaaactgttttctggagtgtgcctatcaatacgacgatgacggctaccagagctactgcaccatctgttgcggcggaagagaggtgctgatgtgtggaaataacaactgctgccggtgcttctgcgtggaatgcgtggacctgctggtgggccccggcgccgcccaggccgctattaaggaagatccttggaactgctacatgtgcggccacaagggcacatacggcctgctgagacggagagaggactggcctagcagactgcagatgttcttcgccaataaccacgaccaggagttcgacccccctaaggtgtaccctcccgtccccgccgagaagagaaagcccatccgggtcctgagcctgttcgatggcatcgccaccggtctgctggtgctgaaggacctgggcatccaggtggataggtacattgcctccgaggtgtgcgaggactccatcaccgtgggaatggtgcgtcatcagggcaagatcatgtacgtgggcgacgtgcggagcgtgacacagaagcatatccaggagtggggccctttcgacctggtgatcggcggcagcccttgcaatgacctgagcatcgtgaacccagcccggaagggcctgtacgagggaaccggcagactgttcttcgagttttacagactgctgcacgacgcccggcctaaggaaggcgacgaccggcccttcttttggctgttcgagaatgtggtggccatgggagtcagcgacaagcgggatattagccggttcctggagagcaaccccgtgatgatcgatgccaaggaagtgagcgccgcccaccgggccagatacttctggggcaatctgcctggcatgaacagacccctggccagcaccgtgaacgacaagctggagctgcaggagtgcctggagcacggccggatcgccaagttcagcaaggtgagaaccatcaccacccgaagcaacagcatcaaacaaggcaaggaccagcactttcctgtgttcatgaacgagaaggaggacatcctgtggtgtaccgagatggagagagtgttcgggttcccagtccactacacagatgtcagcaacatgtctagactggccagacagagactgctgggaagaagctggtccgtccctgtgatcagacacctgttcgcccctctgaaggagtacttcgcctgcgtgagcagcggcaacagcaacgccaacagccggggccccagcttctctagcggcctggtgccactgtccctgagagggagccacatgggccccatggagatctacaaaaccgtgagcgcctggaagcggcagcctgtgcgcgtgctgagcctgtttcggaatatcgataaagtcctgaaaagcctgggattcctggagagcggctctggctccggcggtggcaccctgaagtacgtggaggatgtgacaaacgtggtcagacgggatgtggagaagtggggccccttcgatctggtgtacggcagcacccaacccctgggcagctcttgtgaccggtgccctggctggtacatgtttcagttccaccggatcctgcagtacgccctgccgagacaggagtcccagcggccattcttttggattttcatggacaacttgctgctgaccgaggatgaccaggaaactaccactcggttcctgcagaccgaagccgtgaccctgcaggacgtgagaggccgggactaccagaacgccatgcgggtgtggtccaacatccctggactgaaaagcaagcacgcacctctgacccctaaagaagaggagtacctgcaggcccaggtgcggagcagaagcaagctggacgcccctaaggtggatctgctggtgaagaattgcctcctgcccctgagagagtacttcaagtatttcagccagaatagtctgcccctgggcggcccaagcagcggcgcccctcctcccagcggcggcagcccagccggctccccaacctctaccgaggagggcacctctgagtccgccacccccgagagcggccctggcacctccaccgagcccagcgagggcagcgcacccggcagccctgccggcagccccacctccacagaggagggaaccagcaccgagcccagcgaaggcagcgccccaggcaccagcaccgagcctagtgagggcggctctggcggcggcagcgcccaggagattaaacggatcaacaagatcagaagaagacttgtgaaagacagcaacaccaagaaggccggcaagacaggccccatgaaaaccctgctggttagagtgatgacacccgatctgagagagcggctggaaaacctgagaaagaagcctgaaaatatcccccagcccatcagcaatacatctagagccaacctgaataagctgctgaccgattacaccgaaatgaagaaggcgatcctgcatgtgtactgggaagagttccagaaggaccctgtgggcctgatgagccgggtggcccagcctgccagcaagaagatcgatcagaacaagctgaaacctgagatggacgagaagggcaacctgaccaccgccggctttgcctgctctcagtgtggccagcccctgttcgtgtacaagctggagcaggtgtctgagaagggcaaggcttacaccaactacttcggacggtgcaatgtggccgagcacgaaaagctgatcctgctggcccagctgaagcccgagaaggatagcgacgaagccgtgacatatagcctgggaaagtttgggcagagggccctggatttctacagcattcatgtgaccaaggagtccacccaccccgtgaagcccctggcccagatcgccggaaacagatacgcctccggacctgtgggaaaggccctgagcgacgcatgtatgggcacaatcgcctccttcctgtctaagtaccaggacatcatcatcgaacaccagaaggtggtgaagggcaaccagaagagactggagagcctgcgggagctggccggcaaggaaaacctggaataccctagcgtgaccctgccacctcagcctcacaccaaggagggcgttgatgcctacaacgaagtgatcgcccgggtgcgaatgtgggtgaacctgaacctgtggcagaagctgaagctaagcagagatgatgccaagcctctgctgagactgaagggattcccttcctttcctctggtcgagagacaggccaacgaagtggactggtgggacatggtgtgtaacgtgaagaagctgatcaacgagaaaaaggaggatggcaaggtgttttggcagaatctggctggctacaagagacaggaagccctgagaccatacctgagcagcgaggaagatcggaagaagggaaagaaattcgctcggtaccagctgggcgacctgctgctgcacctggaaaagaagcacggcgaggactggggaaaggtgtacgacgaggcctgggagcggattgacaagaaagtggaaggcctgagcaagcacatcaagctggaagaggaacggagaagcgaggacgcccagagcaaggccgccctgaccgactggctgcgggctaaggccagcttcgtgatcgagggcctgaaggaggccgacaaggacgagttctgcagatgcgagctgaagctgcagaagtggtacggggacctgcggggaaagcccttcgccatcgaagccgagaacagcatcctggacatcagcggcttcagcaagcagtacaactgtgccttcatctggcagaaggacggcgtgaagaagctgaacctgtacctgatcatcaactacttcaagggcggcaagctgcggttcaagaagatcaaacctgaagccttcgaagccaacagattctacaccgtgatcaacaaaaagagcggcgagatcgtgcccatggaggtgaacttcaacttcgacgaccccaacctgatcatcctgcctctggcctttggcaagagacagggcagagaattcatctggaacgacctgctgtccctggaaaccggcagcctgaagctggccaacggaagagtgatcgagaagacactgtacaacagaagaacccggcaggatgagcctgccctgttcgtggccctgaccttcgagcggcgggaggtcctggactcctccaatatcaaaccaatgaacctgatcggcgtggcaagaggcgaaaacatccccgccgtgatcgccctgaccgaccccgagggctgcccactgagccggtttaaggatagcctgggaaacccaacccacatcctgagaatcggcgagagctataaggagaagcagcggaccatccaggccaagaaggaggtggagcagcggagagccggcggctacagccggaagtacgccagcaaagccaagaatctggcagacgatatggtgagaaacaccgctagagatctgctgtactacgccgtgacccaggatgccatgctgatcttcgccaacctgagccggggcttcggccggcagggcaagcggaccttcatggccgagagacagtacacacggatggaggactggctgaccgccaagctggcctacgagggcctgagcaagacctacctgtccaagacactggcccagtacacctccaagacatgcagcaactgtgggtttaccatcaccagcgccgactacgacagggtgctggagaagctgaagaagacagcaacaggctggatgaccacaattaacggcaaggagctgaaggtggagggccagattacctactacaacagatacaagagacagaacgtagtcaaggacctgtccgtcgagctggatagactgagcgaagaatctgtgaacaacgacatctcctcctggacaaagggcagaagcggagaagctctgagcctcctgaagaaaagattctcccatagacccgtgcaggagaagttcgtgtgcctgaactgcggcttcgagacacacgcagccgagcaagccgccctgaacatcgccagatcctggctgttcctgcggagccaggagtacaagaaataccagacaaacaagacaaccggcaacaccgataagagagccttcgtcgagacctggcagtccttttaccggaagaagcttaaggaggtgtggaaacctgccgtgcggtctggcggatctggcggaggctccacaagcgcccagggcagcgtgatgttcaacgacgtgagcatcgtgttcagccaggaggagtgggagtacctggacctggagcagaaggacctgtacagggacgtgatgctggagaactacagcaacctggtgagcctgggctgcttcatcagcaagcccgacgtgatcagcctgctggagcagggcaaggagccctggaaggtggtgaggaagggcaggaggaggtacctggacctggagaacaggtacaccagccccaagaaaaagagaaaagtctaagctgccttctgcggggcttgccttctggccatgcccttcttctctcccttgcacctgtacctcttggtctttgaataaagcctgagtaggaaggctagcaaaaaaaaaaaaaaaaaaaaaaaaaaaaaaaaaaaaaaaaaaaaaaaaaaaaaaaaaaaaaaaaaaaaaaaaaaaaaaaa

SEQ ID NO: 5999 - RNA, 5797 nt, synthetic construct
  source 1..5797: mol_type = other RNA
aggaaataagagagaaaagaagagtaagaagaaatataagagccaccatggcccctaagaagaagcgtaaagtgagccggatggaacgcctcgtctacgaggtgcggcagaagtgcagaaacatcgaggacatctgcatctcctgcggatctctgaacgtgaccctggagcacccactgttcatcggcggcatgtgccagaactgtaaaaactgttttctggagtgtgcctatcaatacgacgatgacggctaccagagctactgcaccatctgttgcggcggaagagaggtgctgatgtgtggaaataacaactgctgccggtgcttctgcgtggaatgcgtggacctgctggtgggccccggcgccgcccaggccgctattaaggaagatccttggaactgctacatgtgcggccacaagggcacatacggcctgctgagacggagagaggactggcctagcagactgcagatgttcttcgccaataaccacgaccaggagttcgacccccctaaggtgtaccctcccgtccccgccgagaagagaaagcccatccgggtcctgagcctgttcgatggcatcgccaccggtctgctggtgctgaaggacctgggcatccaggtggataggtacattgcctccgaggtgtgcgaggactccatcaccgtgggaatggtgcgtcatcagggcaagatcatgtacgtgggcgacgtgcggagcgtgacacagaagcatatccaggagtggggccctttcgacctggtgatcggcggcagcccttgcaatgacctgagcatcgtgaacccagcccggaagggcctgtacgagggaaccggcagactgttcttcgagttttacagactgctgcacgacgcccggcctaaggaaggcgacgaccggcccttcttttggctgttcgagaatgtggtggccatgggagtcagcgacaagcgggatattagccggttcctggagagcaaccccgtgatgatcgatgccaaggaagtgagcgccgcccaccgggccagatacttctggggcaatctgcctggcatgaacagacccctggccagcaccgtgaacgacaagctggagctgcaggagtgcctggagcacggccggatcgccaagttcagcaaggtgagaaccatcaccacccgaagcaacagcatcaaacaaggcaaggaccagcactttcctgtgttcatgaacgagaaggaggacatcctgtggtgtaccgagatggagagagtgttcgggttcccagtccactacacagatgtcagcaacatgtctagactggccagacagagactgctgggaagaagctggtccgtccctgtgatcagacacctgttcgcccctctgaaggagtacttcgcctgcgtgagcagcggcaacagcaacgccaacagccggggccccagcttctctagcggcctggtgccactgtccctgagagggagccacatgggccccatggagatctacaaaaccgtgagcgcctggaagcggcagcctgtgcgcgtgctgagcctgtttcggaatatcgataaagtcctgaaaagcctgggattcctggagagcggctctggctccggcggtggcaccctgaagtacgtggaggatgtgacaaacgtggtcagacgggatgtggagaagtggggccccttcgatctggtgtacggcagcacccaacccctgggcagctcttgtgaccggtgccctggctggtacatgtttcagttccaccggatcctgcagtacgccctgccgagacaggagtcccagcggccattcttttggattttcatggacaacttgctgctgaccgaggatgaccaggaaactaccactcggttcctgcagaccgaagccgtgaccctgcaggacgtgagaggccgggactaccagaacgccatgcgggtgtggtccaacatccctggactgaaaagcaagcacgcacctctgacccctaaagaagaggagtacctgcaggcccaggtgcggagcagaagcaagctggacgcccctaaggtggatctgctggtgaagaattgcctcctgcccctgagagagtacttcaagtatttcagccagaatagtctgcccctgggcggcccaagcagcggcgcccctcctcccagcggcggcagcccagccggctccccaacctctaccgaggagggcacctctgagtccgccacccccgagagcggccctggcacctccaccgagcccagcgagggcagcgcacccggcagccctgccggcagccccacctccacagaggagggaaccagcaccgagcccagcgaaggcagcgccccaggcaccagcaccgagcctagtgagggcggctctggcggcggcagcgcccaggagattaaacggatcaacaagatcagaagaagacttgtgaaagacagcaacaccaagaaggccggcaagacaggccccatgaaaaccctgctggttagagtgatgacacccgatctgagagagcggctggaaaacctgagaaagaagcctgaaaatatcccccagcccatcagcaatacatctagagccaacctgaataagctgctgaccgattacaccgaaatgaagaaggcgatcctgcatgtgtactgggaagagttccagaaggaccctgtgggcctgatgagccgggtggcccagcctgccagcaagaagatcgatcagaacaagctgaaacctgagatggacgagaagggcaacctgaccaccgccggctttgcctgctctcagtgtggccagcccctgttcgtgtacaagctggagcaggtgtctgagaagggcaaggcttacaccaactacttcggacggtgcaatgtggccgagcacgaaaagctgatcctgctggcccagctgaagcccgagaaggatagcgacgaagccgtgacatatagcctgggaaagtttgggcagagggccctggatttctacagcattcatgtgaccaaggagtccacccaccccgtgaagcccctggcccagatcgccggaaacagatacgcctccggacctgtgggaaaggccctgagcgacgcatgtatgggcacaatcgcctccttcctgtctaagtaccaggacatcatcatcgaacaccagaaggtggtgaagggcaaccagaagagactggagagcctgcgggagctggccggcaaggaaaacctggaataccctagcgtgaccctgccacctcagcctcacaccaaggagggcgttgatgcctacaacgaagtgatcgcccgggtgcgaatgtgggtgaacctgaacctgtggcagaagctgaagctaagcagagatgatgccaagcctctgctgagactgaagggattcccttcctttcctctggtcgagagacaggccaacgaagtggactggtgggacatggtgtgtaacgtgaagaagctgatcaacgagaaaaaggaggatggcaaggtgttttggcagaatctggctggctacaagagacaggaagccctgagaccatacctgagcagcgaggaagatcggaagaagggaaagaaattcgctcggtaccagctgggcgacctgctgctgcacctggaaaagaagcacggcgaggactggggaaaggtgtacgacgaggcctgggagcggattgacaagaaagtggaaggcctgagcaagcacatcaagctggaagaggaacggagaagcgaggacgcccagagcaaggccgccctgaccgactggctgcgggctaaggccagcttcgtgatcgagggcctgaaggaggccgacaaggacgagttctgcagatgcgagctgaagctgcagaagtggtacggggacctgcggggaaagcccttcgccatcgaagccgagaacagcatcctggacatcagcggcttcagcaagcagtacaactgtgccttcatctggcagaaggacggcgtgaagaagctgaacctgtacctgatcatcaactacttcaagggcggcaagctgcggttcaagaagatcaaacctgaagccttcgaagccaacagattctacaccgtgatcaacaaaaagagcggcgagatcgtgcccatggaggtgaacttcaacttcgacgaccccaacctgatcatcctgcctctggcctttggcaagagacagggcagagaattcatctggaacgacctgctgtccctggaaaccggcagcctgaagctggccaacggaagagtgatcgagaagacactgtacaacagaagaacccggcaggatgagcctgccctgttcgtggccctgaccttcgagcggcgggaggtcctggactcctccaatatcaaaccaatgaacctgatcggcgtggcaagaggcgaaaacatccccgccgtgatcgccctgaccgaccccgagggctgcccactgagccggtttaaggatagcctgggaaacccaacccacatcctgagaatcggcgagagctataaggagaagcagcggaccatccaggccaagaaggaggtggagcagcggagagccggcggctacagccggaagtacgccagcaaagccaagaatctggcagacgatatggtgagaaacaccgctagagatctgctgtactacgccgtgacccaggatgccatgctgatcttcgccaacctgagccggggcttcggccggcagggcaagcggaccttcatggccgagagacagtacacacggatggaggactggctgaccgccaagctggcctacgagggcctgagcaagacctacctgtccaagacactggcccagtacacctccaagacatgcagcaactgtgggtttaccatcaccagcgccgactacgacagggtgctggagaagctgaagaagacagcaacaggctggatgaccacaattaacggcaaggagctgaaggtggagggccagattacctactacaacagatacaagagacagaacgtagtcaaggacctgtccgtcgagctggatagactgagcgaagaatctgtgaacaacgacatctcctcctggacaaagggcagaagcggagaagctctgagcctcctgaagaaaagattctcccatagacccgtgcaggagaagttcgtgtgcctgaactgcggcttcgagacacacgcagccgagcaagccgccctgaacatcgccagatcctggctgttcctgcggagccaggagtacaagaaataccagacaaacaagacaaccggcaacaccgataagagagccttcgtcgagacctggcagtccttttaccggaagaagcttaaggaggtgtggaaacctgccgtgcggtctggcggatctggcggaggctccacaagcccccagaagagcgtgaccttcgaggacgtggccgtgtacttcacccagaccgagtgggacggcctgagccccgcccagagggccctgtacagggacgtgatgctggagaactacggcaacgtggccagcctgggcttccccctgctgaagcccaccgtgatcagccagctggagggcggcggcgagctggagggccccagccccctggccagcggcaccggcaccggcccccagggcctgtggaccagccccaagaaaaagagaaaagtctaagctgccttctgcggggcttgccttctggccatgcccttcttctctcccttgcacctgtacctcttggtctttgaataaagcctgagtaggaaggctagcaaaaaaaaaaaaaaaaaaaaaaaaaaaaaaaaaaaaaaaaaaaaaaaaaaaaaaaaaaaaaaaaaaaaaaaaaaaaaaaa

SEQ ID NO: 6000 - RNA, 5797 nt, synthetic construct
  source 1..5797: mol_type = other RNA
aggaaataagagagaaaagaagagtaagaagaaatataagagccaccatggcccctaagaagaagcgtaaagtgagccggatggaacgcctcgtctacgaggtgcggcagaagtgcagaaacatcgaggacatctgcatctcctgcggatctctgaacgtgaccctggagcacccactgttcatcggcggcatgtgccagaactgtaaaaactgttttctggagtgtgcctatcaatacgacgatgacggctaccagagctactgcaccatctgttgcggcggaagagaggtgctgatgtgtggaaataacaactgctgccggtgcttctgcgtggaatgcgtggacctgctggtgggccccggcgccgcccaggccgctattaaggaagatccttggaactgctacatgtgcggccacaagggcacatacggcctgctgagacggagagaggactggcctagcagactgcagatgttcttcgccaataaccacgaccaggagttcgacccccctaaggtgtaccctcccgtccccgccgagaagagaaagcccatccgggtcctgagcctgttcgatggcatcgccaccggtctgctggtgctgaaggacctgggcatccaggtggataggtacattgcctccgaggtgtgcgaggactccatcaccgtgggaatggtgcgtcatcagggcaagatcatgtacgtgggcgacgtgcggagcgtgacacagaagcatatccaggagtggggccctttcgacctggtgatcggcggcagcccttgcaatgacctgagcatcgtgaacccagcccggaagggcctgtacgagggaaccggcagactgttcttcgagttttacagactgctgcacgacgcccggcctaaggaaggcgacgaccggcccttcttttggctgttcgagaatgtggtggccatgggagtcagcgacaagcgggatattagccggttcctggagagcaaccccgtgatgatcgatgccaaggaagtgagcgccgcccaccgggccagatacttctggggcaatctgcctggcatgaacagacccctggccagcaccgtgaacgacaagctggagctgcaggagtgcctggagcacggccggatcgccaagttcagcaaggtgagaaccatcaccacccgaagcaacagcatcaaacaaggcaaggaccagcactttcctgtgttcatgaacgagaaggaggacatcctgtggtgtaccgagatggagagagtgttcgggttcccagtccactacacagatgtcagcaacatgtctagactggccagacagagactgctgggaagaagctggtccgtccctgtgatcagacacctgttcgcccctctgaaggagtacttcgcctgcgtgagcagcggcaacagcaacgccaacagccggggccccagcttctctagcggcctggtgccactgtccctgagagggagccacatgggccccatggagatctacaaaaccgtgagcgcctggaagcggcagcctgtgcgcgtgctgagcctgtttcggaatatcgataaagtcctgaaaagcctgggattcctggagagcggctctggctccggcggtggcaccctgaagtacgtggaggatgtgacaaacgtggtcagacgggatgtggagaagtggggccccttcgatctggtgtacggcagcacccaacccctgggcagctcttgtgaccggtgccctggctggtacatgtttcagttccaccggatcctgcagtacgccctgccgagacaggagtcccagcggccattcttttggattttcatggacaacttgctgctgaccgaggatgaccaggaaactaccactcggttcctgcagaccgaagccgtgaccctgcaggacgtgagaggccgggactaccagaacgccatgcgggtgtggtccaacatccctggactgaaaagcaagcacgcacctctgacccctaaagaagaggagtacctgcaggcccaggtgcggagcagaagcaagctggacgcccctaaggtggatctgctggtgaagaattgcctcctgcccctgagagagtacttcaagtatttcagccagaatagtctgcccctgggcggcccaagcagcggcgcccctcctcccagcggcggcagcccagccggctccccaacctctaccgaggagggcacctctgagtccgccacccccgagagcggccctggcacctccaccgagcccagcgagggcagcgcacccggcagccctgccggcagccccacctccacagaggagggaaccagcaccgagcccagcgaaggcagcgccccaggcaccagcaccgagcctagtgagggcggctctggcggcggcagcgcccaggagattaaacggatcaacaagatcagaagaagacttgtgaaagacagcaacaccaagaaggccggcaagacaggccccatgaaaaccctgctggttagagtgatgacacccgatctgagagagcggctggaaaacctgagaaagaagcctgaaaatatcccccagcccatcagcaatacatctagagccaacctgaataagctgctgaccgattacaccgaaatgaagaaggcgatcctgcatgtgtactgggaagagttccagaaggaccctgtgggcctgatgagccgggtggcccagcctgccagcaagaagatcgatcagaacaagctgaaacctgagatggacgagaagggcaacctgaccaccgccggctttgcctgctctcagtgtggccagcccctgttcgtgtacaagctggagcaggtgtctgagaagggcaaggcttacaccaactacttcggacggtgcaatgtggccgagcacgaaaagctgatcctgctggcccagctgaagcccgagaaggatagcgacgaagccgtgacatatagcctgggaaagtttgggcagagggccctggatttctacagcattcatgtgaccaaggagtccacccaccccgtgaagcccctggcccagatcgccggaaacagatacgcctccggacctgtgggaaaggccctgagcgacgcatgtatgggcacaatcgcctccttcctgtctaagtaccaggacatcatcatcgaacaccagaaggtggtgaagggcaaccagaagagactggagagcctgcgggagctggccggcaaggaaaacctggaataccctagcgtgaccctgccacctcagcctcacaccaaggagggcgttgatgcctacaacgaagtgatcgcccgggtgcgaatgtgggtgaacctgaacctgtggcagaagctgaagctaagcagagatgatgccaagcctctgctgagactgaagggattcccttcctttcctctggtcgagagacaggccaacgaagtggactggtgggacatggtgtgtaacgtgaagaagctgatcaacgagaaaaaggaggatggcaaggtgttttggcagaatctggctggctacaagagacaggaagccctgagaccatacctgagcagcgaggaagatcggaagaagggaaagaaattcgctcggtaccagctgggcgacctgctgctgcacctggaaaagaagcacggcgaggactggggaaaggtgtacgacgaggcctgggagcggattgacaagaaagtggaaggcctgagcaagcacatcaagctggaagaggaacggagaagcgaggacgcccagagcaaggccgccctgaccgactggctgcgggctaaggccagcttcgtgatcgagggcctgaaggaggccgacaaggacgagttctgcagatgcgagctgaagctgcagaagtggtacggggacctgcggggaaagcccttcgccatcgaagccgagaacagcatcctggacatcagcggcttcagcaagcagtacaactgtgccttcatctggcagaaggacggcgtgaagaagctgaacctgtacctgatcatcaactacttcaagggcggcaagctgcggttcaagaagatcaaacctgaagccttcgaagccaacagattctacaccgtgatcaacaaaaagagcggcgagatcgtgcccatggaggtgaacttcaacttcgacgaccccaacctgatcatcctgcctctggcctttggcaagagacagggcagagaattcatctggaacgacctgctgtccctggaaaccggcagcctgaagctggccaacggaagagtgatcgagaagacactgtacaacagaagaacccggcaggatgagcctgccctgttcgtggccctgaccttcgagcggcgggaggtcctggactcctccaatatcaaaccaatgaacctgatcggcgtggcaagaggcgaaaacatccccgccgtgatcgccctgaccgaccccgagggctgcccactgagccggtttaaggatagcctgggaaacccaacccacatcctgagaatcggcgagagctataaggagaagcagcggaccatccaggccaagaaggaggtggagcagcggagagccggcggctacagccggaagtacgccagcaaagccaagaatctggcagacgatatggtgagaaacaccgctagagatctgctgtactacgccgtgacccaggatgccatgctgatcttcgccaacctgagccggggcttcggccggcagggcaagcggaccttcatggccgagagacagtacacacggatggaggactggctgaccgccaagctggcctacgagggcctgagcaagacctacctgtccaagacactggcccagtacacctccaagacatgcagcaactgtgggtttaccatcaccagcgccgactacgacagggtgctggagaagctgaagaagacagcaacaggctggatgaccacaattaacggcaaggagctgaaggtggagggccagattacctactacaacagatacaagagacagaacgtagtcaaggacctgtccgtcgagctggatagactgagcgaagaatctgtgaacaacgacatctcctcctggacaaagggcagaagcggagaagctctgagcctcctgaagaaaagattctcccatagacccgtgcaggagaagttcgtgtgcctgaactgcggcttcgagacacacgcagccgagcaagccgccctgaacatcgccagatcctggctgttcctgcggagccaggagtacaagaaataccagacaaacaagacaaccggcaacaccgataagagagccttcgtcgagacctggcagtccttttaccggaagaagcttaaggaggtgtggaaacctgccgtgcggtctggcggatctggcggaggctccacaagcgtgcaggagcccgtgaccttcaaggacgtggccgtggacttcacccaggaggagtggggccagctggacctggtgcagaggaccctgtacagggacgtgatgctggagacctacggccacctgctgagcgtgggcaaccagatcgccaagcccgaggtgatcagcctgctggagcagggcgaggagccctggagcgtggagcaggcctgcccccagaggacctgcagcgagtgggtgaggaacaccagccccaagaaaaagagaaaagtctaagctgccttctgcggggcttgccttctggccatgcccttcttctctcccttgcacctgtacctcttggtctttgaataaagcctgagtaggaaggctagcaaaaaaaaaaaaaaaaaaaaaaaaaaaaaaaaaaaaaaaaaaaaaaaaaaaaaaaaaaaaaaaaaaaaaaaaaaaaaaaa

SEQ ID NO: 6001 - RNA, 5797 nt, synthetic construct
  source 1..5797: mol_type = other RNA
aggaaataagagagaaaagaagagtaagaagaaatataagagccaccatggcccctaagaagaagcgtaaagtgagccggatggaacgcctcgtctacgaggtgcggcagaagtgcagaaacatcgaggacatctgcatctcctgcggatctctgaacgtgaccctggagcacccactgttcatcggcggcatgtgccagaactgtaaaaactgttttctggagtgtgcctatcaatacgacgatgacggctaccagagctactgcaccatctgttgcggcggaagagaggtgctgatgtgtggaaataacaactgctgccggtgcttctgcgtggaatgcgtggacctgctggtgggccccggcgccgcccaggccgctattaaggaagatccttggaactgctacatgtgcggccacaagggcacatacggcctgctgagacggagagaggactggcctagcagactgcagatgttcttcgccaataaccacgaccaggagttcgacccccctaaggtgtaccctcccgtccccgccgagaagagaaagcccatccgggtcctgagcctgttcgatggcatcgccaccggtctgctggtgctgaaggacctgggcatccaggtggataggtacattgcctccgaggtgtgcgaggactccatcaccgtgggaatggtgcgtcatcagggcaagatcatgtacgtgggcgacgtgcggagcgtgacacagaagcatatccaggagtggggccctttcgacctggtgatcggcggcagcccttgcaatgacctgagcatcgtgaacccagcccggaagggcctgtacgagggaaccggcagactgttcttcgagttttacagactgctgcacgacgcccggcctaaggaaggcgacgaccggcccttcttttggctgttcgagaatgtggtggccatgggagtcagcgacaagcgggatattagccggttcctggagagcaaccccgtgatgatcgatgccaaggaagtgagcgccgcccaccgggccagatacttctggggcaatctgcctggcatgaacagacccctggccagcaccgtgaacgacaagctggagctgcaggagtgcctggagcacggccggatcgccaagttcagcaaggtgagaaccatcaccacccgaagcaacagcatcaaacaaggcaaggaccagcactttcctgtgttcatgaacgagaaggaggacatcctgtggtgtaccgagatggagagagtgttcgggttcccagtccactacacagatgtcagcaacatgtctagactggccagacagagactgctgggaagaagctggtccgtccctgtgatcagacacctgttcgcccctctgaaggagtacttcgcctgcgtgagcagcggcaacagcaacgccaacagccggggccccagcttctctagcggcctggtgccactgtccctgagagggagccacatgggccccatggagatctacaaaaccgtgagcgcctggaagcggcagcctgtgcgcgtgctgagcctgtttcggaatatcgataaagtcctgaaaagcctgggattcctggagagcggctctggctccggcggtggcaccctgaagtacgtggaggatgtgacaaacgtggtcagacgggatgtggagaagtggggccccttcgatctggtgtacggcagcacccaacccctgggcagctcttgtgaccggtgccctggctggtacatgtttcagttccaccggatcctgcagtacgccctgccgagacaggagtcccagcggccattcttttggattttcatggacaacttgctgctgaccgaggatgaccaggaaactaccactcggttcctgcagaccgaagccgtgaccctgcaggacgtgagaggccgggactaccagaacgccatgcgggtgtggtccaacatccctggactgaaaagcaagcacgcacctctgacccctaaagaagaggagtacctgcaggcccaggtgcggagcagaagcaagctggacgcccctaaggtggatctgctggtgaagaattgcctcctgcccctgagagagtacttcaagtatttcagccagaatagtctgcccctgggcggcccaagcagcggcgcccctcctcccagcggcggcagcccagccggctccccaacctctaccgaggagggcacctctgagtccgccacccccgagagcggccctggcacctccaccgagcccagcgagggcagcgcacccggcagccctgccggcagccccacctccacagaggagggaaccagcaccgagcccagcgaaggcagcgccccaggcaccagcaccgagcctagtgagggcggctctggcggcggcagcgcccaggagattaaacggatcaacaagatcagaagaagacttgtgaaagacagcaacaccaagaaggccggcaagacaggccccatgaaaaccctgctggttagagtgatgacacccgatctgagagagcggctggaaaacctgagaaagaagcctgaaaatatcccccagcccatcagcaatacatctagagccaacctgaataagctgctgaccgattacaccgaaatgaagaaggcgatcctgcatgtgtactgggaagagttccagaaggaccctgtgggcctgatgagccgggtggcccagcctgccagcaagaagatcgatcagaacaagctgaaacctgagatggacgagaagggcaacctgaccaccgccggctttgcctgctctcagtgtggccagcccctgttcgtgtacaagctggagcaggtgtctgagaagggcaaggcttacaccaactacttcggacggtgcaatgtggccgagcacgaaaagctgatcctgctggcccagctgaagcccgagaaggatagcgacgaagccgtgacatatagcctgggaaagtttgggcagagggccctggatttctacagcattcatgtgaccaaggagtccacccaccccgtgaagcccctggcccagatcgccggaaacagatacgcctccggacctgtgggaaaggccctgagcgacgcatgtatgggcacaatcgcctccttcctgtctaagtaccaggacatcatcatcgaacaccagaaggtggtgaagggcaaccagaagagactggagagcctgcgggagctggccggcaaggaaaacctggaataccctagcgtgaccctgccacctcagcctcacaccaaggagggcgttgatgcctacaacgaagtgatcgcccgggtgcgaatgtgggtgaacctgaacctgtggcagaagctgaagctaagcagagatgatgccaagcctctgctgagactgaagggattcccttcctttcctctggtcgagagacaggccaacgaagtggactggtgggacatggtgtgtaacgtgaagaagctgatcaacgagaaaaaggaggatggcaaggtgttttggcagaatctggctggctacaagagacaggaagccctgagaccatacctgagcagcgaggaagatcggaagaagggaaagaaattcgctcggtaccagctgggcgacctgctgctgcacctggaaaagaagcacggcgaggactggggaaaggtgtacgacgaggcctgggagcggattgacaagaaagtggaaggcctgagcaagcacatcaagctggaagaggaacggagaagcgaggacgcccagagcaaggccgccctgaccgactggctgcgggctaaggccagcttcgtgatcgagggcctgaaggaggccgacaaggacgagttctgcagatgcgagctgaagctgcagaagtggtacggggacctgcggggaaagcccttcgccatcgaagccgagaacagcatcctggacatcagcggcttcagcaagcagtacaactgtgccttcatctggcagaaggacggcgtgaagaagctgaacctgtacctgatcatcaactacttcaagggcggcaagctgcggttcaagaagatcaaacctgaagccttcgaagccaacagattctacaccgtgatcaacaaaaagagcggcgagatcgtgcccatggaggtgaacttcaacttcgacgaccccaacctgatcatcctgcctctggcctttggcaagagacagggcagagaattcatctggaacgacctgctgtccctggaaaccggcagcctgaagctggccaacggaagagtgatcgagaagacactgtacaacagaagaacccggcaggatgagcctgccctgttcgtggccctgaccttcgagcggcgggaggtcctggactcctccaatatcaaaccaatgaacctgatcggcgtggcaagaggcgaaaacatccccgccgtgatcgccctgaccgaccccgagggctgcccactgagccggtttaaggatagcctgggaaacccaacccacatcctgagaatcggcgagagctataaggagaagcagcggaccatccaggccaagaaggaggtggagcagcggagagccggcggctacagccggaagtacgccagcaaagccaagaatctggcagacgatatggtgagaaacaccgctagagatctgctgtactacgccgtgacccaggatgccatgctgatcttcgccaacctgagccggggcttcggccggcagggcaagcggaccttcatggccgagagacagtacacacggatggaggactggctgaccgccaagctggcctacgagggcctgagcaagacctacctgtccaagacactggcccagtacacctccaagacatgcagcaactgtgggtttaccatcaccagcgccgactacgacagggtgctggagaagctgaagaagacagcaacaggctggatgaccacaattaacggcaaggagctgaaggtggagggccagattacctactacaacagatacaagagacagaacgtagtcaaggacctgtccgtcgagctggatagactgagcgaagaatctgtgaacaacgacatctcctcctggacaaagggcagaagcggagaagctctgagcctcctgaagaaaagattctcccatagacccgtgcaggagaagttcgtgtgcctgaactgcggcttcgagacacacgcagccgagcaagccgccctgaacatcgccagatcctggctgttcctgcggagccaggagtacaagaaataccagacaaacaagacaaccggcaacaccgataagagagccttcgtcgagacctggcagtccttttaccggaagaagcttaaggaggtgtggaaacctgccgtgcggtctggcggatctggcggaggctccacaagcctggtgaagttcgaggaggtggccgtggtgttcagcgaggacgagtggaacctgctgagcgaccagcagaggggcctgtacatggaggtgatgaaggagaactacgagcacctgatctacctgggctacgaggtgcccgtgatcctgagcctgctgcaggacggcggcggcatcagcagcgacgccggcagccagagcaagagccagcaggtggccgtggccgagggcagcaacgtgaacagcaccagccccaagaaaaagagaaaagtctaagctgccttctgcggggcttgccttctggccatgcccttcttctctcccttgcacctgtacctcttggtctttgaataaagcctgagtaggaaggctagcaaaaaaaaaaaaaaaaaaaaaaaaaaaaaaaaaaaaaaaaaaaaaaaaaaaaaaaaaaaaaaaaaaaaaaaaaaaaaaaa

SEQ ID NO: 6002 - RNA, 5797 nt, synthetic construct
  source 1..5797: mol_type = other RNA
aggaaataagagagaaaagaagagtaagaagaaatataagagccaccatggcccctaagaagaagcgtaaagtgagccggatggaacgcctcgtctacgaggtgcggcagaagtgcagaaacatcgaggacatctgcatctcctgcggatctctgaacgtgaccctggagcacccactgttcatcggcggcatgtgccagaactgtaaaaactgttttctggagtgtgcctatcaatacgacgatgacggctaccagagctactgcaccatctgttgcggcggaagagaggtgctgatgtgtggaaataacaactgctgccggtgcttctgcgtggaatgcgtggacctgctggtgggccccggcgccgcccaggccgctattaaggaagatccttggaactgctacatgtgcggccacaagggcacatacggcctgctgagacggagagaggactggcctagcagactgcagatgttcttcgccaataaccacgaccaggagttcgacccccctaaggtgtaccctcccgtccccgccgagaagagaaagcccatccgggtcctgagcctgttcgatggcatcgccaccggtctgctggtgctgaaggacctgggcatccaggtggataggtacattgcctccgaggtgtgcgaggactccatcaccgtgggaatggtgcgtcatcagggcaagatcatgtacgtgggcgacgtgcggagcgtgacacagaagcatatccaggagtggggccctttcgacctggtgatcggcggcagcccttgcaatgacctgagcatcgtgaacccagcccggaagggcctgtacgagggaaccggcagactgttcttcgagttttacagactgctgcacgacgcccggcctaaggaaggcgacgaccggcccttcttttggctgttcgagaatgtggtggccatgggagtcagcgacaagcgggatattagccggttcctggagagcaaccccgtgatgatcgatgccaaggaagtgagcgccgcccaccgggccagatacttctggggcaatctgcctggcatgaacagacccctggccagcaccgtgaacgacaagctggagctgcaggagtgcctggagcacggccggatcgccaagttcagcaaggtgagaaccatcaccacccgaagcaacagcatcaaacaaggcaaggaccagcactttcctgtgttcatgaacgagaaggaggacatcctgtggtgtaccgagatggagagagtgttcgggttcccagtccactacacagatgtcagcaacatgtctagactggccagacagagactgctgggaagaagctggtccgtccctgtgatcagacacctgttcgcccctctgaaggagtacttcgcctgcgtgagcagcggcaacagcaacgccaacagccggggccccagcttctctagcggcctggtgccactgtccctgagagggagccacatgggccccatggagatctacaaaaccgtgagcgcctggaagcggcagcctgtgcgcgtgctgagcctgtttcggaatatcgataaagtcctgaaaagcctgggattcctggagagcggctctggctccggcggtggcaccctgaagtacgtggaggatgtgacaaacgtggtcagacgggatgtggagaagtggggccccttcgatctggtgtacggcagcacccaacccctgggcagctcttgtgaccggtgccctggctggtacatgtttcagttccaccggatcctgcagtacgccctgccgagacaggagtcccagcggccattcttttggattttcatggacaacttgctgctgaccgaggatgaccaggaaactaccactcggttcctgcagaccgaagccgtgaccctgcaggacgtgagaggccgggactaccagaacgccatgcgggtgtggtccaacatccctggactgaaaagcaagcacgcacctctgacccctaaagaagaggagtacctgcaggcccaggtgcggagcagaagcaagctggacgcccctaaggtggatctgctggtgaagaattgcctcctgcccctgagagagtacttcaagtatttcagccagaatagtctgcccctgggcggcccaagcagcggcgcccctcctcccagcggcggcagcccagccggctccccaacctctaccgaggagggcacctctgagtccgccacccccgagagcggccctggcacctccaccgagcccagcgagggcagcgcacccggcagccctgccggcagccccacctccacagaggagggaaccagcaccgagcccagcgaaggcagcgccccaggcaccagcaccgagcctagtgagggcggctctggcggcggcagcgcccaggagattaaacggatcaacaagatcagaagaagacttgtgaaagacagcaacaccaagaaggccggcaagacaggccccatgaaaaccctgctggttagagtgatgacacccgatctgagagagcggctggaaaacctgagaaagaagcctgaaaatatcccccagcccatcagcaatacatctagagccaacctgaataagctgctgaccgattacaccgaaatgaagaaggcgatcctgcatgtgtactgggaagagttccagaaggaccctgtgggcctgatgagccgggtggcccagcctgccagcaagaagatcgatcagaacaagctgaaacctgagatggacgagaagggcaacctgaccaccgccggctttgcctgctctcagtgtggccagcccctgttcgtgtacaagctggagcaggtgtctgagaagggcaaggcttacaccaactacttcggacggtgcaatgtggccgagcacgaaaagctgatcctgctggcccagctgaagcccgagaaggatagcgacgaagccgtgacatatagcctgggaaagtttgggcagagggccctggatttctacagcattcatgtgaccaaggagtccacccaccccgtgaagcccctggcccagatcgccggaaacagatacgcctccggacctgtgggaaaggccctgagcgacgcatgtatgggcacaatcgcctccttcctgtctaagtaccaggacatcatcatcgaacaccagaaggtggtgaagggcaaccagaagagactggagagcctgcgggagctggccggcaaggaaaacctggaataccctagcgtgaccctgccacctcagcctcacaccaaggagggcgttgatgcctacaacgaagtgatcgcccgggtgcgaatgtgggtgaacctgaacctgtggcagaagctgaagctaagcagagatgatgccaagcctctgctgagactgaagggattcccttcctttcctctggtcgagagacaggccaacgaagtggactggtgggacatggtgtgtaacgtgaagaagctgatcaacgagaaaaaggaggatggcaaggtgttttggcagaatctggctggctacaagagacaggaagccctgagaccatacctgagcagcgaggaagatcggaagaagggaaagaaattcgctcggtaccagctgggcgacctgctgctgcacctggaaaagaagcacggcgaggactggggaaaggtgtacgacgaggcctgggagcggattgacaagaaagtggaaggcctgagcaagcacatcaagctggaagaggaacggagaagcgaggacgcccagagcaaggccgccctgaccgactggctgcgggctaaggccagcttcgtgatcgagggcctgaaggaggccgacaaggacgagttctgcagatgcgagctgaagctgcagaagtggtacggggacctgcggggaaagcccttcgccatcgaagccgagaacagcatcctggacatcagcggcttcagcaagcagtacaactgtgccttcatctggcagaaggacggcgtgaagaagctgaacctgtacctgatcatcaactacttcaagggcggcaagctgcggttcaagaagatcaaacctgaagccttcgaagccaacagattctacaccgtgatcaacaaaaagagcggcgagatcgtgcccatggaggtgaacttcaacttcgacgaccccaacctgatcatcctgcctctggcctttggcaagagacagggcagagaattcatctggaacgacctgctgtccctggaaaccggcagcctgaagctggccaacggaagagtgatcgagaagacactgtacaacagaagaacccggcaggatgagcctgccctgttcgtggccctgaccttcgagcggcgggaggtcctggactcctccaatatcaaaccaatgaacctgatcggcgtggcaagaggcgaaaacatccccgccgtgatcgccctgaccgaccccgagggctgcccactgagccggtttaaggatagcctgggaaacccaacccacatcctgagaatcggcgagagctataaggagaagcagcggaccatccaggccaagaaggaggtggagcagcggagagccggcggctacagccggaagtacgccagcaaagccaagaatctggcagacgatatggtgagaaacaccgctagagatctgctgtactacgccgtgacccaggatgccatgctgatcttcgccaacctgagccggggcttcggccggcagggcaagcggaccttcatggccgagagacagtacacacggatggaggactggctgaccgccaagctggcctacgagggcctgagcaagacctacctgtccaagacactggcccagtacacctccaagacatgcagcaactgtgggtttaccatcaccagcgccgactacgacagggtgctggagaagctgaagaagacagcaacaggctggatgaccacaattaacggcaaggagctgaaggtggagggccagattacctactacaacagatacaagagacagaacgtagtcaaggacctgtccgtcgagctggatagactgagcgaagaatctgtgaacaacgacatctcctcctggacaaagggcagaagcggagaagctctgagcctcctgaagaaaagattctcccatagacccgtgcaggagaagttcgtgtgcctgaactgcggcttcgagacacacgcagccgagcaagccgccctgaacatcgccagatcctggctgttcctgcggagccaggagtacaagaaataccagacaaacaagacaaccggcaacaccgataagagagccttcgtcgagacctggcagtccttttaccggaagaagcttaaggaggtgtggaaacctgccgtgcggtctggcggatctggcggaggctccacaagcctggcccccgaggaccacggcagcagctacgagggcagcgtgagcttcagggacgtggccatcgacttcagcagggaggagtggaggcacctggacctgagccagaggaacctgtacagggacgtgatgctggagacctacagccacctgctgagcgtgggctaccaggtgcccgaggccgaggtggtgatgctggagcagggcaacgagccctggagcctgcagggcgagaggccccaccagaccagccccaagaaaaagagaaaagtctaagctgccttctgcggggcttgccttctggccatgcccttcttctctcccttgcacctgtacctcttggtctttgaataaagcctgagtaggaaggctagcaaaaaaaaaaaaaaaaaaaaaaaaaaaaaaaaaaaaaaaaaaaaaaaaaaaaaaaaaaaaaaaaaaaaaaaaaaaaaaaa

SEQ ID NO: 6003 - RNA, 5797 nt, synthetic construct
  source 1..5797: mol_type = other RNA
aggaaataagagagaaaagaagagtaagaagaaatataagagccaccatggcccctaagaagaagcgtaaagtgagccggatggaacgcctcgtctacgaggtgcggcagaagtgcagaaacatcgaggacatctgcatctcctgcggatctctgaacgtgaccctggagcacccactgttcatcggcggcatgtgccagaactgtaaaaactgttttctggagtgtgcctatcaatacgacgatgacggctaccagagctactgcaccatctgttgcggcggaagagaggtgctgatgtgtggaaataacaactgctgccggtgcttctgcgtggaatgcgtggacctgctggtgggccccggcgccgcccaggccgctattaaggaagatccttggaactgctacatgtgcggccacaagggcacatacggcctgctgagacggagagaggactggcctagcagactgcagatgttcttcgccaataaccacgaccaggagttcgacccccctaaggtgtaccctcccgtccccgccgagaagagaaagcccatccgggtcctgagcctgttcgatggcatcgccaccggtctgctggtgctgaaggacctgggcatccaggtggataggtacattgcctccgaggtgtgcgaggactccatcaccgtgggaatggtgcgtcatcagggcaagatcatgtacgtgggcgacgtgcggagcgtgacacagaagcatatccaggagtggggccctttcgacctggtgatcggcggcagcccttgcaatgacctgagcatcgtgaacccagcccggaagggcctgtacgagggaaccggcagactgttcttcgagttttacagactgctgcacgacgcccggcctaaggaaggcgacgaccggcccttcttttggctgttcgagaatgtggtggccatgggagtcagcgacaagcgggatattagccggttcctggagagcaaccccgtgatgatcgatgccaaggaagtgagcgccgcccaccgggccagatacttctggggcaatctgcctggcatgaacagacccctggccagcaccgtgaacgacaagctggagctgcaggagtgcctggagcacggccggatcgccaagttcagcaaggtgagaaccatcaccacccgaagcaacagcatcaaacaaggcaaggaccagcactttcctgtgttcatgaacgagaaggaggacatcctgtggtgtaccgagatggagagagtgttcgggttcccagtccactacacagatgtcagcaacatgtctagactggccagacagagactgctgggaagaagctggtccgtccctgtgatcagacacctgttcgcccctctgaaggagtacttcgcctgcgtgagcagcggcaacagcaacgccaacagccggggccccagcttctctagcggcctggtgccactgtccctgagagggagccacatgggccccatggagatctacaaaaccgtgagcgcctggaagcggcagcctgtgcgcgtgctgagcctgtttcggaatatcgataaagtcctgaaaagcctgggattcctggagagcggctctggctccggcggtggcaccctgaagtacgtggaggatgtgacaaacgtggtcagacgggatgtggagaagtggggccccttcgatctggtgtacggcagcacccaacccctgggcagctcttgtgaccggtgccctggctggtacatgtttcagttccaccggatcctgcagtacgccctgccgagacaggagtcccagcggccattcttttggattttcatggacaacttgctgctgaccgaggatgaccaggaaactaccactcggttcctgcagaccgaagccgtgaccctgcaggacgtgagaggccgggactaccagaacgccatgcgggtgtggtccaacatccctggactgaaaagcaagcacgcacctctgacccctaaagaagaggagtacctgcaggcccaggtgcggagcagaagcaagctggacgcccctaaggtggatctgctggtgaagaattgcctcctgcccctgagagagtacttcaagtatttcagccagaatagtctgcccctgggcggcccaagcagcggcgcccctcctcccagcggcggcagcccagccggctccccaacctctaccgaggagggcacctctgagtccgccacccccgagagcggccctggcacctccaccgagcccagcgagggcagcgcacccggcagccctgccggcagccccacctccacagaggagggaaccagcaccgagcccagcgaaggcagcgccccaggcaccagcaccgagcctagtgagggcggctctggcggcggcagcgcccaggagattaaacggatcaacaagatcagaagaagacttgtgaaagacagcaacaccaagaaggccggcaagacaggccccatgaaaaccctgctggttagagtgatgacacccgatctgagagagcggctggaaaacctgagaaagaagcctgaaaatatcccccagcccatcagcaatacatctagagccaacctgaataagctgctgaccgattacaccgaaatgaagaaggcgatcctgcatgtgtactgggaagagttccagaaggaccctgtgggcctgatgagccgggtggcccagcctgccagcaagaagatcgatcagaacaagctgaaacctgagatggacgagaagggcaacctgaccaccgccggctttgcctgctctcagtgtggccagcccctgttcgtgtacaagctggagcaggtgtctgagaagggcaaggcttacaccaactacttcggacggtgcaatgtggccgagcacgaaaagctgatcctgctggcccagctgaagcccgagaaggatagcgacgaagccgtgacatatagcctgggaaagtttgggcagagggccctggatttctacagcattcatgtgaccaaggagtccacccaccccgtgaagcccctggcccagatcgccggaaacagatacgcctccggacctgtgggaaaggccctgagcgacgcatgtatgggcacaatcgcctccttcctgtctaagtaccaggacatcatcatcgaacaccagaaggtggtgaagggcaaccagaagagactggagagcctgcgggagctggccggcaaggaaaacctggaataccctagcgtgaccctgccacctcagcctcacaccaaggagggcgttgatgcctacaacgaagtgatcgcccgggtgcgaatgtgggtgaacctgaacctgtggcagaagctgaagctaagcagagatgatgccaagcctctgctgagactgaagggattcccttcctttcctctggtcgagagacaggccaacgaagtggactggtgggacatggtgtgtaacgtgaagaagctgatcaacgagaaaaaggaggatggcaaggtgttttggcagaatctggctggctacaagagacaggaagccctgagaccatacctgagcagcgaggaagatcggaagaagggaaagaaattcgctcggtaccagctgggcgacctgctgctgcacctggaaaagaagcacggcgaggactggggaaaggtgtacgacgaggcctgggagcggattgacaagaaagtggaaggcctgagcaagcacatcaagctggaagaggaacggagaagcgaggacgcccagagcaaggccgccctgaccgactggctgcgggctaaggccagcttcgtgatcgagggcctgaaggaggccgacaaggacgagttctgcagatgcgagctgaagctgcagaagtggtacggggacctgcggggaaagcccttcgccatcgaagccgagaacagcatcctggacatcagcggcttcagcaagcagtacaactgtgccttcatctggcagaaggacggcgtgaagaagctgaacctgtacctgatcatcaactacttcaagggcggcaagctgcggttcaagaagatcaaacctgaagccttcgaagccaacagattctacaccgtgatcaacaaaaagagcggcgagatcgtgcccatggaggtgaacttcaacttcgacgaccccaacctgatcatcctgcctctggcctttggcaagagacagggcagagaattcatctggaacgacctgctgtccctggaaaccggcagcctgaagctggccaacggaagagtgatcgagaagacactgtacaacagaagaacccggcaggatgagcctgccctgttcgtggccctgaccttcgagcggcgggaggtcctggactcctccaatatcaaaccaatgaacctgatcggcgtggcaagaggcgaaaacatccccgccgtgatcgccctgaccgaccccgagggctgcccactgagccggtttaaggatagcctgggaaacccaacccacatcctgagaatcggcgagagctataaggagaagcagcggaccatccaggccaagaaggaggtggagcagcggagagccggcggctacagccggaagtacgccagcaaagccaagaatctggcagacgatatggtgagaaacaccgctagagatctgctgtactacgccgtgacccaggatgccatgctgatcttcgccaacctgagccggggcttcggccggcagggcaagcggaccttcatggccgagagacagtacacacggatggaggactggctgaccgccaagctggcctacgagggcctgagcaagacctacctgtccaagacactggcccagtacacctccaagacatgcagcaactgtgggtttaccatcaccagcgccgactacgacagggtgctggagaagctgaagaagacagcaacaggctggatgaccacaattaacggcaaggagctgaaggtggagggccagattacctactacaacagatacaagagacagaacgtagtcaaggacctgtccgtcgagctggatagactgagcgaagaatctgtgaacaacgacatctcctcctggacaaagggcagaagcggagaagctctgagcctcctgaagaaaagattctcccatagacccgtgcaggagaagttcgtgtgcctgaactgcggcttcgagacacacgcagccgagcaagccgccctgaacatcgccagatcctggctgttcctgcggagccaggagtacaagaaataccagacaaacaagacaaccggcaacaccgataagagagccttcgtcgagacctggcagtccttttaccggaagaagcttaaggaggtgtggaaacctgccgtgcggtctggcggatctggcggaggctccacaagcagcaaggtgcccgtgaccttcggcgacctggccatctacttcagccaggaggagtgggagtggctgagccccatccagaaggacctgtacgaggacgtgatgctggagaactaccagaacctggtgagcgtgggcctgagcttcaggaggcccaacgtgatcaccctgctggagaagggcagggccccctggatggtggagcccgtgaggaagaggaggggcatggacagcggcagcaagtgcaccagccccaagaaaaagagaaaagtctaagctgccttctgcggggcttgccttctggccatgcccttcttctctcccttgcacctgtacctcttggtctttgaataaagcctgagtaggaaggctagcaaaaaaaaaaaaaaaaaaaaaaaaaaaaaaaaaaaaaaaaaaaaaaaaaaaaaaaaaaaaaaaaaaaaaaaaaaaaaaaa

SEQ ID NO: 6004 - RNA, 5797 nt, synthetic construct
  source 1..5797: mol_type = other RNA
aggaaataagagagaaaagaagagtaagaagaaatataagagccaccatggcccctaagaagaagcgtaaagtgagccggatggaacgcctcgtctacgaggtgcggcagaagtgcagaaacatcgaggacatctgcatctcctgcggatctctgaacgtgaccctggagcacccactgttcatcggcggcatgtgccagaactgtaaaaactgttttctggagtgtgcctatcaatacgacgatgacggctaccagagctactgcaccatctgttgcggcggaagagaggtgctgatgtgtggaaataacaactgctgccggtgcttctgcgtggaatgcgtggacctgctggtgggccccggcgccgcccaggccgctattaaggaagatccttggaactgctacatgtgcggccacaagggcacatacggcctgctgagacggagagaggactggcctagcagactgcagatgttcttcgccaataaccacgaccaggagttcgacccccctaaggtgtaccctcccgtccccgccgagaagagaaagcccatccgggtcctgagcctgttcgatggcatcgccaccggtctgctggtgctgaaggacctgggcatccaggtggataggtacattgcctccgaggtgtgcgaggactccatcaccgtgggaatggtgcgtcatcagggcaagatcatgtacgtgggcgacgtgcggagcgtgacacagaagcatatccaggagtggggccctttcgacctggtgatcggcggcagcccttgcaatgacctgagcatcgtgaacccagcccggaagggcctgtacgagggaaccggcagactgttcttcgagttttacagactgctgcacgacgcccggcctaaggaaggcgacgaccggcccttcttttggctgttcgagaatgtggtggccatgggagtcagcgacaagcgggatattagccggttcctggagagcaaccccgtgatgatcgatgccaaggaagtgagcgccgcccaccgggccagatacttctggggcaatctgcctggcatgaacagacccctggccagcaccgtgaacgacaagctggagctgcaggagtgcctggagcacggccggatcgccaagttcagcaaggtgagaaccatcaccacccgaagcaacagcatcaaacaaggcaaggaccagcactttcctgtgttcatgaacgagaaggaggacatcctgtggtgtaccgagatggagagagtgttcgggttcccagtccactacacagatgtcagcaacatgtctagactggccagacagagactgctgggaagaagctggtccgtccctgtgatcagacacctgttcgcccctctgaaggagtacttcgcctgcgtgagcagcggcaacagcaacgccaacagccggggccccagcttctctagcggcctggtgccactgtccctgagagggagccacatgggccccatggagatctacaaaaccgtgagcgcctggaagcggcagcctgtgcgcgtgctgagcctgtttcggaatatcgataaagtcctgaaaagcctgggattcctggagagcggctctggctccggcggtggcaccctgaagtacgtggaggatgtgacaaacgtggtcagacgggatgtggagaagtggggccccttcgatctggtgtacggcagcacccaacccctgggcagctcttgtgaccggtgccctggctggtacatgtttcagttccaccggatcctgcagtacgccctgccgagacaggagtcccagcggccattcttttggattttcatggacaacttgctgctgaccgaggatgaccaggaaactaccactcggttcctgcagaccgaagccgtgaccctgcaggacgtgagaggccgggactaccagaacgccatgcgggtgtggtccaacatccctggactgaaaagcaagcacgcacctctgacccctaaagaagaggagtacctgcaggcccaggtgcggagcagaagcaagctggacgcccctaaggtggatctgctggtgaagaattgcctcctgcccctgagagagtacttcaagtatttcagccagaatagtctgcccctgggcggcccaagcagcggcgcccctcctcccagcggcggcagcccagccggctccccaacctctaccgaggagggcacctctgagtccgccacccccgagagcggccctggcacctccaccgagcccagcgagggcagcgcacccggcagccctgccggcagccccacctccacagaggagggaaccagcaccgagcccagcgaaggcagcgccccaggcaccagcaccgagcctagtgagggcggctctggcggcggcagcgcccaggagattaaacggatcaacaagatcagaagaagacttgtgaaagacagcaacaccaagaaggccggcaagacaggccccatgaaaaccctgctggttagagtgatgacacccgatctgagagagcggctggaaaacctgagaaagaagcctgaaaatatcccccagcccatcagcaatacatctagagccaacctgaataagctgctgaccgattacaccgaaatgaagaaggcgatcctgcatgtgtactgggaagagttccagaaggaccctgtgggcctgatgagccgggtggcccagcctgccagcaagaagatcgatcagaacaagctgaaacctgagatggacgagaagggcaacctgaccaccgccggctttgcctgctctcagtgtggccagcccctgttcgtgtacaagctggagcaggtgtctgagaagggcaaggcttacaccaactacttcggacggtgcaatgtggccgagcacgaaaagctgatcctgctggcccagctgaagcccgagaaggatagcgacgaagccgtgacatatagcctgggaaagtttgggcagagggccctggatttctacagcattcatgtgaccaaggagtccacccaccccgtgaagcccctggcccagatcgccggaaacagatacgcctccggacctgtgggaaaggccctgagcgacgcatgtatgggcacaatcgcctccttcctgtctaagtaccaggacatcatcatcgaacaccagaaggtggtgaagggcaaccagaagagactggagagcctgcgggagctggccggcaaggaaaacctggaataccctagcgtgaccctgccacctcagcctcacaccaaggagggcgttgatgcctacaacgaagtgatcgcccgggtgcgaatgtgggtgaacctgaacctgtggcagaagctgaagctaagcagagatgatgccaagcctctgctgagactgaagggattcccttcctttcctctggtcgagagacaggccaacgaagtggactggtgggacatggtgtgtaacgtgaagaagctgatcaacgagaaaaaggaggatggcaaggtgttttggcagaatctggctggctacaagagacaggaagccctgagaccatacctgagcagcgaggaagatcggaagaagggaaagaaattcgctcggtaccagctgggcgacctgctgctgcacctggaaaagaagcacggcgaggactggggaaaggtgtacgacgaggcctgggagcggattgacaagaaagtggaaggcctgagcaagcacatcaagctggaagaggaacggagaagcgaggacgcccagagcaaggccgccctgaccgactggctgcgggctaaggccagcttcgtgatcgagggcctgaaggaggccgacaaggacgagttctgcagatgcgagctgaagctgcagaagtggtacggggacctgcggggaaagcccttcgccatcgaagccgagaacagcatcctggacatcagcggcttcagcaagcagtacaactgtgccttcatctggcagaaggacggcgtgaagaagctgaacctgtacctgatcatcaactacttcaagggcggcaagctgcggttcaagaagatcaaacctgaagccttcgaagccaacagattctacaccgtgatcaacaaaaagagcggcgagatcgtgcccatggaggtgaacttcaacttcgacgaccccaacctgatcatcctgcctctggcctttggcaagagacagggcagagaattcatctggaacgacctgctgtccctggaaaccggcagcctgaagctggccaacggaagagtgatcgagaagacactgtacaacagaagaacccggcaggatgagcctgccctgttcgtggccctgaccttcgagcggcgggaggtcctggactcctccaatatcaaaccaatgaacctgatcggcgtggcaagaggcgaaaacatccccgccgtgatcgccctgaccgaccccgagggctgcccactgagccggtttaaggatagcctgggaaacccaacccacatcctgagaatcggcgagagctataaggagaagcagcggaccatccaggccaagaaggaggtggagcagcggagagccggcggctacagccggaagtacgccagcaaagccaagaatctggcagacgatatggtgagaaacaccgctagagatctgctgtactacgccgtgacccaggatgccatgctgatcttcgccaacctgagccggggcttcggccggcagggcaagcggaccttcatggccgagagacagtacacacggatggaggactggctgaccgccaagctggcctacgagggcctgagcaagacctacctgtccaagacactggcccagtacacctccaagacatgcagcaactgtgggtttaccatcaccagcgccgactacgacagggtgctggagaagctgaagaagacagcaacaggctggatgaccacaattaacggcaaggagctgaaggtggagggccagattacctactacaacagatacaagagacagaacgtagtcaaggacctgtccgtcgagctggatagactgagcgaagaatctgtgaacaacgacatctcctcctggacaaagggcagaagcggagaagctctgagcctcctgaagaaaagattctcccatagacccgtgcaggagaagttcgtgtgcctgaactgcggcttcgagacacacgcagccgagcaagccgccctgaacatcgccagatcctggctgttcctgcggagccaggagtacaagaaataccagacaaacaagacaaccggcaacaccgataagagagccttcgtcgagacctggcagtccttttaccggaagaagcttaaggaggtgtggaaacctgccgtgcggtctggcggatctggcggaggctccacaagcagcgtggccttcgaggacgtggccgtgaacttcacccaggaggagtgggccctgctgagccccagccagaagaacctgtacagggacgtgatgctggagaccttcaggaacctggccagcgtgggcatccagtggaaggaccagaacatcgagaacctgtaccagaacctgggcatcaagctgaggagcctggtggagaggctgtgcggcccccaggagggcagcgagcacagggagaccttcaccagccccaagaaaaagagaaaagtctaagctgccttctgcggggcttgccttctggccatgcccttcttctctcccttgcacctgtacctcttggtctttgaataaagcctgagtaggaaggctagcaaaaaaaaaaaaaaaaaaaaaaaaaaaaaaaaaaaaaaaaaaaaaaaaaaaaaaaaaaaaaaaaaaaaaaaaaaaaaaaa

SEQ ID NO: 6005 - RNA, 5797 nt, synthetic construct
  source 1..5797: mol_type = other RNA
aggaaataagagagaaaagaagagtaagaagaaatataagagccaccatggcccctaagaagaagcgtaaagtgagccggatggaacgcctcgtctacgaggtgcggcagaagtgcagaaacatcgaggacatctgcatctcctgcggatctctgaacgtgaccctggagcacccactgttcatcggcggcatgtgccagaactgtaaaaactgttttctggagtgtgcctatcaatacgacgatgacggctaccagagctactgcaccatctgttgcggcggaagagaggtgctgatgtgtggaaataacaactgctgccggtgcttctgcgtggaatgcgtggacctgctggtgggccccggcgccgcccaggccgctattaaggaagatccttggaactgctacatgtgcggccacaagggcacatacggcctgctgagacggagagaggactggcctagcagactgcagatgttcttcgccaataaccacgaccaggagttcgacccccctaaggtgtaccctcccgtccccgccgagaagagaaagcccatccgggtcctgagcctgttcgatggcatcgccaccggtctgctggtgctgaaggacctgggcatccaggtggataggtacattgcctccgaggtgtgcgaggactccatcaccgtgggaatggtgcgtcatcagggcaagatcatgtacgtgggcgacgtgcggagcgtgacacagaagcatatccaggagtggggccctttcgacctggtgatcggcggcagcccttgcaatgacctgagcatcgtgaacccagcccggaagggcctgtacgagggaaccggcagactgttcttcgagttttacagactgctgcacgacgcccggcctaaggaaggcgacgaccggcccttcttttggctgttcgagaatgtggtggccatgggagtcagcgacaagcgggatattagccggttcctggagagcaaccccgtgatgatcgatgccaaggaagtgagcgccgcccaccgggccagatacttctggggcaatctgcctggcatgaacagacccctggccagcaccgtgaacgacaagctggagctgcaggagtgcctggagcacggccggatcgccaagttcagcaaggtgagaaccatcaccacccgaagcaacagcatcaaacaaggcaaggaccagcactttcctgtgttcatgaacgagaaggaggacatcctgtggtgtaccgagatggagagagtgttcgggttcccagtccactacacagatgtcagcaacatgtctagactggccagacagagactgctgggaagaagctggtccgtccctgtgatcagacacctgttcgcccctctgaaggagtacttcgcctgcgtgagcagcggcaacagcaacgccaacagccggggccccagcttctctagcggcctggtgccactgtccctgagagggagccacatgggccccatggagatctacaaaaccgtgagcgcctggaagcggcagcctgtgcgcgtgctgagcctgtttcggaatatcgataaagtcctgaaaagcctgggattcctggagagcggctctggctccggcggtggcaccctgaagtacgtggaggatgtgacaaacgtggtcagacgggatgtggagaagtggggccccttcgatctggtgtacggcagcacccaacccctgggcagctcttgtgaccggtgccctggctggtacatgtttcagttccaccggatcctgcagtacgccctgccgagacaggagtcccagcggccattcttttggattttcatggacaacttgctgctgaccgaggatgaccaggaaactaccactcggttcctgcagaccgaagccgtgaccctgcaggacgtgagaggccgggactaccagaacgccatgcgggtgtggtccaacatccctggactgaaaagcaagcacgcacctctgacccctaaagaagaggagtacctgcaggcccaggtgcggagcagaagcaagctggacgcccctaaggtggatctgctggtgaagaattgcctcctgcccctgagagagtacttcaagtatttcagccagaatagtctgcccctgggcggcccaagcagcggcgcccctcctcccagcggcggcagcccagccggctccccaacctctaccgaggagggcacctctgagtccgccacccccgagagcggccctggcacctccaccgagcccagcgagggcagcgcacccggcagccctgccggcagccccacctccacagaggagggaaccagcaccgagcccagcgaaggcagcgccccaggcaccagcaccgagcctagtgagggcggctctggcggcggcagcgcccaggagattaaacggatcaacaagatcagaagaagacttgtgaaagacagcaacaccaagaaggccggcaagacaggccccatgaaaaccctgctggttagagtgatgacacccgatctgagagagcggctggaaaacctgagaaagaagcctgaaaatatcccccagcccatcagcaatacatctagagccaacctgaataagctgctgaccgattacaccgaaatgaagaaggcgatcctgcatgtgtactgggaagagttccagaaggaccctgtgggcctgatgagccgggtggcccagcctgccagcaagaagatcgatcagaacaagctgaaacctgagatggacgagaagggcaacctgaccaccgccggctttgcctgctctcagtgtggccagcccctgttcgtgtacaagctggagcaggtgtctgagaagggcaaggcttacaccaactacttcggacggtgcaatgtggccgagcacgaaaagctgatcctgctggcccagctgaagcccgagaaggatagcgacgaagccgtgacatatagcctgggaaagtttgggcagagggccctggatttctacagcattcatgtgaccaaggagtccacccaccccgtgaagcccctggcccagatcgccggaaacagatacgcctccggacctgtgggaaaggccctgagcgacgcatgtatgggcacaatcgcctccttcctgtctaagtaccaggacatcatcatcgaacaccagaaggtggtgaagggcaaccagaagagactggagagcctgcgggagctggccggcaaggaaaacctggaataccctagcgtgaccctgccacctcagcctcacaccaaggagggcgttgatgcctacaacgaagtgatcgcccgggtgcgaatgtgggtgaacctgaacctgtggcagaagctgaagctaagcagagatgatgccaagcctctgctgagactgaagggattcccttcctttcctctggtcgagagacaggccaacgaagtggactggtgggacatggtgtgtaacgtgaagaagctgatcaacgagaaaaaggaggatggcaaggtgttttggcagaatctggctggctacaagagacaggaagccctgagaccatacctgagcagcgaggaagatcggaagaagggaaagaaattcgctcggtaccagctgggcgacctgctgctgcacctggaaaagaagcacggcgaggactggggaaaggtgtacgacgaggcctgggagcggattgacaagaaagtggaaggcctgagcaagcacatcaagctggaagaggaacggagaagcgaggacgcccagagcaaggccgccctgaccgactggctgcgggctaaggccagcttcgtgatcgagggcctgaaggaggccgacaaggacgagttctgcagatgcgagctgaagctgcagaagtggtacggggacctgcggggaaagcccttcgccatcgaagccgagaacagcatcctggacatcagcggcttcagcaagcagtacaactgtgccttcatctggcagaaggacggcgtgaagaagctgaacctgtacctgatcatcaactacttcaagggcggcaagctgcggttcaagaagatcaaacctgaagccttcgaagccaacagattctacaccgtgatcaacaaaaagagcggcgagatcgtgcccatggaggtgaacttcaacttcgacgaccccaacctgatcatcctgcctctggcctttggcaagagacagggcagagaattcatctggaacgacctgctgtccctggaaaccggcagcctgaagctggccaacggaagagtgatcgagaagacactgtacaacagaagaacccggcaggatgagcctgccctgttcgtggccctgaccttcgagcggcgggaggtcctggactcctccaatatcaaaccaatgaacctgatcggcgtggcaagaggcgaaaacatccccgccgtgatcgccctgaccgaccccgagggctgcccactgagccggtttaaggatagcctgggaaacccaacccacatcctgagaatcggcgagagctataaggagaagcagcggaccatccaggccaagaaggaggtggagcagcggagagccggcggctacagccggaagtacgccagcaaagccaagaatctggcagacgatatggtgagaaacaccgctagagatctgctgtactacgccgtgacccaggatgccatgctgatcttcgccaacctgagccggggcttcggccggcagggcaagcggaccttcatggccgagagacagtacacacggatggaggactggctgaccgccaagctggcctacgagggcctgagcaagacctacctgtccaagacactggcccagtacacctccaagacatgcagcaactgtgggtttaccatcaccagcgccgactacgacagggtgctggagaagctgaagaagacagcaacaggctggatgaccacaattaacggcaaggagctgaaggtggagggccagattacctactacaacagatacaagagacagaacgtagtcaaggacctgtccgtcgagctggatagactgagcgaagaatctgtgaacaacgacatctcctcctggacaaagggcagaagcggagaagctctgagcctcctgaagaaaagattctcccatagacccgtgcaggagaagttcgtgtgcctgaactgcggcttcgagacacacgcagccgagcaagccgccctgaacatcgccagatcctggctgttcctgcggagccaggagtacaagaaataccagacaaacaagacaaccggcaacaccgataagagagccttcgtcgagacctggcagtccttttaccggaagaagcttaaggaggtgtggaaacctgccgtgcggtctggcggatctggcggaggctccacaagcagccagagcctggtgaccttcggcgacgtggccgtggagttcagccccgaggagtgggcctggctggacagcgcccagaggagcctgtacaggagcgtgatgctggagaactacaggagcctggtgagcctgggcctgtgcgtgagcaagcccaagatgatcagcagcctggagcagaggaaggagccctgggccgccaagaggaccctgaccaggggcggctgccccgacagcagggccctgaccagccccaagaaaaagagaaaagtctaagctgccttctgcggggcttgccttctggccatgcccttcttctctcccttgcacctgtacctcttggtctttgaataaagcctgagtaggaaggctagcaaaaaaaaaaaaaaaaaaaaaaaaaaaaaaaaaaaaaaaaaaaaaaaaaaaaaaaaaaaaaaaaaaaaaaaaaaaaaaaa

SEQ ID NO: 6006 - RNA, 5797 nt, synthetic construct
  source 1..5797: mol_type = other RNA
aggaaataagagagaaaagaagagtaagaagaaatataagagccaccatggcccctaagaagaagcgtaaagtgagccggatggaacgcctcgtctacgaggtgcggcagaagtgcagaaacatcgaggacatctgcatctcctgcggatctctgaacgtgaccctggagcacccactgttcatcggcggcatgtgccagaactgtaaaaactgttttctggagtgtgcctatcaatacgacgatgacggctaccagagctactgcaccatctgttgcggcggaagagaggtgctgatgtgtggaaataacaactgctgccggtgcttctgcgtggaatgcgtggacctgctggtgggccccggcgccgcccaggccgctattaaggaagatccttggaactgctacatgtgcggccacaagggcacatacggcctgctgagacggagagaggactggcctagcagactgcagatgttcttcgccaataaccacgaccaggagttcgacccccctaaggtgtaccctcccgtccccgccgagaagagaaagcccatccgggtcctgagcctgttcgatggcatcgccaccggtctgctggtgctgaaggacctgggcatccaggtggataggtacattgcctccgaggtgtgcgaggactccatcaccgtgggaatggtgcgtcatcagggcaagatcatgtacgtgggcgacgtgcggagcgtgacacagaagcatatccaggagtggggccctttcgacctggtgatcggcggcagcccttgcaatgacctgagcatcgtgaacccagcccggaagggcctgtacgagggaaccggcagactgttcttcgagttttacagactgctgcacgacgcccggcctaaggaaggcgacgaccggcccttcttttggctgttcgagaatgtggtggccatgggagtcagcgacaagcgggatattagccggttcctggagagcaaccccgtgatgatcgatgccaaggaagtgagcgccgcccaccgggccagatacttctggggcaatctgcctggcatgaacagacccctggccagcaccgtgaacgacaagctggagctgcaggagtgcctggagcacggccggatcgccaagttcagcaaggtgagaaccatcaccacccgaagcaacagcatcaaacaaggcaaggaccagcactttcctgtgttcatgaacgagaaggaggacatcctgtggtgtaccgagatggagagagtgttcgggttcccagtccactacacagatgtcagcaacatgtctagactggccagacagagactgctgggaagaagctggtccgtccctgtgatcagacacctgttcgcccctctgaaggagtacttcgcctgcgtgagcagcggcaacagcaacgccaacagccggggccccagcttctctagcggcctggtgccactgtccctgagagggagccacatgggccccatggagatctacaaaaccgtgagcgcctggaagcggcagcctgtgcgcgtgctgagcctgtttcggaatatcgataaagtcctgaaaagcctgggattcctggagagcggctctggctccggcggtggcaccctgaagtacgtggaggatgtgacaaacgtggtcagacgggatgtggagaagtggggccccttcgatctggtgtacggcagcacccaacccctgggcagctcttgtgaccggtgccctggctggtacatgtttcagttccaccggatcctgcagtacgccctgccgagacaggagtcccagcggccattcttttggattttcatggacaacttgctgctgaccgaggatgaccaggaaactaccactcggttcctgcagaccgaagccgtgaccctgcaggacgtgagaggccgggactaccagaacgccatgcgggtgtggtccaacatccctggactgaaaagcaagcacgcacctctgacccctaaagaagaggagtacctgcaggcccaggtgcggagcagaagcaagctggacgcccctaaggtggatctgctggtgaagaattgcctcctgcccctgagagagtacttcaagtatttcagccagaatagtctgcccctgggcggcccaagcagcggcgcccctcctcccagcggcggcagcccagccggctccccaacctctaccgaggagggcacctctgagtccgccacccccgagagcggccctggcacctccaccgagcccagcgagggcagcgcacccggcagccctgccggcagccccacctccacagaggagggaaccagcaccgagcccagcgaaggcagcgccccaggcaccagcaccgagcctagtgagggcggctctggcggcggcagcgcccaggagattaaacggatcaacaagatcagaagaagacttgtgaaagacagcaacaccaagaaggccggcaagacaggccccatgaaaaccctgctggttagagtgatgacacccgatctgagagagcggctggaaaacctgagaaagaagcctgaaaatatcccccagcccatcagcaatacatctagagccaacctgaataagctgctgaccgattacaccgaaatgaagaaggcgatcctgcatgtgtactgggaagagttccagaaggaccctgtgggcctgatgagccgggtggcccagcctgccagcaagaagatcgatcagaacaagctgaaacctgagatggacgagaagggcaacctgaccaccgccggctttgcctgctctcagtgtggccagcccctgttcgtgtacaagctggagcaggtgtctgagaagggcaaggcttacaccaactacttcggacggtgcaatgtggccgagcacgaaaagctgatcctgctggcccagctgaagcccgagaaggatagcgacgaagccgtgacatatagcctgggaaagtttgggcagagggccctggatttctacagcattcatgtgaccaaggagtccacccaccccgtgaagcccctggcccagatcgccggaaacagatacgcctccggacctgtgggaaaggccctgagcgacgcatgtatgggcacaatcgcctccttcctgtctaagtaccaggacatcatcatcgaacaccagaaggtggtgaagggcaaccagaagagactggagagcctgcgggagctggccggcaaggaaaacctggaataccctagcgtgaccctgccacctcagcctcacaccaaggagggcgttgatgcctacaacgaagtgatcgcccgggtgcgaatgtgggtgaacctgaacctgtggcagaagctgaagctaagcagagatgatgccaagcctctgctgagactgaagggattcccttcctttcctctggtcgagagacaggccaacgaagtggactggtgggacatggtgtgtaacgtgaagaagctgatcaacgagaaaaaggaggatggcaaggtgttttggcagaatctggctggctacaagagacaggaagccctgagaccatacctgagcagcgaggaagatcggaagaagggaaagaaattcgctcggtaccagctgggcgacctgctgctgcacctggaaaagaagcacggcgaggactggggaaaggtgtacgacgaggcctgggagcggattgacaagaaagtggaaggcctgagcaagcacatcaagctggaagaggaacggagaagcgaggacgcccagagcaaggccgccctgaccgactggctgcgggctaaggccagcttcgtgatcgagggcctgaaggaggccgacaaggacgagttctgcagatgcgagctgaagctgcagaagtggtacggggacctgcggggaaagcccttcgccatcgaagccgagaacagcatcctggacatcagcggcttcagcaagcagtacaactgtgccttcatctggcagaaggacggcgtgaagaagctgaacctgtacctgatcatcaactacttcaagggcggcaagctgcggttcaagaagatcaaacctgaagccttcgaagccaacagattctacaccgtgatcaacaaaaagagcggcgagatcgtgcccatggaggtgaacttcaacttcgacgaccccaacctgatcatcctgcctctggcctttggcaagagacagggcagagaattcatctggaacgacctgctgtccctggaaaccggcagcctgaagctggccaacggaagagtgatcgagaagacactgtacaacagaagaacccggcaggatgagcctgccctgttcgtggccctgaccttcgagcggcgggaggtcctggactcctccaatatcaaaccaatgaacctgatcggcgtggcaagaggcgaaaacatccccgccgtgatcgccctgaccgaccccgagggctgcccactgagccggtttaaggatagcctgggaaacccaacccacatcctgagaatcggcgagagctataaggagaagcagcggaccatccaggccaagaaggaggtggagcagcggagagccggcggctacagccggaagtacgccagcaaagccaagaatctggcagacgatatggtgagaaacaccgctagagatctgctgtactacgccgtgacccaggatgccatgctgatcttcgccaacctgagccggggcttcggccggcagggcaagcggaccttcatggccgagagacagtacacacggatggaggactggctgaccgccaagctggcctacgagggcctgagcaagacctacctgtccaagacactggcccagtacacctccaagacatgcagcaactgtgggtttaccatcaccagcgccgactacgacagggtgctggagaagctgaagaagacagcaacaggctggatgaccacaattaacggcaaggagctgaaggtggagggccagattacctactacaacagatacaagagacagaacgtagtcaaggacctgtccgtcgagctggatagactgagcgaagaatctgtgaacaacgacatctcctcctggacaaagggcagaagcggagaagctctgagcctcctgaagaaaagattctcccatagacccgtgcaggagaagttcgtgtgcctgaactgcggcttcgagacacacgcagccgagcaagccgccctgaacatcgccagatcctggctgttcctgcggagccaggagtacaagaaataccagacaaacaagacaaccggcaacaccgataagagagccttcgtcgagacctggcagtccttttaccggaagaagcttaaggaggtgtggaaacctgccgtgcggtctggcggatctggcggaggctccacaagcgagcaggtgaccttcaaggacgtggccatcgagttcagcaagaccgagtggaagaggctggaccccgcccagagggccctgtacagggaggtgatgctggagaactacaggaacctggtgagcgtgggcaccagcccccccgacgtgaccgtgatcagcatgctggagcagggcgaggagccctggaccgccgagagcagggtgcagaggcccgaggtgcccggcggcagggagtggacccagaccagccccaagaaaaagagaaaagtctaagctgccttctgcggggcttgccttctggccatgcccttcttctctcccttgcacctgtacctcttggtctttgaataaagcctgagtaggaaggctagcaaaaaaaaaaaaaaaaaaaaaaaaaaaaaaaaaaaaaaaaaaaaaaaaaaaaaaaaaaaaaaaaaaaaaaaaaaaaaaaa

SEQ ID NO: 6007 - RNA, 5797 nt, synthetic construct
  source 1..5797: mol_type = other RNA
aggaaataagagagaaaagaagagtaagaagaaatataagagccaccatggcccctaagaagaagcgtaaagtgagccggatggaacgcctcgtctacgaggtgcggcagaagtgcagaaacatcgaggacatctgcatctcctgcggatctctgaacgtgaccctggagcacccactgttcatcggcggcatgtgccagaactgtaaaaactgttttctggagtgtgcctatcaatacgacgatgacggctaccagagctactgcaccatctgttgcggcggaagagaggtgctgatgtgtggaaataacaactgctgccggtgcttctgcgtggaatgcgtggacctgctggtgggccccggcgccgcccaggccgctattaaggaagatccttggaactgctacatgtgcggccacaagggcacatacggcctgctgagacggagagaggactggcctagcagactgcagatgttcttcgccaataaccacgaccaggagttcgacccccctaaggtgtaccctcccgtccccgccgagaagagaaagcccatccgggtcctgagcctgttcgatggcatcgccaccggtctgctggtgctgaaggacctgggcatccaggtggataggtacattgcctccgaggtgtgcgaggactccatcaccgtgggaatggtgcgtcatcagggcaagatcatgtacgtgggcgacgtgcggagcgtgacacagaagcatatccaggagtggggccctttcgacctggtgatcggcggcagcccttgcaatgacctgagcatcgtgaacccagcccggaagggcctgtacgagggaaccggcagactgttcttcgagttttacagactgctgcacgacgcccggcctaaggaaggcgacgaccggcccttcttttggctgttcgagaatgtggtggccatgggagtcagcgacaagcgggatattagccggttcctggagagcaaccccgtgatgatcgatgccaaggaagtgagcgccgcccaccgggccagatacttctggggcaatctgcctggcatgaacagacccctggccagcaccgtgaacgacaagctggagctgcaggagtgcctggagcacggccggatcgccaagttcagcaaggtgagaaccatcaccacccgaagcaacagcatcaaacaaggcaaggaccagcactttcctgtgttcatgaacgagaaggaggacatcctgtggtgtaccgagatggagagagtgttcgggttcccagtccactacacagatgtcagcaacatgtctagactggccagacagagactgctgggaagaagctggtccgtccctgtgatcagacacctgttcgcccctctgaaggagtacttcgcctgcgtgagcagcggcaacagcaacgccaacagccggggccccagcttctctagcggcctggtgccactgtccctgagagggagccacatgggccccatggagatctacaaaaccgtgagcgcctggaagcggcagcctgtgcgcgtgctgagcctgtttcggaatatcgataaagtcctgaaaagcctgggattcctggagagcggctctggctccggcggtggcaccctgaagtacgtggaggatgtgacaaacgtggtcagacgggatgtggagaagtggggccccttcgatctggtgtacggcagcacccaacccctgggcagctcttgtgaccggtgccctggctggtacatgtttcagttccaccggatcctgcagtacgccctgccgagacaggagtcccagcggccattcttttggattttcatggacaacttgctgctgaccgaggatgaccaggaaactaccactcggttcctgcagaccgaagccgtgaccctgcaggacgtgagaggccgggactaccagaacgccatgcgggtgtggtccaacatccctggactgaaaagcaagcacgcacctctgacccctaaagaagaggagtacctgcaggcccaggtgcggagcagaagcaagctggacgcccctaaggtggatctgctggtgaagaattgcctcctgcccctgagagagtacttcaagtatttcagccagaatagtctgcccctgggcggcccaagcagcggcgcccctcctcccagcggcggcagcccagccggctccccaacctctaccgaggagggcacctctgagtccgccacccccgagagcggccctggcacctccaccgagcccagcgagggcagcgcacccggcagccctgccggcagccccacctccacagaggagggaaccagcaccgagcccagcgaaggcagcgccccaggcaccagcaccgagcctagtgagggcggctctggcggcggcagcgcccaggagattaaacggatcaacaagatcagaagaagacttgtgaaagacagcaacaccaagaaggccggcaagacaggccccatgaaaaccctgctggttagagtgatgacacccgatctgagagagcggctggaaaacctgagaaagaagcctgaaaatatcccccagcccatcagcaatacatctagagccaacctgaataagctgctgaccgattacaccgaaatgaagaaggcgatcctgcatgtgtactgggaagagttccagaaggaccctgtgggcctgatgagccgggtggcccagcctgccagcaagaagatcgatcagaacaagctgaaacctgagatggacgagaagggcaacctgaccaccgccggctttgcctgctctcagtgtggccagcccctgttcgtgtacaagctggagcaggtgtctgagaagggcaaggcttacaccaactacttcggacggtgcaatgtggccgagcacgaaaagctgatcctgctggcccagctgaagcccgagaaggatagcgacgaagccgtgacatatagcctgggaaagtttgggcagagggccctggatttctacagcattcatgtgaccaaggagtccacccaccccgtgaagcccctggcccagatcgccggaaacagatacgcctccggacctgtgggaaaggccctgagcgacgcatgtatgggcacaatcgcctccttcctgtctaagtaccaggacatcatcatcgaacaccagaaggtggtgaagggcaaccagaagagactggagagcctgcgggagctggccggcaaggaaaacctggaataccctagcgtgaccctgccacctcagcctcacaccaaggagggcgttgatgcctacaacgaagtgatcgcccgggtgcgaatgtgggtgaacctgaacctgtggcagaagctgaagctaagcagagatgatgccaagcctctgctgagactgaagggattcccttcctttcctctggtcgagagacaggccaacgaagtggactggtgggacatggtgtgtaacgtgaagaagctgatcaacgagaaaaaggaggatggcaaggtgttttggcagaatctggctggctacaagagacaggaagccctgagaccatacctgagcagcgaggaagatcggaagaagggaaagaaattcgctcggtaccagctgggcgacctgctgctgcacctggaaaagaagcacggcgaggactggggaaaggtgtacgacgaggcctgggagcggattgacaagaaagtggaaggcctgagcaagcacatcaagctggaagaggaacggagaagcgaggacgcccagagcaaggccgccctgaccgactggctgcgggctaaggccagcttcgtgatcgagggcctgaaggaggccgacaaggacgagttctgcagatgcgagctgaagctgcagaagtggtacggggacctgcggggaaagcccttcgccatcgaagccgagaacagcatcctggacatcagcggcttcagcaagcagtacaactgtgccttcatctggcagaaggacggcgtgaagaagctgaacctgtacctgatcatcaactacttcaagggcggcaagctgcggttcaagaagatcaaacctgaagccttcgaagccaacagattctacaccgtgatcaacaaaaagagcggcgagatcgtgcccatggaggtgaacttcaacttcgacgaccccaacctgatcatcctgcctctggcctttggcaagagacagggcagagaattcatctggaacgacctgctgtccctggaaaccggcagcctgaagctggccaacggaagagtgatcgagaagacactgtacaacagaagaacccggcaggatgagcctgccctgttcgtggccctgaccttcgagcggcgggaggtcctggactcctccaatatcaaaccaatgaacctgatcggcgtggcaagaggcgaaaacatccccgccgtgatcgccctgaccgaccccgagggctgcccactgagccggtttaaggatagcctgggaaacccaacccacatcctgagaatcggcgagagctataaggagaagcagcggaccatccaggccaagaaggaggtggagcagcggagagccggcggctacagccggaagtacgccagcaaagccaagaatctggcagacgatatggtgagaaacaccgctagagatctgctgtactacgccgtgacccaggatgccatgctgatcttcgccaacctgagccggggcttcggccggcagggcaagcggaccttcatggccgagagacagtacacacggatggaggactggctgaccgccaagctggcctacgagggcctgagcaagacctacctgtccaagacactggcccagtacacctccaagacatgcagcaactgtgggtttaccatcaccagcgccgactacgacagggtgctggagaagctgaagaagacagcaacaggctggatgaccacaattaacggcaaggagctgaaggtggagggccagattacctactacaacagatacaagagacagaacgtagtcaaggacctgtccgtcgagctggatagactgagcgaagaatctgtgaacaacgacatctcctcctggacaaagggcagaagcggagaagctctgagcctcctgaagaaaagattctcccatagacccgtgcaggagaagttcgtgtgcctgaactgcggcttcgagacacacgcagccgagcaagccgccctgaacatcgccagatcctggctgttcctgcggagccaggagtacaagaaataccagacaaacaagacaaccggcaacaccgataagagagccttcgtcgagacctggcagtccttttaccggaagaagcttaaggaggtgtggaaacctgccgtgcggtctggcggatctggcggaggctccacaagcgccagggccagcctgagcttcgaggacgtggccgtgggcttcagctgggaggagtggcagctgctggcccccagccagaaggacctgtacagggaggtgatgctggagaactacaggaacctggtgagcgtgggctaccaggccagcaagcccgacagcctgttccacctggagcagggcgagcccccctggaccgtggtgggcgccgcccagagccagacctgccaggagatctgggagatcaccagccccaagaaaaagagaaaagtctaagctgccttctgcggggcttgccttctggccatgcccttcttctctcccttgcacctgtacctcttggtctttgaataaagcctgagtaggaaggctagcaaaaaaaaaaaaaaaaaaaaaaaaaaaaaaaaaaaaaaaaaaaaaaaaaaaaaaaaaaaaaaaaaaaaaaaaaaaaaaaa

SEQ ID NO: 6008 - RNA, 5797 nt, synthetic construct
  source 1..5797: mol_type = other RNA
aggaaataagagagaaaagaagagtaagaagaaatataagagccaccatggcccctaagaagaagcgtaaagtgagccggatggaacgcctcgtctacgaggtgcggcagaagtgcagaaacatcgaggacatctgcatctcctgcggatctctgaacgtgaccctggagcacccactgttcatcggcggcatgtgccagaactgtaaaaactgttttctggagtgtgcctatcaatacgacgatgacggctaccagagctactgcaccatctgttgcggcggaagagaggtgctgatgtgtggaaataacaactgctgccggtgcttctgcgtggaatgcgtggacctgctggtgggccccggcgccgcccaggccgctattaaggaagatccttggaactgctacatgtgcggccacaagggcacatacggcctgctgagacggagagaggactggcctagcagactgcagatgttcttcgccaataaccacgaccaggagttcgacccccctaaggtgtaccctcccgtccccgccgagaagagaaagcccatccgggtcctgagcctgttcgatggcatcgccaccggtctgctggtgctgaaggacctgggcatccaggtggataggtacattgcctccgaggtgtgcgaggactccatcaccgtgggaatggtgcgtcatcagggcaagatcatgtacgtgggcgacgtgcggagcgtgacacagaagcatatccaggagtggggccctttcgacctggtgatcggcggcagcccttgcaatgacctgagcatcgtgaacccagcccggaagggcctgtacgagggaaccggcagactgttcttcgagttttacagactgctgcacgacgcccggcctaaggaaggcgacgaccggcccttcttttggctgttcgagaatgtggtggccatgggagtcagcgacaagcgggatattagccggttcctggagagcaaccccgtgatgatcgatgccaaggaagtgagcgccgcccaccgggccagatacttctggggcaatctgcctggcatgaacagacccctggccagcaccgtgaacgacaagctggagctgcaggagtgcctggagcacggccggatcgccaagttcagcaaggtgagaaccatcaccacccgaagcaacagcatcaaacaaggcaaggaccagcactttcctgtgttcatgaacgagaaggaggacatcctgtggtgtaccgagatggagagagtgttcgggttcccagtccactacacagatgtcagcaacatgtctagactggccagacagagactgctgggaagaagctggtccgtccctgtgatcagacacctgttcgcccctctgaaggagtacttcgcctgcgtgagcagcggcaacagcaacgccaacagccggggccccagcttctctagcggcctggtgccactgtccctgagagggagccacatgggccccatggagatctacaaaaccgtgagcgcctggaagcggcagcctgtgcgcgtgctgagcctgtttcggaatatcgataaagtcctgaaaagcctgggattcctggagagcggctctggctccggcggtggcaccctgaagtacgtggaggatgtgacaaacgtggtcagacgggatgtggagaagtggggccccttcgatctggtgtacggcagcacccaacccctgggcagctcttgtgaccggtgccctggctggtacatgtttcagttccaccggatcctgcagtacgccctgccgagacaggagtcccagcggccattcttttggattttcatggacaacttgctgctgaccgaggatgaccaggaaactaccactcggttcctgcagaccgaagccgtgaccctgcaggacgtgagaggccgggactaccagaacgccatgcgggtgtggtccaacatccctggactgaaaagcaagcacgcacctctgacccctaaagaagaggagtacctgcaggcccaggtgcggagcagaagcaagctggacgcccctaaggtggatctgctggtgaagaattgcctcctgcccctgagagagtacttcaagtatttcagccagaatagtctgcccctgggcggcccaagcagcggcgcccctcctcccagcggcggcagcccagccggctccccaacctctaccgaggagggcacctctgagtccgccacccccgagagcggccctggcacctccaccgagcccagcgagggcagcgcacccggcagccctgccggcagccccacctccacagaggagggaaccagcaccgagcccagcgaaggcagcgccccaggcaccagcaccgagcctagtgagggcggctctggcggcggcagcgcccaggagattaaacggatcaacaagatcagaagaagacttgtgaaagacagcaacaccaagaaggccggcaagacaggccccatgaaaaccctgctggttagagtgatgacacccgatctgagagagcggctggaaaacctgagaaagaagcctgaaaatatcccccagcccatcagcaatacatctagagccaacctgaataagctgctgaccgattacaccgaaatgaagaaggcgatcctgcatgtgtactgggaagagttccagaaggaccctgtgggcctgatgagccgggtggcccagcctgccagcaagaagatcgatcagaacaagctgaaacctgagatggacgagaagggcaacctgaccaccgccggctttgcctgctctcagtgtggccagcccctgttcgtgtacaagctggagcaggtgtctgagaagggcaaggcttacaccaactacttcggacggtgcaatgtggccgagcacgaaaagctgatcctgctggcccagctgaagcccgagaaggatagcgacgaagccgtgacatatagcctgggaaagtttgggcagagggccctggatttctacagcattcatgtgaccaaggagtccacccaccccgtgaagcccctggcccagatcgccggaaacagatacgcctccggacctgtgggaaaggccctgagcgacgcatgtatgggcacaatcgcctccttcctgtctaagtaccaggacatcatcatcgaacaccagaaggtggtgaagggcaaccagaagagactggagagcctgcgggagctggccggcaaggaaaacctggaataccctagcgtgaccctgccacctcagcctcacaccaaggagggcgttgatgcctacaacgaagtgatcgcccgggtgcgaatgtgggtgaacctgaacctgtggcagaagctgaagctaagcagagatgatgccaagcctctgctgagactgaagggattcccttcctttcctctggtcgagagacaggccaacgaagtggactggtgggacatggtgtgtaacgtgaagaagctgatcaacgagaaaaaggaggatggcaaggtgttttggcagaatctggctggctacaagagacaggaagccctgagaccatacctgagcagcgaggaagatcggaagaagggaaagaaattcgctcggtaccagctgggcgacctgctgctgcacctggaaaagaagcacggcgaggactggggaaaggtgtacgacgaggcctgggagcggattgacaagaaagtggaaggcctgagcaagcacatcaagctggaagaggaacggagaagcgaggacgcccagagcaaggccgccctgaccgactggctgcgggctaaggccagcttcgtgatcgagggcctgaaggaggccgacaaggacgagttctgcagatgcgagctgaagctgcagaagtggtacggggacctgcggggaaagcccttcgccatcgaagccgagaacagcatcctggacatcagcggcttcagcaagcagtacaactgtgccttcatctggcagaaggacggcgtgaagaagctgaacctgtacctgatcatcaactacttcaagggcggcaagctgcggttcaagaagatcaaacctgaagccttcgaagccaacagattctacaccgtgatcaacaaaaagagcggcgagatcgtgcccatggaggtgaacttcaacttcgacgaccccaacctgatcatcctgcctctggcctttggcaagagacagggcagagaattcatctggaacgacctgctgtccctggaaaccggcagcctgaagctggccaacggaagagtgatcgagaagacactgtacaacagaagaacccggcaggatgagcctgccctgttcgtggccctgaccttcgagcggcgggaggtcctggactcctccaatatcaaaccaatgaacctgatcggcgtggcaagaggcgaaaacatccccgccgtgatcgccctgaccgaccccgagggctgcccactgagccggtttaaggatagcctgggaaacccaacccacatcctgagaatcggcgagagctataaggagaagcagcggaccatccaggccaagaaggaggtggagcagcggagagccggcggctacagccggaagtacgccagcaaagccaagaatctggcagacgatatggtgagaaacaccgctagagatctgctgtactacgccgtgacccaggatgccatgctgatcttcgccaacctgagccggggcttcggccggcagggcaagcggaccttcatggccgagagacagtacacacggatggaggactggctgaccgccaagctggcctacgagggcctgagcaagacctacctgtccaagacactggcccagtacacctccaagacatgcagcaactgtgggtttaccatcaccagcgccgactacgacagggtgctggagaagctgaagaagacagcaacaggctggatgaccacaattaacggcaaggagctgaaggtggagggccagattacctactacaacagatacaagagacagaacgtagtcaaggacctgtccgtcgagctggatagactgagcgaagaatctgtgaacaacgacatctcctcctggacaaagggcagaagcggagaagctctgagcctcctgaagaaaagattctcccatagacccgtgcaggagaagttcgtgtgcctgaactgcggcttcgagacacacgcagccgagcaagccgccctgaacatcgccagatcctggctgttcctgcggagccaggagtacaagaaataccagacaaacaagacaaccggcaacaccgataagagagccttcgtcgagacctggcagtccttttaccggaagaagcttaaggaggtgtggaaacctgccgtgcggtctggcggatctggcggaggctccacaagcatggccttcgaggacgtggccgtgtacttcagccaggaggagtggatgttcctggacgccgcccagagggccctgtacaggcacgtgatgctggagaacttcgccctggtggacagcatcggcctgagcgtgagcaggcccagggtgatcatccagctgcagaggggcgaggagccctgggtgcccaacaggaccaaccccggccccggcaggagcacctgcaggaggcccagcctgggcagcaccagccccaagaaaaagagaaaagtctaagctgccttctgcggggcttgccttctggccatgcccttcttctctcccttgcacctgtacctcttggtctttgaataaagcctgagtaggaaggctagcaaaaaaaaaaaaaaaaaaaaaaaaaaaaaaaaaaaaaaaaaaaaaaaaaaaaaaaaaaaaaaaaaaaaaaaaaaaaaaaa

SEQ ID NO: 6009 - RNA, 5797 nt, synthetic construct
  source 1..5797: mol_type = other RNA
aggaaataagagagaaaagaagagtaagaagaaatataagagccaccatggcccctaagaagaagcgtaaagtgagccggatggaacgcctcgtctacgaggtgcggcagaagtgcagaaacatcgaggacatctgcatctcctgcggatctctgaacgtgaccctggagcacccactgttcatcggcggcatgtgccagaactgtaaaaactgttttctggagtgtgcctatcaatacgacgatgacggctaccagagctactgcaccatctgttgcggcggaagagaggtgctgatgtgtggaaataacaactgctgccggtgcttctgcgtggaatgcgtggacctgctggtgggccccggcgccgcccaggccgctattaaggaagatccttggaactgctacatgtgcggccacaagggcacatacggcctgctgagacggagagaggactggcctagcagactgcagatgttcttcgccaataaccacgaccaggagttcgacccccctaaggtgtaccctcccgtccccgccgagaagagaaagcccatccgggtcctgagcctgttcgatggcatcgccaccggtctgctggtgctgaaggacctgggcatccaggtggataggtacattgcctccgaggtgtgcgaggactccatcaccgtgggaatggtgcgtcatcagggcaagatcatgtacgtgggcgacgtgcggagcgtgacacagaagcatatccaggagtggggccctttcgacctggtgatcggcggcagcccttgcaatgacctgagcatcgtgaacccagcccggaagggcctgtacgagggaaccggcagactgttcttcgagttttacagactgctgcacgacgcccggcctaaggaaggcgacgaccggcccttcttttggctgttcgagaatgtggtggccatgggagtcagcgacaagcgggatattagccggttcctggagagcaaccccgtgatgatcgatgccaaggaagtgagcgccgcccaccgggccagatacttctggggcaatctgcctggcatgaacagacccctggccagcaccgtgaacgacaagctggagctgcaggagtgcctggagcacggccggatcgccaagttcagcaaggtgagaaccatcaccacccgaagcaacagcatcaaacaaggcaaggaccagcactttcctgtgttcatgaacgagaaggaggacatcctgtggtgtaccgagatggagagagtgttcgggttcccagtccactacacagatgtcagcaacatgtctagactggccagacagagactgctgggaagaagctggtccgtccctgtgatcagacacctgttcgcccctctgaaggagtacttcgcctgcgtgagcagcggcaacagcaacgccaacagccggggccccagcttctctagcggcctggtgccactgtccctgagagggagccacatgggccccatggagatctacaaaaccgtgagcgcctggaagcggcagcctgtgcgcgtgctgagcctgtttcggaatatcgataaagtcctgaaaagcctgggattcctggagagcggctctggctccggcggtggcaccctgaagtacgtggaggatgtgacaaacgtggtcagacgggatgtggagaagtggggccccttcgatctggtgtacggcagcacccaacccctgggcagctcttgtgaccggtgccctggctggtacatgtttcagttccaccggatcctgcagtacgccctgccgagacaggagtcccagcggccattcttttggattttcatggacaacttgctgctgaccgaggatgaccaggaaactaccactcggttcctgcagaccgaagccgtgaccctgcaggacgtgagaggccgggactaccagaacgccatgcgggtgtggtccaacatccctggactgaaaagcaagcacgcacctctgacccctaaagaagaggagtacctgcaggcccaggtgcggagcagaagcaagctggacgcccctaaggtggatctgctggtgaagaattgcctcctgcccctgagagagtacttcaagtatttcagccagaatagtctgcccctgggcggcccaagcagcggcgcccctcctcccagcggcggcagcccagccggctccccaacctctaccgaggagggcacctctgagtccgccacccccgagagcggccctggcacctccaccgagcccagcgagggcagcgcacccggcagccctgccggcagccccacctccacagaggagggaaccagcaccgagcccagcgaaggcagcgccccaggcaccagcaccgagcctagtgagggcggctctggcggcggcagcgcccaggagattaaacggatcaacaagatcagaagaagacttgtgaaagacagcaacaccaagaaggccggcaagacaggccccatgaaaaccctgctggttagagtgatgacacccgatctgagagagcggctggaaaacctgagaaagaagcctgaaaatatcccccagcccatcagcaatacatctagagccaacctgaataagctgctgaccgattacaccgaaatgaagaaggcgatcctgcatgtgtactgggaagagttccagaaggaccctgtgggcctgatgagccgggtggcccagcctgccagcaagaagatcgatcagaacaagctgaaacctgagatggacgagaagggcaacctgaccaccgccggctttgcctgctctcagtgtggccagcccctgttcgtgtacaagctggagcaggtgtctgagaagggcaaggcttacaccaactacttcggacggtgcaatgtggccgagcacgaaaagctgatcctgctggcccagctgaagcccgagaaggatagcgacgaagccgtgacatatagcctgggaaagtttgggcagagggccctggatttctacagcattcatgtgaccaaggagtccacccaccccgtgaagcccctggcccagatcgccggaaacagatacgcctccggacctgtgggaaaggccctgagcgacgcatgtatgggcacaatcgcctccttcctgtctaagtaccaggacatcatcatcgaacaccagaaggtggtgaagggcaaccagaagagactggagagcctgcgggagctggccggcaaggaaaacctggaataccctagcgtgaccctgccacctcagcctcacaccaaggagggcgttgatgcctacaacgaagtgatcgcccgggtgcgaatgtgggtgaacctgaacctgtggcagaagctgaagctaagcagagatgatgccaagcctctgctgagactgaagggattcccttcctttcctctggtcgagagacaggccaacgaagtggactggtgggacatggtgtgtaacgtgaagaagctgatcaacgagaaaaaggaggatggcaaggtgttttggcagaatctggctggctacaagagacaggaagccctgagaccatacctgagcagcgaggaagatcggaagaagggaaagaaattcgctcggtaccagctgggcgacctgctgctgcacctggaaaagaagcacggcgaggactggggaaaggtgtacgacgaggcctgggagcggattgacaagaaagtggaaggcctgagcaagcacatcaagctggaagaggaacggagaagcgaggacgcccagagcaaggccgccctgaccgactggctgcgggctaaggccagcttcgtgatcgagggcctgaaggaggccgacaaggacgagttctgcagatgcgagctgaagctgcagaagtggtacggggacctgcggggaaagcccttcgccatcgaagccgagaacagcatcctggacatcagcggcttcagcaagcagtacaactgtgccttcatctggcagaaggacggcgtgaagaagctgaacctgtacctgatcatcaactacttcaagggcggcaagctgcggttcaagaagatcaaacctgaagccttcgaagccaacagattctacaccgtgatcaacaaaaagagcggcgagatcgtgcccatggaggtgaacttcaacttcgacgaccccaacctgatcatcctgcctctggcctttggcaagagacagggcagagaattcatctggaacgacctgctgtccctggaaaccggcagcctgaagctggccaacggaagagtgatcgagaagacactgtacaacagaagaacccggcaggatgagcctgccctgttcgtggccctgaccttcgagcggcgggaggtcctggactcctccaatatcaaaccaatgaacctgatcggcgtggcaagaggcgaaaacatccccgccgtgatcgccctgaccgaccccgagggctgcccactgagccggtttaaggatagcctgggaaacccaacccacatcctgagaatcggcgagagctataaggagaagcagcggaccatccaggccaagaaggaggtggagcagcggagagccggcggctacagccggaagtacgccagcaaagccaagaatctggcagacgatatggtgagaaacaccgctagagatctgctgtactacgccgtgacccaggatgccatgctgatcttcgccaacctgagccggggcttcggccggcagggcaagcggaccttcatggccgagagacagtacacacggatggaggactggctgaccgccaagctggcctacgagggcctgagcaagacctacctgtccaagacactggcccagtacacctccaagacatgcagcaactgtgggtttaccatcaccagcgccgactacgacagggtgctggagaagctgaagaagacagcaacaggctggatgaccacaattaacggcaaggagctgaaggtggagggccagattacctactacaacagatacaagagacagaacgtagtcaaggacctgtccgtcgagctggatagactgagcgaagaatctgtgaacaacgacatctcctcctggacaaagggcagaagcggagaagctctgagcctcctgaagaaaagattctcccatagacccgtgcaggagaagttcgtgtgcctgaactgcggcttcgagacacacgcagccgagcaagccgccctgaacatcgccagatcctggctgttcctgcggagccaggagtacaagaaataccagacaaacaagacaaccggcaacaccgataagagagccttcgtcgagacctggcagtccttttaccggaagaagcttaaggaggtgtggaaacctgccgtgcggtctggcggatctggcggaggctccacaagcatgagccagggcagcgtgaccttcagggacgtggccatcgacttcagccaggaggagtggaagtggctgcagcccgcccagagggacctgtacaggtgcgtgatgctggagaactacggccacctggtgagcctgggcctgagcatcagcaagcccgacgtggtgagcctgctggagcagggcaaggagccctggctgggcaagagggaggtgaagagggacctgttcagcggctggagcgccaccagccccaagaaaaagagaaaagtctaagctgccttctgcggggcttgccttctggccatgcccttcttctctcccttgcacctgtacctcttggtctttgaataaagcctgagtaggaaggctagcaaaaaaaaaaaaaaaaaaaaaaaaaaaaaaaaaaaaaaaaaaaaaaaaaaaaaaaaaaaaaaaaaaaaaaaaaaaaaaaa

SEQ ID NO: 6010 - RNA, 5797 nt, synthetic construct
  source 1..5797: mol_type = other RNA
aggaaataagagagaaaagaagagtaagaagaaatataagagccaccatggcccctaagaagaagcgtaaagtgagccggatggaacgcctcgtctacgaggtgcggcagaagtgcagaaacatcgaggacatctgcatctcctgcggatctctgaacgtgaccctggagcacccactgttcatcggcggcatgtgccagaactgtaaaaactgttttctggagtgtgcctatcaatacgacgatgacggctaccagagctactgcaccatctgttgcggcggaagagaggtgctgatgtgtggaaataacaactgctgccggtgcttctgcgtggaatgcgtggacctgctggtgggccccggcgccgcccaggccgctattaaggaagatccttggaactgctacatgtgcggccacaagggcacatacggcctgctgagacggagagaggactggcctagcagactgcagatgttcttcgccaataaccacgaccaggagttcgacccccctaaggtgtaccctcccgtccccgccgagaagagaaagcccatccgggtcctgagcctgttcgatggcatcgccaccggtctgctggtgctgaaggacctgggcatccaggtggataggtacattgcctccgaggtgtgcgaggactccatcaccgtgggaatggtgcgtcatcagggcaagatcatgtacgtgggcgacgtgcggagcgtgacacagaagcatatccaggagtggggccctttcgacctggtgatcggcggcagcccttgcaatgacctgagcatcgtgaacccagcccggaagggcctgtacgagggaaccggcagactgttcttcgagttttacagactgctgcacgacgcccggcctaaggaaggcgacgaccggcccttcttttggctgttcgagaatgtggtggccatgggagtcagcgacaagcgggatattagccggttcctggagagcaaccccgtgatgatcgatgccaaggaagtgagcgccgcccaccgggccagatacttctggggcaatctgcctggcatgaacagacccctggccagcaccgtgaacgacaagctggagctgcaggagtgcctggagcacggccggatcgccaagttcagcaaggtgagaaccatcaccacccgaagcaacagcatcaaacaaggcaaggaccagcactttcctgtgttcatgaacgagaaggaggacatcctgtggtgtaccgagatggagagagtgttcgggttcccagtccactacacagatgtcagcaacatgtctagactggccagacagagactgctgggaagaagctggtccgtccctgtgatcagacacctgttcgcccctctgaaggagtacttcgcctgcgtgagcagcggcaacagcaacgccaacagccggggccccagcttctctagcggcctggtgccactgtccctgagagggagccacatgggccccatggagatctacaaaaccgtgagcgcctggaagcggcagcctgtgcgcgtgctgagcctgtttcggaatatcgataaagtcctgaaaagcctgggattcctggagagcggctctggctccggcggtggcaccctgaagtacgtggaggatgtgacaaacgtggtcagacgggatgtggagaagtggggccccttcgatctggtgtacggcagcacccaacccctgggcagctcttgtgaccggtgccctggctggtacatgtttcagttccaccggatcctgcagtacgccctgccgagacaggagtcccagcggccattcttttggattttcatggacaacttgctgctgaccgaggatgaccaggaaactaccactcggttcctgcagaccgaagccgtgaccctgcaggacgtgagaggccgggactaccagaacgccatgcgggtgtggtccaacatccctggactgaaaagcaagcacgcacctctgacccctaaagaagaggagtacctgcaggcccaggtgcggagcagaagcaagctggacgcccctaaggtggatctgctggtgaagaattgcctcctgcccctgagagagtacttcaagtatttcagccagaatagtctgcccctgggcggcccaagcagcggcgcccctcctcccagcggcggcagcccagccggctccccaacctctaccgaggagggcacctctgagtccgccacccccgagagcggccctggcacctccaccgagcccagcgagggcagcgcacccggcagccctgccggcagccccacctccacagaggagggaaccagcaccgagcccagcgaaggcagcgccccaggcaccagcaccgagcctagtgagggcggctctggcggcggcagcgcccaggagattaaacggatcaacaagatcagaagaagacttgtgaaagacagcaacaccaagaaggccggcaagacaggccccatgaaaaccctgctggttagagtgatgacacccgatctgagagagcggctggaaaacctgagaaagaagcctgaaaatatcccccagcccatcagcaatacatctagagccaacctgaataagctgctgaccgattacaccgaaatgaagaaggcgatcctgcatgtgtactgggaagagttccagaaggaccctgtgggcctgatgagccgggtggcccagcctgccagcaagaagatcgatcagaacaagctgaaacctgagatggacgagaagggcaacctgaccaccgccggctttgcctgctctcagtgtggccagcccctgttcgtgtacaagctggagcaggtgtctgagaagggcaaggcttacaccaactacttcggacggtgcaatgtggccgagcacgaaaagctgatcctgctggcccagctgaagcccgagaaggatagcgacgaagccgtgacatatagcctgggaaagtttgggcagagggccctggatttctacagcattcatgtgaccaaggagtccacccaccccgtgaagcccctggcccagatcgccggaaacagatacgcctccggacctgtgggaaaggccctgagcgacgcatgtatgggcacaatcgcctccttcctgtctaagtaccaggacatcatcatcgaacaccagaaggtggtgaagggcaaccagaagagactggagagcctgcgggagctggccggcaaggaaaacctggaataccctagcgtgaccctgccacctcagcctcacaccaaggagggcgttgatgcctacaacgaagtgatcgcccgggtgcgaatgtgggtgaacctgaacctgtggcagaagctgaagctaagcagagatgatgccaagcctctgctgagactgaagggattcccttcctttcctctggtcgagagacaggccaacgaagtggactggtgggacatggtgtgtaacgtgaagaagctgatcaacgagaaaaaggaggatggcaaggtgttttggcagaatctggctggctacaagagacaggaagccctgagaccatacctgagcagcgaggaagatcggaagaagggaaagaaattcgctcggtaccagctgggcgacctgctgctgcacctggaaaagaagcacggcgaggactggggaaaggtgtacgacgaggcctgggagcggattgacaagaaagtggaaggcctgagcaagcacatcaagctggaagaggaacggagaagcgaggacgcccagagcaaggccgccctgaccgactggctgcgggctaaggccagcttcgtgatcgagggcctgaaggaggccgacaaggacgagttctgcagatgcgagctgaagctgcagaagtggtacggggacctgcggggaaagcccttcgccatcgaagccgagaacagcatcctggacatcagcggcttcagcaagcagtacaactgtgccttcatctggcagaaggacggcgtgaagaagctgaacctgtacctgatcatcaactacttcaagggcggcaagctgcggttcaagaagatcaaacctgaagccttcgaagccaacagattctacaccgtgatcaacaaaaagagcggcgagatcgtgcccatggaggtgaacttcaacttcgacgaccccaacctgatcatcctgcctctggcctttggcaagagacagggcagagaattcatctggaacgacctgctgtccctggaaaccggcagcctgaagctggccaacggaagagtgatcgagaagacactgtacaacagaagaacccggcaggatgagcctgccctgttcgtggccctgaccttcgagcggcgggaggtcctggactcctccaatatcaaaccaatgaacctgatcggcgtggcaagaggcgaaaacatccccgccgtgatcgccctgaccgaccccgagggctgcccactgagccggtttaaggatagcctgggaaacccaacccacatcctgagaatcggcgagagctataaggagaagcagcggaccatccaggccaagaaggaggtggagcagcggagagccggcggctacagccggaagtacgccagcaaagccaagaatctggcagacgatatggtgagaaacaccgctagagatctgctgtactacgccgtgacccaggatgccatgctgatcttcgccaacctgagccggggcttcggccggcagggcaagcggaccttcatggccgagagacagtacacacggatggaggactggctgaccgccaagctggcctacgagggcctgagcaagacctacctgtccaagacactggcccagtacacctccaagacatgcagcaactgtgggtttaccatcaccagcgccgactacgacagggtgctggagaagctgaagaagacagcaacaggctggatgaccacaattaacggcaaggagctgaaggtggagggccagattacctactacaacagatacaagagacagaacgtagtcaaggacctgtccgtcgagctggatagactgagcgaagaatctgtgaacaacgacatctcctcctggacaaagggcagaagcggagaagctctgagcctcctgaagaaaagattctcccatagacccgtgcaggagaagttcgtgtgcctgaactgcggcttcgagacacacgcagccgagcaagccgccctgaacatcgccagatcctggctgttcctgcggagccaggagtacaagaaataccagacaaacaagacaaccggcaacaccgataagagagccttcgtcgagacctggcagtccttttaccggaagaagcttaaggaggtgtggaaacctgccgtgcggtctggcggatctggcggaggctccacaagcgcccaccacctggtgatgttcagggacgtggccgtggacttcagccaggaggagtgggagtgcctgaacccctaccagaggaacctgtacagggacgtgatcctggagaactacagcaacctggtgagcgtgggctgcagcatcagcaagcccgacgtgatcaccctgctggagcagggcaaggagccctggatggtggtgagggacgagaggaggaggagcctggacctggagagcaggtacaccagccccaagaaaaagagaaaagtctaagctgccttctgcggggcttgccttctggccatgcccttcttctctcccttgcacctgtacctcttggtctttgaataaagcctgagtaggaaggctagcaaaaaaaaaaaaaaaaaaaaaaaaaaaaaaaaaaaaaaaaaaaaaaaaaaaaaaaaaaaaaaaaaaaaaaaaaaaaaaaa

SEQ ID NO: 6011 - RNA, 5797 nt, synthetic construct
  source 1..5797: mol_type = other RNA
aggaaataagagagaaaagaagagtaagaagaaatataagagccaccatggcccctaagaagaagcgtaaagtgagccggatggaacgcctcgtctacgaggtgcggcagaagtgcagaaacatcgaggacatctgcatctcctgcggatctctgaacgtgaccctggagcacccactgttcatcggcggcatgtgccagaactgtaaaaactgttttctggagtgtgcctatcaatacgacgatgacggctaccagagctactgcaccatctgttgcggcggaagagaggtgctgatgtgtggaaataacaactgctgccggtgcttctgcgtggaatgcgtggacctgctggtgggccccggcgccgcccaggccgctattaaggaagatccttggaactgctacatgtgcggccacaagggcacatacggcctgctgagacggagagaggactggcctagcagactgcagatgttcttcgccaataaccacgaccaggagttcgacccccctaaggtgtaccctcccgtccccgccgagaagagaaagcccatccgggtcctgagcctgttcgatggcatcgccaccggtctgctggtgctgaaggacctgggcatccaggtggataggtacattgcctccgaggtgtgcgaggactccatcaccgtgggaatggtgcgtcatcagggcaagatcatgtacgtgggcgacgtgcggagcgtgacacagaagcatatccaggagtggggccctttcgacctggtgatcggcggcagcccttgcaatgacctgagcatcgtgaacccagcccggaagggcctgtacgagggaaccggcagactgttcttcgagttttacagactgctgcacgacgcccggcctaaggaaggcgacgaccggcccttcttttggctgttcgagaatgtggtggccatgggagtcagcgacaagcgggatattagccggttcctggagagcaaccccgtgatgatcgatgccaaggaagtgagcgccgcccaccgggccagatacttctggggcaatctgcctggcatgaacagacccctggccagcaccgtgaacgacaagctggagctgcaggagtgcctggagcacggccggatcgccaagttcagcaaggtgagaaccatcaccacccgaagcaacagcatcaaacaaggcaaggaccagcactttcctgtgttcatgaacgagaaggaggacatcctgtggtgtaccgagatggagagagtgttcgggttcccagtccactacacagatgtcagcaacatgtctagactggccagacagagactgctgggaagaagctggtccgtccctgtgatcagacacctgttcgcccctctgaaggagtacttcgcctgcgtgagcagcggcaacagcaacgccaacagccggggccccagcttctctagcggcctggtgccactgtccctgagagggagccacatgggccccatggagatctacaaaaccgtgagcgcctggaagcggcagcctgtgcgcgtgctgagcctgtttcggaatatcgataaagtcctgaaaagcctgggattcctggagagcggctctggctccggcggtggcaccctgaagtacgtggaggatgtgacaaacgtggtcagacgggatgtggagaagtggggccccttcgatctggtgtacggcagcacccaacccctgggcagctcttgtgaccggtgccctggctggtacatgtttcagttccaccggatcctgcagtacgccctgccgagacaggagtcccagcggccattcttttggattttcatggacaacttgctgctgaccgaggatgaccaggaaactaccactcggttcctgcagaccgaagccgtgaccctgcaggacgtgagaggccgggactaccagaacgccatgcgggtgtggtccaacatccctggactgaaaagcaagcacgcacctctgacccctaaagaagaggagtacctgcaggcccaggtgcggagcagaagcaagctggacgcccctaaggtggatctgctggtgaagaattgcctcctgcccctgagagagtacttcaagtatttcagccagaatagtctgcccctgggcggcccaagcagcggcgcccctcctcccagcggcggcagcccagccggctccccaacctctaccgaggagggcacctctgagtccgccacccccgagagcggccctggcacctccaccgagcccagcgagggcagcgcacccggcagccctgccggcagccccacctccacagaggagggaaccagcaccgagcccagcgaaggcagcgccccaggcaccagcaccgagcctagtgagggcggctctggcggcggcagcgcccaggagattaaacggatcaacaagatcagaagaagacttgtgaaagacagcaacaccaagaaggccggcaagacaggccccatgaaaaccctgctggttagagtgatgacacccgatctgagagagcggctggaaaacctgagaaagaagcctgaaaatatcccccagcccatcagcaatacatctagagccaacctgaataagctgctgaccgattacaccgaaatgaagaaggcgatcctgcatgtgtactgggaagagttccagaaggaccctgtgggcctgatgagccgggtggcccagcctgccagcaagaagatcgatcagaacaagctgaaacctgagatggacgagaagggcaacctgaccaccgccggctttgcctgctctcagtgtggccagcccctgttcgtgtacaagctggagcaggtgtctgagaagggcaaggcttacaccaactacttcggacggtgcaatgtggccgagcacgaaaagctgatcctgctggcccagctgaagcccgagaaggatagcgacgaagccgtgacatatagcctgggaaagtttgggcagagggccctggatttctacagcattcatgtgaccaaggagtccacccaccccgtgaagcccctggcccagatcgccggaaacagatacgcctccggacctgtgggaaaggccctgagcgacgcatgtatgggcacaatcgcctccttcctgtctaagtaccaggacatcatcatcgaacaccagaaggtggtgaagggcaaccagaagagactggagagcctgcgggagctggccggcaaggaaaacctggaataccctagcgtgaccctgccacctcagcctcacaccaaggagggcgttgatgcctacaacgaagtgatcgcccgggtgcgaatgtgggtgaacctgaacctgtggcagaagctgaagctaagcagagatgatgccaagcctctgctgagactgaagggattcccttcctttcctctggtcgagagacaggccaacgaagtggactggtgggacatggtgtgtaacgtgaagaagctgatcaacgagaaaaaggaggatggcaaggtgttttggcagaatctggctggctacaagagacaggaagccctgagaccatacctgagcagcgaggaagatcggaagaagggaaagaaattcgctcggtaccagctgggcgacctgctgctgcacctggaaaagaagcacggcgaggactggggaaaggtgtacgacgaggcctgggagcggattgacaagaaagtggaaggcctgagcaagcacatcaagctggaagaggaacggagaagcgaggacgcccagagcaaggccgccctgaccgactggctgcgggctaaggccagcttcgtgatcgagggcctgaaggaggccgacaaggacgagttctgcagatgcgagctgaagctgcagaagtggtacggggacctgcggggaaagcccttcgccatcgaagccgagaacagcatcctggacatcagcggcttcagcaagcagtacaactgtgccttcatctggcagaaggacggcgtgaagaagctgaacctgtacctgatcatcaactacttcaagggcggcaagctgcggttcaagaagatcaaacctgaagccttcgaagccaacagattctacaccgtgatcaacaaaaagagcggcgagatcgtgcccatggaggtgaacttcaacttcgacgaccccaacctgatcatcctgcctctggcctttggcaagagacagggcagagaattcatctggaacgacctgctgtccctggaaaccggcagcctgaagctggccaacggaagagtgatcgagaagacactgtacaacagaagaacccggcaggatgagcctgccctgttcgtggccctgaccttcgagcggcgggaggtcctggactcctccaatatcaaaccaatgaacctgatcggcgtggcaagaggcgaaaacatccccgccgtgatcgccctgaccgaccccgagggctgcccactgagccggtttaaggatagcctgggaaacccaacccacatcctgagaatcggcgagagctataaggagaagcagcggaccatccaggccaagaaggaggtggagcagcggagagccggcggctacagccggaagtacgccagcaaagccaagaatctggcagacgatatggtgagaaacaccgctagagatctgctgtactacgccgtgacccaggatgccatgctgatcttcgccaacctgagccggggcttcggccggcagggcaagcggaccttcatggccgagagacagtacacacggatggaggactggctgaccgccaagctggcctacgagggcctgagcaagacctacctgtccaagacactggcccagtacacctccaagacatgcagcaactgtgggtttaccatcaccagcgccgactacgacagggtgctggagaagctgaagaagacagcaacaggctggatgaccacaattaacggcaaggagctgaaggtggagggccagattacctactacaacagatacaagagacagaacgtagtcaaggacctgtccgtcgagctggatagactgagcgaagaatctgtgaacaacgacatctcctcctggacaaagggcagaagcggagaagctctgagcctcctgaagaaaagattctcccatagacccgtgcaggagaagttcgtgtgcctgaactgcggcttcgagacacacgcagccgagcaagccgccctgaacatcgccagatcctggctgttcctgcggagccaggagtacaagaaataccagacaaacaagacaaccggcaacaccgataagagagccttcgtcgagacctggcagtccttttaccggaagaagcttaaggaggtgtggaaacctgccgtgcggtctggcggatctggcggaggctccacaagcccccaggagcccgtgaccttcgaggacgtggccgtgtacttcacccagaaccagtgggccagcctggaccccacccagagggccctgtacagggaggtgatgctggagaactacgccagcgtggccagcctggtgttccccttccccaagcccgacctggtgagccagctggagaggggcgaggccccctggggccccgacccctgggaggccgaggtgctgaggggcatctgccccggcggcaccagccccaagaaaaagagaaaagtctaagctgccttctgcggggcttgccttctggccatgcccttcttctctcccttgcacctgtacctcttggtctttgaataaagcctgagtaggaaggctagcaaaaaaaaaaaaaaaaaaaaaaaaaaaaaaaaaaaaaaaaaaaaaaaaaaaaaaaaaaaaaaaaaaaaaaaaaaaaaaaa

SEQ ID NO: 6012 - RNA, 5797 nt, synthetic construct
  source 1..5797: mol_type = other RNA
aggaaataagagagaaaagaagagtaagaagaaatataagagccaccatggcccctaagaagaagcgtaaagtgagccggatggaacgcctcgtctacgaggtgcggcagaagtgcagaaacatcgaggacatctgcatctcctgcggatctctgaacgtgaccctggagcacccactgttcatcggcggcatgtgccagaactgtaaaaactgttttctggagtgtgcctatcaatacgacgatgacggctaccagagctactgcaccatctgttgcggcggaagagaggtgctgatgtgtggaaataacaactgctgccggtgcttctgcgtggaatgcgtggacctgctggtgggccccggcgccgcccaggccgctattaaggaagatccttggaactgctacatgtgcggccacaagggcacatacggcctgctgagacggagagaggactggcctagcagactgcagatgttcttcgccaataaccacgaccaggagttcgacccccctaaggtgtaccctcccgtccccgccgagaagagaaagcccatccgggtcctgagcctgttcgatggcatcgccaccggtctgctggtgctgaaggacctgggcatccaggtggataggtacattgcctccgaggtgtgcgaggactccatcaccgtgggaatggtgcgtcatcagggcaagatcatgtacgtgggcgacgtgcggagcgtgacacagaagcatatccaggagtggggccctttcgacctggtgatcggcggcagcccttgcaatgacctgagcatcgtgaacccagcccggaagggcctgtacgagggaaccggcagactgttcttcgagttttacagactgctgcacgacgcccggcctaaggaaggcgacgaccggcccttcttttggctgttcgagaatgtggtggccatgggagtcagcgacaagcgggatattagccggttcctggagagcaaccccgtgatgatcgatgccaaggaagtgagcgccgcccaccgggccagatacttctggggcaatctgcctggcatgaacagacccctggccagcaccgtgaacgacaagctggagctgcaggagtgcctggagcacggccggatcgccaagttcagcaaggtgagaaccatcaccacccgaagcaacagcatcaaacaaggcaaggaccagcactttcctgtgttcatgaacgagaaggaggacatcctgtggtgtaccgagatggagagagtgttcgggttcccagtccactacacagatgtcagcaacatgtctagactggccagacagagactgctgggaagaagctggtccgtccctgtgatcagacacctgttcgcccctctgaaggagtacttcgcctgcgtgagcagcggcaacagcaacgccaacagccggggccccagcttctctagcggcctggtgccactgtccctgagagggagccacatgggccccatggagatctacaaaaccgtgagcgcctggaagcggcagcctgtgcgcgtgctgagcctgtttcggaatatcgataaagtcctgaaaagcctgggattcctggagagcggctctggctccggcggtggcaccctgaagtacgtggaggatgtgacaaacgtggtcagacgggatgtggagaagtggggccccttcgatctggtgtacggcagcacccaacccctgggcagctcttgtgaccggtgccctggctggtacatgtttcagttccaccggatcctgcagtacgccctgccgagacaggagtcccagcggccattcttttggattttcatggacaacttgctgctgaccgaggatgaccaggaaactaccactcggttcctgcagaccgaagccgtgaccctgcaggacgtgagaggccgggactaccagaacgccatgcgggtgtggtccaacatccctggactgaaaagcaagcacgcacctctgacccctaaagaagaggagtacctgcaggcccaggtgcggagcagaagcaagctggacgcccctaaggtggatctgctggtgaagaattgcctcctgcccctgagagagtacttcaagtatttcagccagaatagtctgcccctgggcggcccaagcagcggcgcccctcctcccagcggcggcagcccagccggctccccaacctctaccgaggagggcacctctgagtccgccacccccgagagcggccctggcacctccaccgagcccagcgagggcagcgcacccggcagccctgccggcagccccacctccacagaggagggaaccagcaccgagcccagcgaaggcagcgccccaggcaccagcaccgagcctagtgagggcggctctggcggcggcagcgcccaggagattaaacggatcaacaagatcagaagaagacttgtgaaagacagcaacaccaagaaggccggcaagacaggccccatgaaaaccctgctggttagagtgatgacacccgatctgagagagcggctggaaaacctgagaaagaagcctgaaaatatcccccagcccatcagcaatacatctagagccaacctgaataagctgctgaccgattacaccgaaatgaagaaggcgatcctgcatgtgtactgggaagagttccagaaggaccctgtgggcctgatgagccgggtggcccagcctgccagcaagaagatcgatcagaacaagctgaaacctgagatggacgagaagggcaacctgaccaccgccggctttgcctgctctcagtgtggccagcccctgttcgtgtacaagctggagcaggtgtctgagaagggcaaggcttacaccaactacttcggacggtgcaatgtggccgagcacgaaaagctgatcctgctggcccagctgaagcccgagaaggatagcgacgaagccgtgacatatagcctgggaaagtttgggcagagggccctggatttctacagcattcatgtgaccaaggagtccacccaccccgtgaagcccctggcccagatcgccggaaacagatacgcctccggacctgtgggaaaggccctgagcgacgcatgtatgggcacaatcgcctccttcctgtctaagtaccaggacatcatcatcgaacaccagaaggtggtgaagggcaaccagaagagactggagagcctgcgggagctggccggcaaggaaaacctggaataccctagcgtgaccctgccacctcagcctcacaccaaggagggcgttgatgcctacaacgaagtgatcgcccgggtgcgaatgtgggtgaacctgaacctgtggcagaagctgaagctaagcagagatgatgccaagcctctgctgagactgaagggattcccttcctttcctctggtcgagagacaggccaacgaagtggactggtgggacatggtgtgtaacgtgaagaagctgatcaacgagaaaaaggaggatggcaaggtgttttggcagaatctggctggctacaagagacaggaagccctgagaccatacctgagcagcgaggaagatcggaagaagggaaagaaattcgctcggtaccagctgggcgacctgctgctgcacctggaaaagaagcacggcgaggactggggaaaggtgtacgacgaggcctgggagcggattgacaagaaagtggaaggcctgagcaagcacatcaagctggaagaggaacggagaagcgaggacgcccagagcaaggccgccctgaccgactggctgcgggctaaggccagcttcgtgatcgagggcctgaaggaggccgacaaggacgagttctgcagatgcgagctgaagctgcagaagtggtacggggacctgcggggaaagcccttcgccatcgaagccgagaacagcatcctggacatcagcggcttcagcaagcagtacaactgtgccttcatctggcagaaggacggcgtgaagaagctgaacctgtacctgatcatcaactacttcaagggcggcaagctgcggttcaagaagatcaaacctgaagccttcgaagccaacagattctacaccgtgatcaacaaaaagagcggcgagatcgtgcccatggaggtgaacttcaacttcgacgaccccaacctgatcatcctgcctctggcctttggcaagagacagggcagagaattcatctggaacgacctgctgtccctggaaaccggcagcctgaagctggccaacggaagagtgatcgagaagacactgtacaacagaagaacccggcaggatgagcctgccctgttcgtggccctgaccttcgagcggcgggaggtcctggactcctccaatatcaaaccaatgaacctgatcggcgtggcaagaggcgaaaacatccccgccgtgatcgccctgaccgaccccgagggctgcccactgagccggtttaaggatagcctgggaaacccaacccacatcctgagaatcggcgagagctataaggagaagcagcggaccatccaggccaagaaggaggtggagcagcggagagccggcggctacagccggaagtacgccagcaaagccaagaatctggcagacgatatggtgagaaacaccgctagagatctgctgtactacgccgtgacccaggatgccatgctgatcttcgccaacctgagccggggcttcggccggcagggcaagcggaccttcatggccgagagacagtacacacggatggaggactggctgaccgccaagctggcctacgagggcctgagcaagacctacctgtccaagacactggcccagtacacctccaagacatgcagcaactgtgggtttaccatcaccagcgccgactacgacagggtgctggagaagctgaagaagacagcaacaggctggatgaccacaattaacggcaaggagctgaaggtggagggccagattacctactacaacagatacaagagacagaacgtagtcaaggacctgtccgtcgagctggatagactgagcgaagaatctgtgaacaacgacatctcctcctggacaaagggcagaagcggagaagctctgagcctcctgaagaaaagattctcccatagacccgtgcaggagaagttcgtgtgcctgaactgcggcttcgagacacacgcagccgagcaagccgccctgaacatcgccagatcctggctgttcctgcggagccaggagtacaagaaataccagacaaacaagacaaccggcaacaccgataagagagccttcgtcgagacctggcagtccttttaccggaagaagcttaaggaggtgtggaaacctgccgtgcggtctggcggatctggcggaggctccacaagcatggccttcgaggacgtggccgtgtacttcagccaggaggagtgggtgttcctggacgccgcccagagggccctgtacaggcacgtgatgctggagaacttcgccctggtggacagcatcggcctgagcatcagcaggcccagggtgatcatccagctgcagaggggcgaggagccctgggtgcccaacaggaccaacaccggccccggcaggggcaccaggaggaggcccagcctgggcagcaccagccccaagaaaaagagaaaagtctaagctgccttctgcggggcttgccttctggccatgcccttcttctctcccttgcacctgtacctcttggtctttgaataaagcctgagtaggaaggctagcaaaaaaaaaaaaaaaaaaaaaaaaaaaaaaaaaaaaaaaaaaaaaaaaaaaaaaaaaaaaaaaaaaaaaaaaaaaaaaaa

SEQ ID NO: 6013 - RNA, 5797 nt, synthetic construct
  source 1..5797: mol_type = other RNA
aggaaataagagagaaaagaagagtaagaagaaatataagagccaccatggcccctaagaagaagcgtaaagtgagccggatggaacgcctcgtctacgaggtgcggcagaagtgcagaaacatcgaggacatctgcatctcctgcggatctctgaacgtgaccctggagcacccactgttcatcggcggcatgtgccagaactgtaaaaactgttttctggagtgtgcctatcaatacgacgatgacggctaccagagctactgcaccatctgttgcggcggaagagaggtgctgatgtgtggaaataacaactgctgccggtgcttctgcgtggaatgcgtggacctgctggtgggccccggcgccgcccaggccgctattaaggaagatccttggaactgctacatgtgcggccacaagggcacatacggcctgctgagacggagagaggactggcctagcagactgcagatgttcttcgccaataaccacgaccaggagttcgacccccctaaggtgtaccctcccgtccccgccgagaagagaaagcccatccgggtcctgagcctgttcgatggcatcgccaccggtctgctggtgctgaaggacctgggcatccaggtggataggtacattgcctccgaggtgtgcgaggactccatcaccgtgggaatggtgcgtcatcagggcaagatcatgtacgtgggcgacgtgcggagcgtgacacagaagcatatccaggagtggggccctttcgacctggtgatcggcggcagcccttgcaatgacctgagcatcgtgaacccagcccggaagggcctgtacgagggaaccggcagactgttcttcgagttttacagactgctgcacgacgcccggcctaaggaaggcgacgaccggcccttcttttggctgttcgagaatgtggtggccatgggagtcagcgacaagcgggatattagccggttcctggagagcaaccccgtgatgatcgatgccaaggaagtgagcgccgcccaccgggccagatacttctggggcaatctgcctggcatgaacagacccctggccagcaccgtgaacgacaagctggagctgcaggagtgcctggagcacggccggatcgccaagttcagcaaggtgagaaccatcaccacccgaagcaacagcatcaaacaaggcaaggaccagcactttcctgtgttcatgaacgagaaggaggacatcctgtggtgtaccgagatggagagagtgttcgggttcccagtccactacacagatgtcagcaacatgtctagactggccagacagagactgctgggaagaagctggtccgtccctgtgatcagacacctgttcgcccctctgaaggagtacttcgcctgcgtgagcagcggcaacagcaacgccaacagccggggccccagcttctctagcggcctggtgccactgtccctgagagggagccacatgggccccatggagatctacaaaaccgtgagcgcctggaagcggcagcctgtgcgcgtgctgagcctgtttcggaatatcgataaagtcctgaaaagcctgggattcctggagagcggctctggctccggcggtggcaccctgaagtacgtggaggatgtgacaaacgtggtcagacgggatgtggagaagtggggccccttcgatctggtgtacggcagcacccaacccctgggcagctcttgtgaccggtgccctggctggtacatgtttcagttccaccggatcctgcagtacgccctgccgagacaggagtcccagcggccattcttttggattttcatggacaacttgctgctgaccgaggatgaccaggaaactaccactcggttcctgcagaccgaagccgtgaccctgcaggacgtgagaggccgggactaccagaacgccatgcgggtgtggtccaacatccctggactgaaaagcaagcacgcacctctgacccctaaagaagaggagtacctgcaggcccaggtgcggagcagaagcaagctggacgcccctaaggtggatctgctggtgaagaattgcctcctgcccctgagagagtacttcaagtatttcagccagaatagtctgcccctgggcggcccaagcagcggcgcccctcctcccagcggcggcagcccagccggctccccaacctctaccgaggagggcacctctgagtccgccacccccgagagcggccctggcacctccaccgagcccagcgagggcagcgcacccggcagccctgccggcagccccacctccacagaggagggaaccagcaccgagcccagcgaaggcagcgccccaggcaccagcaccgagcctagtgagggcggctctggcggcggcagcgcccaggagattaaacggatcaacaagatcagaagaagacttgtgaaagacagcaacaccaagaaggccggcaagacaggccccatgaaaaccctgctggttagagtgatgacacccgatctgagagagcggctggaaaacctgagaaagaagcctgaaaatatcccccagcccatcagcaatacatctagagccaacctgaataagctgctgaccgattacaccgaaatgaagaaggcgatcctgcatgtgtactgggaagagttccagaaggaccctgtgggcctgatgagccgggtggcccagcctgccagcaagaagatcgatcagaacaagctgaaacctgagatggacgagaagggcaacctgaccaccgccggctttgcctgctctcagtgtggccagcccctgttcgtgtacaagctggagcaggtgtctgagaagggcaaggcttacaccaactacttcggacggtgcaatgtggccgagcacgaaaagctgatcctgctggcccagctgaagcccgagaaggatagcgacgaagccgtgacatatagcctgggaaagtttgggcagagggccctggatttctacagcattcatgtgaccaaggagtccacccaccccgtgaagcccctggcccagatcgccggaaacagatacgcctccggacctgtgggaaaggccctgagcgacgcatgtatgggcacaatcgcctccttcctgtctaagtaccaggacatcatcatcgaacaccagaaggtggtgaagggcaaccagaagagactggagagcctgcgggagctggccggcaaggaaaacctggaataccctagcgtgaccctgccacctcagcctcacaccaaggagggcgttgatgcctacaacgaagtgatcgcccgggtgcgaatgtgggtgaacctgaacctgtggcagaagctgaagctaagcagagatgatgccaagcctctgctgagactgaagggattcccttcctttcctctggtcgagagacaggccaacgaagtggactggtgggacatggtgtgtaacgtgaagaagctgatcaacgagaaaaaggaggatggcaaggtgttttggcagaatctggctggctacaagagacaggaagccctgagaccatacctgagcagcgaggaagatcggaagaagggaaagaaattcgctcggtaccagctgggcgacctgctgctgcacctggaaaagaagcacggcgaggactggggaaaggtgtacgacgaggcctgggagcggattgacaagaaagtggaaggcctgagcaagcacatcaagctggaagaggaacggagaagcgaggacgcccagagcaaggccgccctgaccgactggctgcgggctaaggccagcttcgtgatcgagggcctgaaggaggccgacaaggacgagttctgcagatgcgagctgaagctgcagaagtggtacggggacctgcggggaaagcccttcgccatcgaagccgagaacagcatcctggacatcagcggcttcagcaagcagtacaactgtgccttcatctggcagaaggacggcgtgaagaagctgaacctgtacctgatcatcaactacttcaagggcggcaagctgcggttcaagaagatcaaacctgaagccttcgaagccaacagattctacaccgtgatcaacaaaaagagcggcgagatcgtgcccatggaggtgaacttcaacttcgacgaccccaacctgatcatcctgcctctggcctttggcaagagacagggcagagaattcatctggaacgacctgctgtccctggaaaccggcagcctgaagctggccaacggaagagtgatcgagaagacactgtacaacagaagaacccggcaggatgagcctgccctgttcgtggccctgaccttcgagcggcgggaggtcctggactcctccaatatcaaaccaatgaacctgatcggcgtggcaagaggcgaaaacatccccgccgtgatcgccctgaccgaccccgagggctgcccactgagccggtttaaggatagcctgggaaacccaacccacatcctgagaatcggcgagagctataaggagaagcagcggaccatccaggccaagaaggaggtggagcagcggagagccggcggctacagccggaagtacgccagcaaagccaagaatctggcagacgatatggtgagaaacaccgctagagatctgctgtactacgccgtgacccaggatgccatgctgatcttcgccaacctgagccggggcttcggccggcagggcaagcggaccttcatggccgagagacagtacacacggatggaggactggctgaccgccaagctggcctacgagggcctgagcaagacctacctgtccaagacactggcccagtacacctccaagacatgcagcaactgtgggtttaccatcaccagcgccgactacgacagggtgctggagaagctgaagaagacagcaacaggctggatgaccacaattaacggcaaggagctgaaggtggagggccagattacctactacaacagatacaagagacagaacgtagtcaaggacctgtccgtcgagctggatagactgagcgaagaatctgtgaacaacgacatctcctcctggacaaagggcagaagcggagaagctctgagcctcctgaagaaaagattctcccatagacccgtgcaggagaagttcgtgtgcctgaactgcggcttcgagacacacgcagccgagcaagccgccctgaacatcgccagatcctggctgttcctgcggagccaggagtacaagaaataccagacaaacaagacaaccggcaacaccgataagagagccttcgtcgagacctggcagtccttttaccggaagaagcttaaggaggtgtggaaacctgccgtgcggtctggcggatctggcggaggctccacaagcgaggagctgcccgtggtgttcgaggacgtggccgtgtacttcaccagggaggagtggggcatgctggtgaagaggcagaaggagctgtacagggacgtgatgaggatgaactacgagctgctggccagcctgggccccgccgccgccaagcccgacctgatcagcaagctggagaggagggccgccccctggatcaaggaccccaacggccccaagtggggcaagggcaggccccccggcaagaccagccccaagaaaaagagaaaagtctaagctgccttctgcggggcttgccttctggccatgcccttcttctctcccttgcacctgtacctcttggtctttgaataaagcctgagtaggaaggctagcaaaaaaaaaaaaaaaaaaaaaaaaaaaaaaaaaaaaaaaaaaaaaaaaaaaaaaaaaaaaaaaaaaaaaaaaaaaaaaaa

SEQ ID NO: 6014 - RNA, 5797 nt, synthetic construct
  source 1..5797: mol_type = other RNA
aggaaataagagagaaaagaagagtaagaagaaatataagagccaccatggcccctaagaagaagcgtaaagtgagccggatggaacgcctcgtctacgaggtgcggcagaagtgcagaaacatcgaggacatctgcatctcctgcggatctctgaacgtgaccctggagcacccactgttcatcggcggcatgtgccagaactgtaaaaactgttttctggagtgtgcctatcaatacgacgatgacggctaccagagctactgcaccatctgttgcggcggaagagaggtgctgatgtgtggaaataacaactgctgccggtgcttctgcgtggaatgcgtggacctgctggtgggccccggcgccgcccaggccgctattaaggaagatccttggaactgctacatgtgcggccacaagggcacatacggcctgctgagacggagagaggactggcctagcagactgcagatgttcttcgccaataaccacgaccaggagttcgacccccctaaggtgtaccctcccgtccccgccgagaagagaaagcccatccgggtcctgagcctgttcgatggcatcgccaccggtctgctggtgctgaaggacctgggcatccaggtggataggtacattgcctccgaggtgtgcgaggactccatcaccgtgggaatggtgcgtcatcagggcaagatcatgtacgtgggcgacgtgcggagcgtgacacagaagcatatccaggagtggggccctttcgacctggtgatcggcggcagcccttgcaatgacctgagcatcgtgaacccagcccggaagggcctgtacgagggaaccggcagactgttcttcgagttttacagactgctgcacgacgcccggcctaaggaaggcgacgaccggcccttcttttggctgttcgagaatgtggtggccatgggagtcagcgacaagcgggatattagccggttcctggagagcaaccccgtgatgatcgatgccaaggaagtgagcgccgcccaccgggccagatacttctggggcaatctgcctggcatgaacagacccctggccagcaccgtgaacgacaagctggagctgcaggagtgcctggagcacggccggatcgccaagttcagcaaggtgagaaccatcaccacccgaagcaacagcatcaaacaaggcaaggaccagcactttcctgtgttcatgaacgagaaggaggacatcctgtggtgtaccgagatggagagagtgttcgggttcccagtccactacacagatgtcagcaacatgtctagactggccagacagagactgctgggaagaagctggtccgtccctgtgatcagacacctgttcgcccctctgaaggagtacttcgcctgcgtgagcagcggcaacagcaacgccaacagccggggccccagcttctctagcggcctggtgccactgtccctgagagggagccacatgggccccatggagatctacaaaaccgtgagcgcctggaagcggcagcctgtgcgcgtgctgagcctgtttcggaatatcgataaagtcctgaaaagcctgggattcctggagagcggctctggctccggcggtggcaccctgaagtacgtggaggatgtgacaaacgtggtcagacgggatgtggagaagtggggccccttcgatctggtgtacggcagcacccaacccctgggcagctcttgtgaccggtgccctggctggtacatgtttcagttccaccggatcctgcagtacgccctgccgagacaggagtcccagcggccattcttttggattttcatggacaacttgctgctgaccgaggatgaccaggaaactaccactcggttcctgcagaccgaagccgtgaccctgcaggacgtgagaggccgggactaccagaacgccatgcgggtgtggtccaacatccctggactgaaaagcaagcacgcacctctgacccctaaagaagaggagtacctgcaggcccaggtgcggagcagaagcaagctggacgcccctaaggtggatctgctggtgaagaattgcctcctgcccctgagagagtacttcaagtatttcagccagaatagtctgcccctgggcggcccaagcagcggcgcccctcctcccagcggcggcagcccagccggctccccaacctctaccgaggagggcacctctgagtccgccacccccgagagcggccctggcacctccaccgagcccagcgagggcagcgcacccggcagccctgccggcagccccacctccacagaggagggaaccagcaccgagcccagcgaaggcagcgccccaggcaccagcaccgagcctagtgagggcggctctggcggcggcagcgcccaggagattaaacggatcaacaagatcagaagaagacttgtgaaagacagcaacaccaagaaggccggcaagacaggccccatgaaaaccctgctggttagagtgatgacacccgatctgagagagcggctggaaaacctgagaaagaagcctgaaaatatcccccagcccatcagcaatacatctagagccaacctgaataagctgctgaccgattacaccgaaatgaagaaggcgatcctgcatgtgtactgggaagagttccagaaggaccctgtgggcctgatgagccgggtggcccagcctgccagcaagaagatcgatcagaacaagctgaaacctgagatggacgagaagggcaacctgaccaccgccggctttgcctgctctcagtgtggccagcccctgttcgtgtacaagctggagcaggtgtctgagaagggcaaggcttacaccaactacttcggacggtgcaatgtggccgagcacgaaaagctgatcctgctggcccagctgaagcccgagaaggatagcgacgaagccgtgacatatagcctgggaaagtttgggcagagggccctggatttctacagcattcatgtgaccaaggagtccacccaccccgtgaagcccctggcccagatcgccggaaacagatacgcctccggacctgtgggaaaggccctgagcgacgcatgtatgggcacaatcgcctccttcctgtctaagtaccaggacatcatcatcgaacaccagaaggtggtgaagggcaaccagaagagactggagagcctgcgggagctggccggcaaggaaaacctggaataccctagcgtgaccctgccacctcagcctcacaccaaggagggcgttgatgcctacaacgaagtgatcgcccgggtgcgaatgtgggtgaacctgaacctgtggcagaagctgaagctaagcagagatgatgccaagcctctgctgagactgaagggattcccttcctttcctctggtcgagagacaggccaacgaagtggactggtgggacatggtgtgtaacgtgaagaagctgatcaacgagaaaaaggaggatggcaaggtgttttggcagaatctggctggctacaagagacaggaagccctgagaccatacctgagcagcgaggaagatcggaagaagggaaagaaattcgctcggtaccagctgggcgacctgctgctgcacctggaaaagaagcacggcgaggactggggaaaggtgtacgacgaggcctgggagcggattgacaagaaagtggaaggcctgagcaagcacatcaagctggaagaggaacggagaagcgaggacgcccagagcaaggccgccctgaccgactggctgcgggctaaggccagcttcgtgatcgagggcctgaaggaggccgacaaggacgagttctgcagatgcgagctgaagctgcagaagtggtacggggacctgcggggaaagcccttcgccatcgaagccgagaacagcatcctggacatcagcggcttcagcaagcagtacaactgtgccttcatctggcagaaggacggcgtgaagaagctgaacctgtacctgatcatcaactacttcaagggcggcaagctgcggttcaagaagatcaaacctgaagccttcgaagccaacagattctacaccgtgatcaacaaaaagagcggcgagatcgtgcccatggaggtgaacttcaacttcgacgaccccaacctgatcatcctgcctctggcctttggcaagagacagggcagagaattcatctggaacgacctgctgtccctggaaaccggcagcctgaagctggccaacggaagagtgatcgagaagacactgtacaacagaagaacccggcaggatgagcctgccctgttcgtggccctgaccttcgagcggcgggaggtcctggactcctccaatatcaaaccaatgaacctgatcggcgtggcaagaggcgaaaacatccccgccgtgatcgccctgaccgaccccgagggctgcccactgagccggtttaaggatagcctgggaaacccaacccacatcctgagaatcggcgagagctataaggagaagcagcggaccatccaggccaagaaggaggtggagcagcggagagccggcggctacagccggaagtacgccagcaaagccaagaatctggcagacgatatggtgagaaacaccgctagagatctgctgtactacgccgtgacccaggatgccatgctgatcttcgccaacctgagccggggcttcggccggcagggcaagcggaccttcatggccgagagacagtacacacggatggaggactggctgaccgccaagctggcctacgagggcctgagcaagacctacctgtccaagacactggcccagtacacctccaagacatgcagcaactgtgggtttaccatcaccagcgccgactacgacagggtgctggagaagctgaagaagacagcaacaggctggatgaccacaattaacggcaaggagctgaaggtggagggccagattacctactacaacagatacaagagacagaacgtagtcaaggacctgtccgtcgagctggatagactgagcgaagaatctgtgaacaacgacatctcctcctggacaaagggcagaagcggagaagctctgagcctcctgaagaaaagattctcccatagacccgtgcaggagaagttcgtgtgcctgaactgcggcttcgagacacacgcagccgagcaagccgccctgaacatcgccagatcctggctgttcctgcggagccaggagtacaagaaataccagacaaacaagacaaccggcaacaccgataagagagccttcgtcgagacctggcagtccttttaccggaagaagcttaaggaggtgtggaaacctgccgtgcggtctggcggatctggcggaggctccacaagcgcccaggagagcgtgatgttcagcgacgtgagcatcgacttcagccaggaggagtgggagtgcctgaacgacgaccagagggacctgtacagggacgtgatgctggagaactacagccacctggtgagcatgggccacagcgtgagcaagcccgacgtgatcagcttcctggagcagggcaaggagccctggctggtggacagggagctgaccagggaccactggcccgtgctggagagcaggaccagccccaagaaaaagagaaaagtctaagctgccttctgcggggcttgccttctggccatgcccttcttctctcccttgcacctgtacctcttggtctttgaataaagcctgagtaggaaggctagcaaaaaaaaaaaaaaaaaaaaaaaaaaaaaaaaaaaaaaaaaaaaaaaaaaaaaaaaaaaaaaaaaaaaaaaaaaaaaaaa

SEQ ID NO: 6015 - RNA, 5797 nt, synthetic construct
  source 1..5797: mol_type = other RNA
aggaaataagagagaaaagaagagtaagaagaaatataagagccaccatggcccctaagaagaagcgtaaagtgagccggatggaacgcctcgtctacgaggtgcggcagaagtgcagaaacatcgaggacatctgcatctcctgcggatctctgaacgtgaccctggagcacccactgttcatcggcggcatgtgccagaactgtaaaaactgttttctggagtgtgcctatcaatacgacgatgacggctaccagagctactgcaccatctgttgcggcggaagagaggtgctgatgtgtggaaataacaactgctgccggtgcttctgcgtggaatgcgtggacctgctggtgggccccggcgccgcccaggccgctattaaggaagatccttggaactgctacatgtgcggccacaagggcacatacggcctgctgagacggagagaggactggcctagcagactgcagatgttcttcgccaataaccacgaccaggagttcgacccccctaaggtgtaccctcccgtccccgccgagaagagaaagcccatccgggtcctgagcctgttcgatggcatcgccaccggtctgctggtgctgaaggacctgggcatccaggtggataggtacattgcctccgaggtgtgcgaggactccatcaccgtgggaatggtgcgtcatcagggcaagatcatgtacgtgggcgacgtgcggagcgtgacacagaagcatatccaggagtggggccctttcgacctggtgatcggcggcagcccttgcaatgacctgagcatcgtgaacccagcccggaagggcctgtacgagggaaccggcagactgttcttcgagttttacagactgctgcacgacgcccggcctaaggaaggcgacgaccggcccttcttttggctgttcgagaatgtggtggccatgggagtcagcgacaagcgggatattagccggttcctggagagcaaccccgtgatgatcgatgccaaggaagtgagcgccgcccaccgggccagatacttctggggcaatctgcctggcatgaacagacccctggccagcaccgtgaacgacaagctggagctgcaggagtgcctggagcacggccggatcgccaagttcagcaaggtgagaaccatcaccacccgaagcaacagcatcaaacaaggcaaggaccagcactttcctgtgttcatgaacgagaaggaggacatcctgtggtgtaccgagatggagagagtgttcgggttcccagtccactacacagatgtcagcaacatgtctagactggccagacagagactgctgggaagaagctggtccgtccctgtgatcagacacctgttcgcccctctgaaggagtacttcgcctgcgtgagcagcggcaacagcaacgccaacagccggggccccagcttctctagcggcctggtgccactgtccctgagagggagccacatgggccccatggagatctacaaaaccgtgagcgcctggaagcggcagcctgtgcgcgtgctgagcctgtttcggaatatcgataaagtcctgaaaagcctgggattcctggagagcggctctggctccggcggtggcaccctgaagtacgtggaggatgtgacaaacgtggtcagacgggatgtggagaagtggggccccttcgatctggtgtacggcagcacccaacccctgggcagctcttgtgaccggtgccctggctggtacatgtttcagttccaccggatcctgcagtacgccctgccgagacaggagtcccagcggccattcttttggattttcatggacaacttgctgctgaccgaggatgaccaggaaactaccactcggttcctgcagaccgaagccgtgaccctgcaggacgtgagaggccgggactaccagaacgccatgcgggtgtggtccaacatccctggactgaaaagcaagcacgcacctctgacccctaaagaagaggagtacctgcaggcccaggtgcggagcagaagcaagctggacgcccctaaggtggatctgctggtgaagaattgcctcctgcccctgagagagtacttcaagtatttcagccagaatagtctgcccctgggcggcccaagcagcggcgcccctcctcccagcggcggcagcccagccggctccccaacctctaccgaggagggcacctctgagtccgccacccccgagagcggccctggcacctccaccgagcccagcgagggcagcgcacccggcagccctgccggcagccccacctccacagaggagggaaccagcaccgagcccagcgaaggcagcgccccaggcaccagcaccgagcctagtgagggcggctctggcggcggcagcgcccaggagattaaacggatcaacaagatcagaagaagacttgtgaaagacagcaacaccaagaaggccggcaagacaggccccatgaaaaccctgctggttagagtgatgacacccgatctgagagagcggctggaaaacctgagaaagaagcctgaaaatatcccccagcccatcagcaatacatctagagccaacctgaataagctgctgaccgattacaccgaaatgaagaaggcgatcctgcatgtgtactgggaagagttccagaaggaccctgtgggcctgatgagccgggtggcccagcctgccagcaagaagatcgatcagaacaagctgaaacctgagatggacgagaagggcaacctgaccaccgccggctttgcctgctctcagtgtggccagcccctgttcgtgtacaagctggagcaggtgtctgagaagggcaaggcttacaccaactacttcggacggtgcaatgtggccgagcacgaaaagctgatcctgctggcccagctgaagcccgagaaggatagcgacgaagccgtgacatatagcctgggaaagtttgggcagagggccctggatttctacagcattcatgtgaccaaggagtccacccaccccgtgaagcccctggcccagatcgccggaaacagatacgcctccggacctgtgggaaaggccctgagcgacgcatgtatgggcacaatcgcctccttcctgtctaagtaccaggacatcatcatcgaacaccagaaggtggtgaagggcaaccagaagagactggagagcctgcgggagctggccggcaaggaaaacctggaataccctagcgtgaccctgccacctcagcctcacaccaaggagggcgttgatgcctacaacgaagtgatcgcccgggtgcgaatgtgggtgaacctgaacctgtggcagaagctgaagctaagcagagatgatgccaagcctctgctgagactgaagggattcccttcctttcctctggtcgagagacaggccaacgaagtggactggtgggacatggtgtgtaacgtgaagaagctgatcaacgagaaaaaggaggatggcaaggtgttttggcagaatctggctggctacaagagacaggaagccctgagaccatacctgagcagcgaggaagatcggaagaagggaaagaaattcgctcggtaccagctgggcgacctgctgctgcacctggaaaagaagcacggcgaggactggggaaaggtgtacgacgaggcctgggagcggattgacaagaaagtggaaggcctgagcaagcacatcaagctggaagaggaacggagaagcgaggacgcccagagcaaggccgccctgaccgactggctgcgggctaaggccagcttcgtgatcgagggcctgaaggaggccgacaaggacgagttctgcagatgcgagctgaagctgcagaagtggtacggggacctgcggggaaagcccttcgccatcgaagccgagaacagcatcctggacatcagcggcttcagcaagcagtacaactgtgccttcatctggcagaaggacggcgtgaagaagctgaacctgtacctgatcatcaactacttcaagggcggcaagctgcggttcaagaagatcaaacctgaagccttcgaagccaacagattctacaccgtgatcaacaaaaagagcggcgagatcgtgcccatggaggtgaacttcaacttcgacgaccccaacctgatcatcctgcctctggcctttggcaagagacagggcagagaattcatctggaacgacctgctgtccctggaaaccggcagcctgaagctggccaacggaagagtgatcgagaagacactgtacaacagaagaacccggcaggatgagcctgccctgttcgtggccctgaccttcgagcggcgggaggtcctggactcctccaatatcaaaccaatgaacctgatcggcgtggcaagaggcgaaaacatccccgccgtgatcgccctgaccgaccccgagggctgcccactgagccggtttaaggatagcctgggaaacccaacccacatcctgagaatcggcgagagctataaggagaagcagcggaccatccaggccaagaaggaggtggagcagcggagagccggcggctacagccggaagtacgccagcaaagccaagaatctggcagacgatatggtgagaaacaccgctagagatctgctgtactacgccgtgacccaggatgccatgctgatcttcgccaacctgagccggggcttcggccggcagggcaagcggaccttcatggccgagagacagtacacacggatggaggactggctgaccgccaagctggcctacgagggcctgagcaagacctacctgtccaagacactggcccagtacacctccaagacatgcagcaactgtgggtttaccatcaccagcgccgactacgacagggtgctggagaagctgaagaagacagcaacaggctggatgaccacaattaacggcaaggagctgaaggtggagggccagattacctactacaacagatacaagagacagaacgtagtcaaggacctgtccgtcgagctggatagactgagcgaagaatctgtgaacaacgacatctcctcctggacaaagggcagaagcggagaagctctgagcctcctgaagaaaagattctcccatagacccgtgcaggagaagttcgtgtgcctgaactgcggcttcgagacacacgcagccgagcaagccgccctgaacatcgccagatcctggctgttcctgcggagccaggagtacaagaaataccagacaaacaagacaaccggcaacaccgataagagagccttcgtcgagacctggcagtccttttaccggaagaagcttaaggaggtgtggaaacctgccgtgcggtctggcggatctggcggaggctccacaagcagccaggagagcgtgagcttcgaggacgtggccgtgtacttcacccagaaccagtgggccagcctggccagcgcccagaggaccctgtacagggaggtgatgctggagaactacgccaacgtgaccagcctggccgccttccccttccccaagcccgacctgatcttccagctggagaggggcgaggcccccggcggcctggacccctggaccagcatcaggagggaggtgaggggcgtgtgcaccagccccaagaaaaagagaaaagtctaagctgccttctgcggggcttgccttctggccatgcccttcttctctcccttgcacctgtacctcttggtctttgaataaagcctgagtaggaaggctagcaaaaaaaaaaaaaaaaaaaaaaaaaaaaaaaaaaaaaaaaaaaaaaaaaaaaaaaaaaaaaaaaaaaaaaaaaaaaaaaa

SEQ ID NO: 6016 - RNA, 5815 nt, synthetic construct
  source 1..5815: mol_type = other RNA
aggaaataagagagaaaagaagagtaagaagaaatataagagccaccatggcccctaagaagaagcgtaaagtgagccggatggaacgcctcgtctacgaggtgcggcagaagtgcagaaacatcgaggacatctgcatctcctgcggatctctgaacgtgaccctggagcacccactgttcatcggcggcatgtgccagaactgtaaaaactgttttctggagtgtgcctatcaatacgacgatgacggctaccagagctactgcaccatctgttgcggcggaagagaggtgctgatgtgtggaaataacaactgctgccggtgcttctgcgtggaatgcgtggacctgctggtgggccccggcgccgcccaggccgctattaaggaagatccttggaactgctacatgtgcggccacaagggcacatacggcctgctgagacggagagaggactggcctagcagactgcagatgttcttcgccaataaccacgaccaggagttcgacccccctaaggtgtaccctcccgtccccgccgagaagagaaagcccatccgggtcctgagcctgttcgatggcatcgccaccggtctgctggtgctgaaggacctgggcatccaggtggataggtacattgcctccgaggtgtgcgaggactccatcaccgtgggaatggtgcgtcatcagggcaagatcatgtacgtgggcgacgtgcggagcgtgacacagaagcatatccaggagtggggccctttcgacctggtgatcggcggcagcccttgcaatgacctgagcatcgtgaacccagcccggaagggcctgtacgagggaaccggcagactgttcttcgagttttacagactgctgcacgacgcccggcctaaggaaggcgacgaccggcccttcttttggctgttcgagaatgtggtggccatgggagtcagcgacaagcgggatattagccggttcctggagagcaaccccgtgatgatcgatgccaaggaagtgagcgccgcccaccgggccagatacttctggggcaatctgcctggcatgaacagacccctggccagcaccgtgaacgacaagctggagctgcaggagtgcctggagcacggccggatcgccaagttcagcaaggtgagaaccatcaccacccgaagcaacagcatcaaacaaggcaaggaccagcactttcctgtgttcatgaacgagaaggaggacatcctgtggtgtaccgagatggagagagtgttcgggttcccagtccactacacagatgtcagcaacatgtctagactggccagacagagactgctgggaagaagctggtccgtccctgtgatcagacacctgttcgcccctctgaaggagtacttcgcctgcgtgagcagcggcaacagcaacgccaacagccggggccccagcttctctagcggcctggtgccactgtccctgagagggagccacatgggccccatggagatctacaaaaccgtgagcgcctggaagcggcagcctgtgcgcgtgctgagcctgtttcggaatatcgataaagtcctgaaaagcctgggattcctggagagcggctctggctccggcggtggcaccctgaagtacgtggaggatgtgacaaacgtggtcagacgggatgtggagaagtggggccccttcgatctggtgtacggcagcacccaacccctgggcagctcttgtgaccggtgccctggctggtacatgtttcagttccaccggatcctgcagtacgccctgccgagacaggagtcccagcggccattcttttggattttcatggacaacttgctgctgaccgaggatgaccaggaaactaccactcggttcctgcagaccgaagccgtgaccctgcaggacgtgagaggccgggactaccagaacgccatgcgggtgtggtccaacatccctggactgaaaagcaagcacgcacctctgacccctaaagaagaggagtacctgcaggcccaggtgcggagcagaagcaagctggacgcccctaaggtggatctgctggtgaagaattgcctcctgcccctgagagagtacttcaagtatttcagccagaatagtctgcccctgggcggcccaagcagcggcgcccctcctcccagcggcggcagcccagccggctccccaacctctaccgaggagggcacctctgagtccgccacccccgagagcggccctggcacctccaccgagcccagcgagggcagcgcacccggcagccctgccggcagccccacctccacagaggagggaaccagcaccgagcccagcgaaggcagcgccccaggcaccagcaccgagcctagtgagggcggctctggcggcggcagcgcccaggagattaaacggatcaacaagatcagaagaagacttgtgaaagacagcaacaccaagaaggccggcaagacaggccccatgaaaaccctgctggttagagtgatgacacccgatctgagagagcggctggaaaacctgagaaagaagcctgaaaatatcccccagcccatcagcaatacatctagagccaacctgaataagctgctgaccgattacaccgaaatgaagaaggcgatcctgcatgtgtactgggaagagttccagaaggaccctgtgggcctgatgagccgggtggcccagcctgccagcaagaagatcgatcagaacaagctgaaacctgagatggacgagaagggcaacctgaccaccgccggctttgcctgctctcagtgtggccagcccctgttcgtgtacaagctggagcaggtgtctgagaagggcaaggcttacaccaactacttcggacggtgcaatgtggccgagcacgaaaagctgatcctgctggcccagctgaagcccgagaaggatagcgacgaagccgtgacatatagcctgggaaagtttgggcagagggccctggatttctacagcattcatgtgaccaaggagtccacccaccccgtgaagcccctggcccagatcgccggaaacagatacgcctccggacctgtgggaaaggccctgagcgacgcatgtatgggcacaatcgcctccttcctgtctaagtaccaggacatcatcatcgaacaccagaaggtggtgaagggcaaccagaagagactggagagcctgcgggagctggccggcaaggaaaacctggaataccctagcgtgaccctgccacctcagcctcacaccaaggagggcgttgatgcctacaacgaagtgatcgcccgggtgcgaatgtgggtgaacctgaacctgtggcagaagctgaagctaagcagagatgatgccaagcctctgctgagactgaagggattcccttcctttcctctggtcgagagacaggccaacgaagtggactggtgggacatggtgtgtaacgtgaagaagctgatcaacgagaaaaaggaggatggcaaggtgttttggcagaatctggctggctacaagagacaggaagccctgagaccatacctgagcagcgaggaagatcggaagaagggaaagaaattcgctcggtaccagctgggcgacctgctgctgcacctggaaaagaagcacggcgaggactggggaaaggtgtacgacgaggcctgggagcggattgacaagaaagtggaaggcctgagcaagcacatcaagctggaagaggaacggagaagcgaggacgcccagagcaaggccgccctgaccgactggctgcgggctaaggccagcttcgtgatcgagggcctgaaggaggccgacaaggacgagttctgcagatgcgagctgaagctgcagaagtggtacggggacctgcggggaaagcccttcgccatcgaagccgagaacagcatcctggacatcagcggcttcagcaagcagtacaactgtgccttcatctggcagaaggacggcgtgaagaagctgaacctgtacctgatcatcaactacttcaagggcggcaagctgcggttcaagaagatcaaacctgaagccttcgaagccaacagattctacaccgtgatcaacaaaaagagcggcgagatcgtgcccatggaggtgaacttcaacttcgacgaccccaacctgatcatcctgcctctggcctttggcaagagacagggcagagaattcatctggaacgacctgctgtccctggaaaccggcagcctgaagctggccaacggaagagtgatcgagaagacactgtacaacagaagaacccggcaggatgagcctgccctgttcgtggccctgaccttcgagcggcgggaggtcctggactcctccaatatcaaaccaatgaacctgatcggcgtggcaagaggcgaaaacatccccgccgtgatcgccctgaccgaccccgagggctgcccactgagccggtttaaggatagcctgggaaacccaacccacatcctgagaatcggcgagagctataaggagaagcagcggaccatccaggccaagaaggaggtggagcagcggagagccggcggctacagccggaagtacgccagcaaagccaagaatctggcagacgatatggtgagaaacaccgctagagatctgctgtactacgccgtgacccaggatgccatgctgatcttcgccaacctgagccggggcttcggccggcagggcaagcggaccttcatggccgagagacagtacacacggatggaggactggctgaccgccaagctggcctacgagggcctgagcaagacctacctgtccaagacactggcccagtacacctccaagacatgcagcaactgtgggtttaccatcaccagcgccgactacgacagggtgctggagaagctgaagaagacagcaacaggctggatgaccacaattaacggcaaggagctgaaggtggagggccagattacctactacaacagatacaagagacagaacgtagtcaaggacctgtccgtcgagctggatagactgagcgaagaatctgtgaacaacgacatctcctcctggacaaagggcagaagcggagaagctctgagcctcctgaagaaaagattctcccatagacccgtgcaggagaagttcgtgtgcctgaactgcggcttcgagacacacgcagccgagcaagccgccctgaacatcgccagatcctggctgttcctgcggagccaggagtacaagaaataccagacaaacaagacaaccggcaacaccgataagagagccttcgtcgagacctggcagtccttttaccggaagaagcttaaggaggtgtggaaacctgccgtgcggtctggcggatctggcggaggctccacaagcgtggccttcgaggacgtggccgtgaacttcacccaggaggagtgggccctgctggaccccagccagaagaacctgtacagggaggtgatgcaggagaccctgaggaacctggccagcatcggcaagaagtggaacaaccagtacatcgaggacgagcaccagaaccccaggaggaacctgaggaggctgatcaaggagaggctgagcgagagcaaggagagccaccagcacggcgagttcctgacccaggtgcccgacgacaccagccccaagaaaaagagaaaagtctaagctgccttctgcggggcttgccttctggccatgcccttcttctctcccttgcacctgtacctcttggtctttgaataaagcctgagtaggaaggctagcaaaaaaaaaaaaaaaaaaaaaaaaaaaaaaaaaaaaaaaaaaaaaaaaaaaaaaaaaaaaaaaaaaaaaaaaaaaaaaaa

SEQ ID NO: 6017 - RNA, 5797 nt, synthetic construct
  source 1..5797: mol_type = other RNA
aggaaataagagagaaaagaagagtaagaagaaatataagagccaccatggcccctaagaagaagcgtaaagtgagccggatggaacgcctcgtctacgaggtgcggcagaagtgcagaaacatcgaggacatctgcatctcctgcggatctctgaacgtgaccctggagcacccactgttcatcggcggcatgtgccagaactgtaaaaactgttttctggagtgtgcctatcaatacgacgatgacggctaccagagctactgcaccatctgttgcggcggaagagaggtgctgatgtgtggaaataacaactgctgccggtgcttctgcgtggaatgcgtggacctgctggtgggccccggcgccgcccaggccgctattaaggaagatccttggaactgctacatgtgcggccacaagggcacatacggcctgctgagacggagagaggactggcctagcagactgcagatgttcttcgccaataaccacgaccaggagttcgacccccctaaggtgtaccctcccgtccccgccgagaagagaaagcccatccgggtcctgagcctgttcgatggcatcgccaccggtctgctggtgctgaaggacctgggcatccaggtggataggtacattgcctccgaggtgtgcgaggactccatcaccgtgggaatggtgcgtcatcagggcaagatcatgtacgtgggcgacgtgcggagcgtgacacagaagcatatccaggagtggggccctttcgacctggtgatcggcggcagcccttgcaatgacctgagcatcgtgaacccagcccggaagggcctgtacgagggaaccggcagactgttcttcgagttttacagactgctgcacgacgcccggcctaaggaaggcgacgaccggcccttcttttggctgttcgagaatgtggtggccatgggagtcagcgacaagcgggatattagccggttcctggagagcaaccccgtgatgatcgatgccaaggaagtgagcgccgcccaccgggccagatacttctggggcaatctgcctggcatgaacagacccctggccagcaccgtgaacgacaagctggagctgcaggagtgcctggagcacggccggatcgccaagttcagcaaggtgagaaccatcaccacccgaagcaacagcatcaaacaaggcaaggaccagcactttcctgtgttcatgaacgagaaggaggacatcctgtggtgtaccgagatggagagagtgttcgggttcccagtccactacacagatgtcagcaacatgtctagactggccagacagagactgctgggaagaagctggtccgtccctgtgatcagacacctgttcgcccctctgaaggagtacttcgcctgcgtgagcagcggcaacagcaacgccaacagccggggccccagcttctctagcggcctggtgccactgtccctgagagggagccacatgggccccatggagatctacaaaaccgtgagcgcctggaagcggcagcctgtgcgcgtgctgagcctgtttcggaatatcgataaagtcctgaaaagcctgggattcctggagagcggctctggctccggcggtggcaccctgaagtacgtggaggatgtgacaaacgtggtcagacgggatgtggagaagtggggccccttcgatctggtgtacggcagcacccaacccctgggcagctcttgtgaccggtgccctggctggtacatgtttcagttccaccggatcctgcagtacgccctgccgagacaggagtcccagcggccattcttttggattttcatggacaacttgctgctgaccgaggatgaccaggaaactaccactcggttcctgcagaccgaagccgtgaccctgcaggacgtgagaggccgggactaccagaacgccatgcgggtgtggtccaacatccctggactgaaaagcaagcacgcacctctgacccctaaagaagaggagtacctgcaggcccaggtgcggagcagaagcaagctggacgcccctaaggtggatctgctggtgaagaattgcctcctgcccctgagagagtacttcaagtatttcagccagaatagtctgcccctgggcggcccaagcagcggcgcccctcctcccagcggcggcagcccagccggctccccaacctctaccgaggagggcacctctgagtccgccacccccgagagcggccctggcacctccaccgagcccagcgagggcagcgcacccggcagccctgccggcagccccacctccacagaggagggaaccagcaccgagcccagcgaaggcagcgccccaggcaccagcaccgagcctagtgagggcggctctggcggcggcagcgcccaggagattaaacggatcaacaagatcagaagaagacttgtgaaagacagcaacaccaagaaggccggcaagacaggccccatgaaaaccctgctggttagagtgatgacacccgatctgagagagcggctggaaaacctgagaaagaagcctgaaaatatcccccagcccatcagcaatacatctagagccaacctgaataagctgctgaccgattacaccgaaatgaagaaggcgatcctgcatgtgtactgggaagagttccagaaggaccctgtgggcctgatgagccgggtggcccagcctgccagcaagaagatcgatcagaacaagctgaaacctgagatggacgagaagggcaacctgaccaccgccggctttgcctgctctcagtgtggccagcccctgttcgtgtacaagctggagcaggtgtctgagaagggcaaggcttacaccaactacttcggacggtgcaatgtggccgagcacgaaaagctgatcctgctggcccagctgaagcccgagaaggatagcgacgaagccgtgacatatagcctgggaaagtttgggcagagggccctggatttctacagcattcatgtgaccaaggagtccacccaccccgtgaagcccctggcccagatcgccggaaacagatacgcctccggacctgtgggaaaggccctgagcgacgcatgtatgggcacaatcgcctccttcctgtctaagtaccaggacatcatcatcgaacaccagaaggtggtgaagggcaaccagaagagactggagagcctgcgggagctggccggcaaggaaaacctggaataccctagcgtgaccctgccacctcagcctcacaccaaggagggcgttgatgcctacaacgaagtgatcgcccgggtgcgaatgtgggtgaacctgaacctgtggcagaagctgaagctaagcagagatgatgccaagcctctgctgagactgaagggattcccttcctttcctctggtcgagagacaggccaacgaagtggactggtgggacatggtgtgtaacgtgaagaagctgatcaacgagaaaaaggaggatggcaaggtgttttggcagaatctggctggctacaagagacaggaagccctgagaccatacctgagcagcgaggaagatcggaagaagggaaagaaattcgctcggtaccagctgggcgacctgctgctgcacctggaaaagaagcacggcgaggactggggaaaggtgtacgacgaggcctgggagcggattgacaagaaagtggaaggcctgagcaagcacatcaagctggaagaggaacggagaagcgaggacgcccagagcaaggccgccctgaccgactggctgcgggctaaggccagcttcgtgatcgagggcctgaaggaggccgacaaggacgagttctgcagatgcgagctgaagctgcagaagtggtacggggacctgcggggaaagcccttcgccatcgaagccgagaacagcatcctggacatcagcggcttcagcaagcagtacaactgtgccttcatctggcagaaggacggcgtgaagaagctgaacctgtacctgatcatcaactacttcaagggcggcaagctgcggttcaagaagatcaaacctgaagccttcgaagccaacagattctacaccgtgatcaacaaaaagagcggcgagatcgtgcccatggaggtgaacttcaacttcgacgaccccaacctgatcatcctgcctctggcctttggcaagagacagggcagagaattcatctggaacgacctgctgtccctggaaaccggcagcctgaagctggccaacggaagagtgatcgagaagacactgtacaacagaagaacccggcaggatgagcctgccctgttcgtggccctgaccttcgagcggcgggaggtcctggactcctccaatatcaaaccaatgaacctgatcggcgtggcaagaggcgaaaacatccccgccgtgatcgccctgaccgaccccgagggctgcccactgagccggtttaaggatagcctgggaaacccaacccacatcctgagaatcggcgagagctataaggagaagcagcggaccatccaggccaagaaggaggtggagcagcggagagccggcggctacagccggaagtacgccagcaaagccaagaatctggcagacgatatggtgagaaacaccgctagagatctgctgtactacgccgtgacccaggatgccatgctgatcttcgccaacctgagccggggcttcggccggcagggcaagcggaccttcatggccgagagacagtacacacggatggaggactggctgaccgccaagctggcctacgagggcctgagcaagacctacctgtccaagacactggcccagtacacctccaagacatgcagcaactgtgggtttaccatcaccagcgccgactacgacagggtgctggagaagctgaagaagacagcaacaggctggatgaccacaattaacggcaaggagctgaaggtggagggccagattacctactacaacagatacaagagacagaacgtagtcaaggacctgtccgtcgagctggatagactgagcgaagaatctgtgaacaacgacatctcctcctggacaaagggcagaagcggagaagctctgagcctcctgaagaaaagattctcccatagacccgtgcaggagaagttcgtgtgcctgaactgcggcttcgagacacacgcagccgagcaagccgccctgaacatcgccagatcctggctgttcctgcggagccaggagtacaagaaataccagacaaacaagacaaccggcaacaccgataagagagccttcgtcgagacctggcagtccttttaccggaagaagcttaaggaggtgtggaaacctgccgtgcggtctggcggatctggcggaggctccacaagcctgctgaccttcgaggacgtggccgtgagcttcagcgaggaggagtgggagctgctggaccccccccagaagaccctgtacaacgacgtgatgcaggagaactacgagaccgtgatcagcctgggcctgaagctgaagaacgacaccggcaacgaccagcccatcagcatcagcgccctggagatgcaggccagcggcagcaaggtgctgaggaaggccaggatgaaggtggcccagaagaccaccagccccaagaaaaagagaaaagtctaagctgccttctgcggggcttgccttctggccatgcccttcttctctcccttgcacctgtacctcttggtctttgaataaagcctgagtaggaaggctagcaaaaaaaaaaaaaaaaaaaaaaaaaaaaaaaaaaaaaaaaaaaaaaaaaaaaaaaaaaaaaaaaaaaaaaaaaaaaaaaa

SEQ ID NO: 6018 - RNA, 5797 nt, synthetic construct
  source 1..5797: mol_type = other RNA
aggaaataagagagaaaagaagagtaagaagaaatataagagccaccatggcccctaagaagaagcgtaaagtgagccggatggaacgcctcgtctacgaggtgcggcagaagtgcagaaacatcgaggacatctgcatctcctgcggatctctgaacgtgaccctggagcacccactgttcatcggcggcatgtgccagaactgtaaaaactgttttctggagtgtgcctatcaatacgacgatgacggctaccagagctactgcaccatctgttgcggcggaagagaggtgctgatgtgtggaaataacaactgctgccggtgcttctgcgtggaatgcgtggacctgctggtgggccccggcgccgcccaggccgctattaaggaagatccttggaactgctacatgtgcggccacaagggcacatacggcctgctgagacggagagaggactggcctagcagactgcagatgttcttcgccaataaccacgaccaggagttcgacccccctaaggtgtaccctcccgtccccgccgagaagagaaagcccatccgggtcctgagcctgttcgatggcatcgccaccggtctgctggtgctgaaggacctgggcatccaggtggataggtacattgcctccgaggtgtgcgaggactccatcaccgtgggaatggtgcgtcatcagggcaagatcatgtacgtgggcgacgtgcggagcgtgacacagaagcatatccaggagtggggccctttcgacctggtgatcggcggcagcccttgcaatgacctgagcatcgtgaacccagcccggaagggcctgtacgagggaaccggcagactgttcttcgagttttacagactgctgcacgacgcccggcctaaggaaggcgacgaccggcccttcttttggctgttcgagaatgtggtggccatgggagtcagcgacaagcgggatattagccggttcctggagagcaaccccgtgatgatcgatgccaaggaagtgagcgccgcccaccgggccagatacttctggggcaatctgcctggcatgaacagacccctggccagcaccgtgaacgacaagctggagctgcaggagtgcctggagcacggccggatcgccaagttcagcaaggtgagaaccatcaccacccgaagcaacagcatcaaacaaggcaaggaccagcactttcctgtgttcatgaacgagaaggaggacatcctgtggtgtaccgagatggagagagtgttcgggttcccagtccactacacagatgtcagcaacatgtctagactggccagacagagactgctgggaagaagctggtccgtccctgtgatcagacacctgttcgcccctctgaaggagtacttcgcctgcgtgagcagcggcaacagcaacgccaacagccggggccccagcttctctagcggcctggtgccactgtccctgagagggagccacatgggccccatggagatctacaaaaccgtgagcgcctggaagcggcagcctgtgcgcgtgctgagcctgtttcggaatatcgataaagtcctgaaaagcctgggattcctggagagcggctctggctccggcggtggcaccctgaagtacgtggaggatgtgacaaacgtggtcagacgggatgtggagaagtggggccccttcgatctggtgtacggcagcacccaacccctgggcagctcttgtgaccggtgccctggctggtacatgtttcagttccaccggatcctgcagtacgccctgccgagacaggagtcccagcggccattcttttggattttcatggacaacttgctgctgaccgaggatgaccaggaaactaccactcggttcctgcagaccgaagccgtgaccctgcaggacgtgagaggccgggactaccagaacgccatgcgggtgtggtccaacatccctggactgaaaagcaagcacgcacctctgacccctaaagaagaggagtacctgcaggcccaggtgcggagcagaagcaagctggacgcccctaaggtggatctgctggtgaagaattgcctcctgcccctgagagagtacttcaagtatttcagccagaatagtctgcccctgggcggcccaagcagcggcgcccctcctcccagcggcggcagcccagccggctccccaacctctaccgaggagggcacctctgagtccgccacccccgagagcggccctggcacctccaccgagcccagcgagggcagcgcacccggcagccctgccggcagccccacctccacagaggagggaaccagcaccgagcccagcgaaggcagcgccccaggcaccagcaccgagcctagtgagggcggctctggcggcggcagcgcccaggagattaaacggatcaacaagatcagaagaagacttgtgaaagacagcaacaccaagaaggccggcaagacaggccccatgaaaaccctgctggttagagtgatgacacccgatctgagagagcggctggaaaacctgagaaagaagcctgaaaatatcccccagcccatcagcaatacatctagagccaacctgaataagctgctgaccgattacaccgaaatgaagaaggcgatcctgcatgtgtactgggaagagttccagaaggaccctgtgggcctgatgagccgggtggcccagcctgccagcaagaagatcgatcagaacaagctgaaacctgagatggacgagaagggcaacctgaccaccgccggctttgcctgctctcagtgtggccagcccctgttcgtgtacaagctggagcaggtgtctgagaagggcaaggcttacaccaactacttcggacggtgcaatgtggccgagcacgaaaagctgatcctgctggcccagctgaagcccgagaaggatagcgacgaagccgtgacatatagcctgggaaagtttgggcagagggccctggatttctacagcattcatgtgaccaaggagtccacccaccccgtgaagcccctggcccagatcgccggaaacagatacgcctccggacctgtgggaaaggccctgagcgacgcatgtatgggcacaatcgcctccttcctgtctaagtaccaggacatcatcatcgaacaccagaaggtggtgaagggcaaccagaagagactggagagcctgcgggagctggccggcaaggaaaacctggaataccctagcgtgaccctgccacctcagcctcacaccaaggagggcgttgatgcctacaacgaagtgatcgcccgggtgcgaatgtgggtgaacctgaacctgtggcagaagctgaagctaagcagagatgatgccaagcctctgctgagactgaagggattcccttcctttcctctggtcgagagacaggccaacgaagtggactggtgggacatggtgtgtaacgtgaagaagctgatcaacgagaaaaaggaggatggcaaggtgttttggcagaatctggctggctacaagagacaggaagccctgagaccatacctgagcagcgaggaagatcggaagaagggaaagaaattcgctcggtaccagctgggcgacctgctgctgcacctggaaaagaagcacggcgaggactggggaaaggtgtacgacgaggcctgggagcggattgacaagaaagtggaaggcctgagcaagcacatcaagctggaagaggaacggagaagcgaggacgcccagagcaaggccgccctgaccgactggctgcgggctaaggccagcttcgtgatcgagggcctgaaggaggccgacaaggacgagttctgcagatgcgagctgaagctgcagaagtggtacggggacctgcggggaaagcccttcgccatcgaagccgagaacagcatcctggacatcagcggcttcagcaagcagtacaactgtgccttcatctggcagaaggacggcgtgaagaagctgaacctgtacctgatcatcaactacttcaagggcggcaagctgcggttcaagaagatcaaacctgaagccttcgaagccaacagattctacaccgtgatcaacaaaaagagcggcgagatcgtgcccatggaggtgaacttcaacttcgacgaccccaacctgatcatcctgcctctggcctttggcaagagacagggcagagaattcatctggaacgacctgctgtccctggaaaccggcagcctgaagctggccaacggaagagtgatcgagaagacactgtacaacagaagaacccggcaggatgagcctgccctgttcgtggccctgaccttcgagcggcgggaggtcctggactcctccaatatcaaaccaatgaacctgatcggcgtggcaagaggcgaaaacatccccgccgtgatcgccctgaccgaccccgagggctgcccactgagccggtttaaggatagcctgggaaacccaacccacatcctgagaatcggcgagagctataaggagaagcagcggaccatccaggccaagaaggaggtggagcagcggagagccggcggctacagccggaagtacgccagcaaagccaagaatctggcagacgatatggtgagaaacaccgctagagatctgctgtactacgccgtgacccaggatgccatgctgatcttcgccaacctgagccggggcttcggccggcagggcaagcggaccttcatggccgagagacagtacacacggatggaggactggctgaccgccaagctggcctacgagggcctgagcaagacctacctgtccaagacactggcccagtacacctccaagacatgcagcaactgtgggtttaccatcaccagcgccgactacgacagggtgctggagaagctgaagaagacagcaacaggctggatgaccacaattaacggcaaggagctgaaggtggagggccagattacctactacaacagatacaagagacagaacgtagtcaaggacctgtccgtcgagctggatagactgagcgaagaatctgtgaacaacgacatctcctcctggacaaagggcagaagcggagaagctctgagcctcctgaagaaaagattctcccatagacccgtgcaggagaagttcgtgtgcctgaactgcggcttcgagacacacgcagccgagcaagccgccctgaacatcgccagatcctggctgttcctgcggagccaggagtacaagaaataccagacaaacaagacaaccggcaacaccgataagagagccttcgtcgagacctggcagtccttttaccggaagaagcttaaggaggtgtggaaacctgccgtgcggtctggcggatctggcggaggctccacaagcgagcccgtgagcttcgaggaggtggccgtgtacttcagcagggaggagtgggccctgctggaccccgcccagagggccctgtacaggcacgtgatgctggagacctacgagtgcgtggccagcctggcccccctgcccgcccccaagcccatggtgatcagcctgctggaggagggcgaggagccctggatccccgacgagggcagcaggcaggccgtggccggcgacgtgagccccggcgagaccagccccaagaaaaagagaaaagtctaagctgccttctgcggggcttgccttctggccatgcccttcttctctcccttgcacctgtacctcttggtctttgaataaagcctgagtaggaaggctagcaaaaaaaaaaaaaaaaaaaaaaaaaaaaaaaaaaaaaaaaaaaaaaaaaaaaaaaaaaaaaaaaaaaaaaaaaaaaaaaa

SEQ ID NO: 6019 - RNA, 5797 nt, synthetic construct
  source 1..5797: mol_type = other RNA
aggaaataagagagaaaagaagagtaagaagaaatataagagccaccatggcccctaagaagaagcgtaaagtgagccggatggaacgcctcgtctacgaggtgcggcagaagtgcagaaacatcgaggacatctgcatctcctgcggatctctgaacgtgaccctggagcacccactgttcatcggcggcatgtgccagaactgtaaaaactgttttctggagtgtgcctatcaatacgacgatgacggctaccagagctactgcaccatctgttgcggcggaagagaggtgctgatgtgtggaaataacaactgctgccggtgcttctgcgtggaatgcgtggacctgctggtgggccccggcgccgcccaggccgctattaaggaagatccttggaactgctacatgtgcggccacaagggcacatacggcctgctgagacggagagaggactggcctagcagactgcagatgttcttcgccaataaccacgaccaggagttcgacccccctaaggtgtaccctcccgtccccgccgagaagagaaagcccatccgggtcctgagcctgttcgatggcatcgccaccggtctgctggtgctgaaggacctgggcatccaggtggataggtacattgcctccgaggtgtgcgaggactccatcaccgtgggaatggtgcgtcatcagggcaagatcatgtacgtgggcgacgtgcggagcgtgacacagaagcatatccaggagtggggccctttcgacctggtgatcggcggcagcccttgcaatgacctgagcatcgtgaacccagcccggaagggcctgtacgagggaaccggcagactgttcttcgagttttacagactgctgcacgacgcccggcctaaggaaggcgacgaccggcccttcttttggctgttcgagaatgtggtggccatgggagtcagcgacaagcgggatattagccggttcctggagagcaaccccgtgatgatcgatgccaaggaagtgagcgccgcccaccgggccagatacttctggggcaatctgcctggcatgaacagacccctggccagcaccgtgaacgacaagctggagctgcaggagtgcctggagcacggccggatcgccaagttcagcaaggtgagaaccatcaccacccgaagcaacagcatcaaacaaggcaaggaccagcactttcctgtgttcatgaacgagaaggaggacatcctgtggtgtaccgagatggagagagtgttcgggttcccagtccactacacagatgtcagcaacatgtctagactggccagacagagactgctgggaagaagctggtccgtccctgtgatcagacacctgttcgcccctctgaaggagtacttcgcctgcgtgagcagcggcaacagcaacgccaacagccggggccccagcttctctagcggcctggtgccactgtccctgagagggagccacatgggccccatggagatctacaaaaccgtgagcgcctggaagcggcagcctgtgcgcgtgctgagcctgtttcggaatatcgataaagtcctgaaaagcctgggattcctggagagcggctctggctccggcggtggcaccctgaagtacgtggaggatgtgacaaacgtggtcagacgggatgtggagaagtggggccccttcgatctggtgtacggcagcacccaacccctgggcagctcttgtgaccggtgccctggctggtacatgtttcagttccaccggatcctgcagtacgccctgccgagacaggagtcccagcggccattcttttggattttcatggacaacttgctgctgaccgaggatgaccaggaaactaccactcggttcctgcagaccgaagccgtgaccctgcaggacgtgagaggccgggactaccagaacgccatgcgggtgtggtccaacatccctggactgaaaagcaagcacgcacctctgacccctaaagaagaggagtacctgcaggcccaggtgcggagcagaagcaagctggacgcccctaaggtggatctgctggtgaagaattgcctcctgcccctgagagagtacttcaagtatttcagccagaatagtctgcccctgggcggcccaagcagcggcgcccctcctcccagcggcggcagcccagccggctccccaacctctaccgaggagggcacctctgagtccgccacccccgagagcggccctggcacctccaccgagcccagcgagggcagcgcacccggcagccctgccggcagccccacctccacagaggagggaaccagcaccgagcccagcgaaggcagcgccccaggcaccagcaccgagcctagtgagggcggctctggcggcggcagcgcccaggagattaaacggatcaacaagatcagaagaagacttgtgaaagacagcaacaccaagaaggccggcaagacaggccccatgaaaaccctgctggttagagtgatgacacccgatctgagagagcggctggaaaacctgagaaagaagcctgaaaatatcccccagcccatcagcaatacatctagagccaacctgaataagctgctgaccgattacaccgaaatgaagaaggcgatcctgcatgtgtactgggaagagttccagaaggaccctgtgggcctgatgagccgggtggcccagcctgccagcaagaagatcgatcagaacaagctgaaacctgagatggacgagaagggcaacctgaccaccgccggctttgcctgctctcagtgtggccagcccctgttcgtgtacaagctggagcaggtgtctgagaagggcaaggcttacaccaactacttcggacggtgcaatgtggccgagcacgaaaagctgatcctgctggcccagctgaagcccgagaaggatagcgacgaagccgtgacatatagcctgggaaagtttgggcagagggccctggatttctacagcattcatgtgaccaaggagtccacccaccccgtgaagcccctggcccagatcgccggaaacagatacgcctccggacctgtgggaaaggccctgagcgacgcatgtatgggcacaatcgcctccttcctgtctaagtaccaggacatcatcatcgaacaccagaaggtggtgaagggcaaccagaagagactggagagcctgcgggagctggccggcaaggaaaacctggaataccctagcgtgaccctgccacctcagcctcacaccaaggagggcgttgatgcctacaacgaagtgatcgcccgggtgcgaatgtgggtgaacctgaacctgtggcagaagctgaagctaagcagagatgatgccaagcctctgctgagactgaagggattcccttcctttcctctggtcgagagacaggccaacgaagtggactggtgggacatggtgtgtaacgtgaagaagctgatcaacgagaaaaaggaggatggcaaggtgttttggcagaatctggctggctacaagagacaggaagccctgagaccatacctgagcagcgaggaagatcggaagaagggaaagaaattcgctcggtaccagctgggcgacctgctgctgcacctggaaaagaagcacggcgaggactggggaaaggtgtacgacgaggcctgggagcggattgacaagaaagtggaaggcctgagcaagcacatcaagctggaagaggaacggagaagcgaggacgcccagagcaaggccgccctgaccgactggctgcgggctaaggccagcttcgtgatcgagggcctgaaggaggccgacaaggacgagttctgcagatgcgagctgaagctgcagaagtggtacggggacctgcggggaaagcccttcgccatcgaagccgagaacagcatcctggacatcagcggcttcagcaagcagtacaactgtgccttcatctggcagaaggacggcgtgaagaagctgaacctgtacctgatcatcaactacttcaagggcggcaagctgcggttcaagaagatcaaacctgaagccttcgaagccaacagattctacaccgtgatcaacaaaaagagcggcgagatcgtgcccatggaggtgaacttcaacttcgacgaccccaacctgatcatcctgcctctggcctttggcaagagacagggcagagaattcatctggaacgacctgctgtccctggaaaccggcagcctgaagctggccaacggaagagtgatcgagaagacactgtacaacagaagaacccggcaggatgagcctgccctgttcgtggccctgaccttcgagcggcgggaggtcctggactcctccaatatcaaaccaatgaacctgatcggcgtggcaagaggcgaaaacatccccgccgtgatcgccctgaccgaccccgagggctgcccactgagccggtttaaggatagcctgggaaacccaacccacatcctgagaatcggcgagagctataaggagaagcagcggaccatccaggccaagaaggaggtggagcagcggagagccggcggctacagccggaagtacgccagcaaagccaagaatctggcagacgatatggtgagaaacaccgctagagatctgctgtactacgccgtgacccaggatgccatgctgatcttcgccaacctgagccggggcttcggccggcagggcaagcggaccttcatggccgagagacagtacacacggatggaggactggctgaccgccaagctggcctacgagggcctgagcaagacctacctgtccaagacactggcccagtacacctccaagacatgcagcaactgtgggtttaccatcaccagcgccgactacgacagggtgctggagaagctgaagaagacagcaacaggctggatgaccacaattaacggcaaggagctgaaggtggagggccagattacctactacaacagatacaagagacagaacgtagtcaaggacctgtccgtcgagctggatagactgagcgaagaatctgtgaacaacgacatctcctcctggacaaagggcagaagcggagaagctctgagcctcctgaagaaaagattctcccatagacccgtgcaggagaagttcgtgtgcctgaactgcggcttcgagacacacgcagccgagcaagccgccctgaacatcgccagatcctggctgttcctgcggagccaggagtacaagaaataccagacaaacaagacaaccggcaacaccgataagagagccttcgtcgagacctggcagtccttttaccggaagaagcttaaggaggtgtggaaacctgccgtgcggtctggcggatctggcggaggctccacaagccaggccgaggtgaccttcgaggacgtggccgtgctgttcagcagggaggagtggggcaggctgggccccgcccagaggggcctgtacagggacgtgatgctggagacctacaggaacctggtgagcctgggcgccggccccgccggccccaagcccggcgtgatcacccagctggagaggggcgacgagccctgggtgctggacgcccagggcaccgagggcaaggagaggctgagggtgagcaccagccccaagaaaaagagaaaagtctaagctgccttctgcggggcttgccttctggccatgcccttcttctctcccttgcacctgtacctcttggtctttgaataaagcctgagtaggaaggctagcaaaaaaaaaaaaaaaaaaaaaaaaaaaaaaaaaaaaaaaaaaaaaaaaaaaaaaaaaaaaaaaaaaaaaaaaaaaaaaaa

SEQ ID NO: 6020 - RNA, 5797 nt, synthetic construct
  source 1..5797: mol_type = other RNA
aggaaataagagagaaaagaagagtaagaagaaatataagagccaccatggcccctaagaagaagcgtaaagtgagccggatggaacgcctcgtctacgaggtgcggcagaagtgcagaaacatcgaggacatctgcatctcctgcggatctctgaacgtgaccctggagcacccactgttcatcggcggcatgtgccagaactgtaaaaactgttttctggagtgtgcctatcaatacgacgatgacggctaccagagctactgcaccatctgttgcggcggaagagaggtgctgatgtgtggaaataacaactgctgccggtgcttctgcgtggaatgcgtggacctgctggtgggccccggcgccgcccaggccgctattaaggaagatccttggaactgctacatgtgcggccacaagggcacatacggcctgctgagacggagagaggactggcctagcagactgcagatgttcttcgccaataaccacgaccaggagttcgacccccctaaggtgtaccctcccgtccccgccgagaagagaaagcccatccgggtcctgagcctgttcgatggcatcgccaccggtctgctggtgctgaaggacctgggcatccaggtggataggtacattgcctccgaggtgtgcgaggactccatcaccgtgggaatggtgcgtcatcagggcaagatcatgtacgtgggcgacgtgcggagcgtgacacagaagcatatccaggagtggggccctttcgacctggtgatcggcggcagcccttgcaatgacctgagcatcgtgaacccagcccggaagggcctgtacgagggaaccggcagactgttcttcgagttttacagactgctgcacgacgcccggcctaaggaaggcgacgaccggcccttcttttggctgttcgagaatgtggtggccatgggagtcagcgacaagcgggatattagccggttcctggagagcaaccccgtgatgatcgatgccaaggaagtgagcgccgcccaccgggccagatacttctggggcaatctgcctggcatgaacagacccctggccagcaccgtgaacgacaagctggagctgcaggagtgcctggagcacggccggatcgccaagttcagcaaggtgagaaccatcaccacccgaagcaacagcatcaaacaaggcaaggaccagcactttcctgtgttcatgaacgagaaggaggacatcctgtggtgtaccgagatggagagagtgttcgggttcccagtccactacacagatgtcagcaacatgtctagactggccagacagagactgctgggaagaagctggtccgtccctgtgatcagacacctgttcgcccctctgaaggagtacttcgcctgcgtgagcagcggcaacagcaacgccaacagccggggccccagcttctctagcggcctggtgccactgtccctgagagggagccacatgggccccatggagatctacaaaaccgtgagcgcctggaagcggcagcctgtgcgcgtgctgagcctgtttcggaatatcgataaagtcctgaaaagcctgggattcctggagagcggctctggctccggcggtggcaccctgaagtacgtggaggatgtgacaaacgtggtcagacgggatgtggagaagtggggccccttcgatctggtgtacggcagcacccaacccctgggcagctcttgtgaccggtgccctggctggtacatgtttcagttccaccggatcctgcagtacgccctgccgagacaggagtcccagcggccattcttttggattttcatggacaacttgctgctgaccgaggatgaccaggaaactaccactcggttcctgcagaccgaagccgtgaccctgcaggacgtgagaggccgggactaccagaacgccatgcgggtgtggtccaacatccctggactgaaaagcaagcacgcacctctgacccctaaagaagaggagtacctgcaggcccaggtgcggagcagaagcaagctggacgcccctaaggtggatctgctggtgaagaattgcctcctgcccctgagagagtacttcaagtatttcagccagaatagtctgcccctgggcggcccaagcagcggcgcccctcctcccagcggcggcagcccagccggctccccaacctctaccgaggagggcacctctgagtccgccacccccgagagcggccctggcacctccaccgagcccagcgagggcagcgcacccggcagccctgccggcagccccacctccacagaggagggaaccagcaccgagcccagcgaaggcagcgccccaggcaccagcaccgagcctagtgagggcggctctggcggcggcagcgcccaggagattaaacggatcaacaagatcagaagaagacttgtgaaagacagcaacaccaagaaggccggcaagacaggccccatgaaaaccctgctggttagagtgatgacacccgatctgagagagcggctggaaaacctgagaaagaagcctgaaaatatcccccagcccatcagcaatacatctagagccaacctgaataagctgctgaccgattacaccgaaatgaagaaggcgatcctgcatgtgtactgggaagagttccagaaggaccctgtgggcctgatgagccgggtggcccagcctgccagcaagaagatcgatcagaacaagctgaaacctgagatggacgagaagggcaacctgaccaccgccggctttgcctgctctcagtgtggccagcccctgttcgtgtacaagctggagcaggtgtctgagaagggcaaggcttacaccaactacttcggacggtgcaatgtggccgagcacgaaaagctgatcctgctggcccagctgaagcccgagaaggatagcgacgaagccgtgacatatagcctgggaaagtttgggcagagggccctggatttctacagcattcatgtgaccaaggagtccacccaccccgtgaagcccctggcccagatcgccggaaacagatacgcctccggacctgtgggaaaggccctgagcgacgcatgtatgggcacaatcgcctccttcctgtctaagtaccaggacatcatcatcgaacaccagaaggtggtgaagggcaaccagaagagactggagagcctgcgggagctggccggcaaggaaaacctggaataccctagcgtgaccctgccacctcagcctcacaccaaggagggcgttgatgcctacaacgaagtgatcgcccgggtgcgaatgtgggtgaacctgaacctgtggcagaagctgaagctaagcagagatgatgccaagcctctgctgagactgaagggattcccttcctttcctctggtcgagagacaggccaacgaagtggactggtgggacatggtgtgtaacgtgaagaagctgatcaacgagaaaaaggaggatggcaaggtgttttggcagaatctggctggctacaagagacaggaagccctgagaccatacctgagcagcgaggaagatcggaagaagggaaagaaattcgctcggtaccagctgggcgacctgctgctgcacctggaaaagaagcacggcgaggactggggaaaggtgtacgacgaggcctgggagcggattgacaagaaagtggaaggcctgagcaagcacatcaagctggaagaggaacggagaagcgaggacgcccagagcaaggccgccctgaccgactggctgcgggctaaggccagcttcgtgatcgagggcctgaaggaggccgacaaggacgagttctgcagatgcgagctgaagctgcagaagtggtacggggacctgcggggaaagcccttcgccatcgaagccgagaacagcatcctggacatcagcggcttcagcaagcagtacaactgtgccttcatctggcagaaggacggcgtgaagaagctgaacctgtacctgatcatcaactacttcaagggcggcaagctgcggttcaagaagatcaaacctgaagccttcgaagccaacagattctacaccgtgatcaacaaaaagagcggcgagatcgtgcccatggaggtgaacttcaacttcgacgaccccaacctgatcatcctgcctctggcctttggcaagagacagggcagagaattcatctggaacgacctgctgtccctggaaaccggcagcctgaagctggccaacggaagagtgatcgagaagacactgtacaacagaagaacccggcaggatgagcctgccctgttcgtggccctgaccttcgagcggcgggaggtcctggactcctccaatatcaaaccaatgaacctgatcggcgtggcaagaggcgaaaacatccccgccgtgatcgccctgaccgaccccgagggctgcccactgagccggtttaaggatagcctgggaaacccaacccacatcctgagaatcggcgagagctataaggagaagcagcggaccatccaggccaagaaggaggtggagcagcggagagccggcggctacagccggaagtacgccagcaaagccaagaatctggcagacgatatggtgagaaacaccgctagagatctgctgtactacgccgtgacccaggatgccatgctgatcttcgccaacctgagccggggcttcggccggcagggcaagcggaccttcatggccgagagacagtacacacggatggaggactggctgaccgccaagctggcctacgagggcctgagcaagacctacctgtccaagacactggcccagtacacctccaagacatgcagcaactgtgggtttaccatcaccagcgccgactacgacagggtgctggagaagctgaagaagacagcaacaggctggatgaccacaattaacggcaaggagctgaaggtggagggccagattacctactacaacagatacaagagacagaacgtagtcaaggacctgtccgtcgagctggatagactgagcgaagaatctgtgaacaacgacatctcctcctggacaaagggcagaagcggagaagctctgagcctcctgaagaaaagattctcccatagacccgtgcaggagaagttcgtgtgcctgaactgcggcttcgagacacacgcagccgagcaagccgccctgaacatcgccagatcctggctgttcctgcggagccaggagtacaagaaataccagacaaacaagacaaccggcaacaccgataagagagccttcgtcgagacctggcagtccttttaccggaagaagcttaaggaggtgtggaaacctgccgtgcggtctggcggatctggcggaggctccacaagccagccccagggcaccgtgaccttcaaggacgtggaggtgaccttcagccaggacgagtggggcctgctggacgccagccagaggaacctgtacagggacgtgatgctggagaactacggcaacatggccagcgtggtgggccccttcaccaagcccgccctgatcagctggctggaggccagggagccctggggcctgaacgtgcagggcgtgcagctgaagggcaaccccggcgccgcccccaccagccccaagaaaaagagaaaagtctaagctgccttctgcggggcttgccttctggccatgcccttcttctctcccttgcacctgtacctcttggtctttgaataaagcctgagtaggaaggctagcaaaaaaaaaaaaaaaaaaaaaaaaaaaaaaaaaaaaaaaaaaaaaaaaaaaaaaaaaaaaaaaaaaaaaaaaaaaaaaaa

SEQ ID NO: 6021 - RNA, 5797 nt, synthetic construct
  source 1..5797: mol_type = other RNA
aggaaataagagagaaaagaagagtaagaagaaatataagagccaccatggcccctaagaagaagcgtaaagtgagccggatggaacgcctcgtctacgaggtgcggcagaagtgcagaaacatcgaggacatctgcatctcctgcggatctctgaacgtgaccctggagcacccactgttcatcggcggcatgtgccagaactgtaaaaactgttttctggagtgtgcctatcaatacgacgatgacggctaccagagctactgcaccatctgttgcggcggaagagaggtgctgatgtgtggaaataacaactgctgccggtgcttctgcgtggaatgcgtggacctgctggtgggccccggcgccgcccaggccgctattaaggaagatccttggaactgctacatgtgcggccacaagggcacatacggcctgctgagacggagagaggactggcctagcagactgcagatgttcttcgccaataaccacgaccaggagttcgacccccctaaggtgtaccctcccgtccccgccgagaagagaaagcccatccgggtcctgagcctgttcgatggcatcgccaccggtctgctggtgctgaaggacctgggcatccaggtggataggtacattgcctccgaggtgtgcgaggactccatcaccgtgggaatggtgcgtcatcagggcaagatcatgtacgtgggcgacgtgcggagcgtgacacagaagcatatccaggagtggggccctttcgacctggtgatcggcggcagcccttgcaatgacctgagcatcgtgaacccagcccggaagggcctgtacgagggaaccggcagactgttcttcgagttttacagactgctgcacgacgcccggcctaaggaaggcgacgaccggcccttcttttggctgttcgagaatgtggtggccatgggagtcagcgacaagcgggatattagccggttcctggagagcaaccccgtgatgatcgatgccaaggaagtgagcgccgcccaccgggccagatacttctggggcaatctgcctggcatgaacagacccctggccagcaccgtgaacgacaagctggagctgcaggagtgcctggagcacggccggatcgccaagttcagcaaggtgagaaccatcaccacccgaagcaacagcatcaaacaaggcaaggaccagcactttcctgtgttcatgaacgagaaggaggacatcctgtggtgtaccgagatggagagagtgttcgggttcccagtccactacacagatgtcagcaacatgtctagactggccagacagagactgctgggaagaagctggtccgtccctgtgatcagacacctgttcgcccctctgaaggagtacttcgcctgcgtgagcagcggcaacagcaacgccaacagccggggccccagcttctctagcggcctggtgccactgtccctgagagggagccacatgggccccatggagatctacaaaaccgtgagcgcctggaagcggcagcctgtgcgcgtgctgagcctgtttcggaatatcgataaagtcctgaaaagcctgggattcctggagagcggctctggctccggcggtggcaccctgaagtacgtggaggatgtgacaaacgtggtcagacgggatgtggagaagtggggccccttcgatctggtgtacggcagcacccaacccctgggcagctcttgtgaccggtgccctggctggtacatgtttcagttccaccggatcctgcagtacgccctgccgagacaggagtcccagcggccattcttttggattttcatggacaacttgctgctgaccgaggatgaccaggaaactaccactcggttcctgcagaccgaagccgtgaccctgcaggacgtgagaggccgggactaccagaacgccatgcgggtgtggtccaacatccctggactgaaaagcaagcacgcacctctgacccctaaagaagaggagtacctgcaggcccaggtgcggagcagaagcaagctggacgcccctaaggtggatctgctggtgaagaattgcctcctgcccctgagagagtacttcaagtatttcagccagaatagtctgcccctgggcggcccaagcagcggcgcccctcctcccagcggcggcagcccagccggctccccaacctctaccgaggagggcacctctgagtccgccacccccgagagcggccctggcacctccaccgagcccagcgagggcagcgcacccggcagccctgccggcagccccacctccacagaggagggaaccagcaccgagcccagcgaaggcagcgccccaggcaccagcaccgagcctagtgagggcggctctggcggcggcagcgcccaggagattaaacggatcaacaagatcagaagaagacttgtgaaagacagcaacaccaagaaggccggcaagacaggccccatgaaaaccctgctggttagagtgatgacacccgatctgagagagcggctggaaaacctgagaaagaagcctgaaaatatcccccagcccatcagcaatacatctagagccaacctgaataagctgctgaccgattacaccgaaatgaagaaggcgatcctgcatgtgtactgggaagagttccagaaggaccctgtgggcctgatgagccgggtggcccagcctgccagcaagaagatcgatcagaacaagctgaaacctgagatggacgagaagggcaacctgaccaccgccggctttgcctgctctcagtgtggccagcccctgttcgtgtacaagctggagcaggtgtctgagaagggcaaggcttacaccaactacttcggacggtgcaatgtggccgagcacgaaaagctgatcctgctggcccagctgaagcccgagaaggatagcgacgaagccgtgacatatagcctgggaaagtttgggcagagggccctggatttctacagcattcatgtgaccaaggagtccacccaccccgtgaagcccctggcccagatcgccggaaacagatacgcctccggacctgtgggaaaggccctgagcgacgcatgtatgggcacaatcgcctccttcctgtctaagtaccaggacatcatcatcgaacaccagaaggtggtgaagggcaaccagaagagactggagagcctgcgggagctggccggcaaggaaaacctggaataccctagcgtgaccctgccacctcagcctcacaccaaggagggcgttgatgcctacaacgaagtgatcgcccgggtgcgaatgtgggtgaacctgaacctgtggcagaagctgaagctaagcagagatgatgccaagcctctgctgagactgaagggattcccttcctttcctctggtcgagagacaggccaacgaagtggactggtgggacatggtgtgtaacgtgaagaagctgatcaacgagaaaaaggaggatggcaaggtgttttggcagaatctggctggctacaagagacaggaagccctgagaccatacctgagcagcgaggaagatcggaagaagggaaagaaattcgctcggtaccagctgggcgacctgctgctgcacctggaaaagaagcacggcgaggactggggaaaggtgtacgacgaggcctgggagcggattgacaagaaagtggaaggcctgagcaagcacatcaagctggaagaggaacggagaagcgaggacgcccagagcaaggccgccctgaccgactggctgcgggctaaggccagcttcgtgatcgagggcctgaaggaggccgacaaggacgagttctgcagatgcgagctgaagctgcagaagtggtacggggacctgcggggaaagcccttcgccatcgaagccgagaacagcatcctggacatcagcggcttcagcaagcagtacaactgtgccttcatctggcagaaggacggcgtgaagaagctgaacctgtacctgatcatcaactacttcaagggcggcaagctgcggttcaagaagatcaaacctgaagccttcgaagccaacagattctacaccgtgatcaacaaaaagagcggcgagatcgtgcccatggaggtgaacttcaacttcgacgaccccaacctgatcatcctgcctctggcctttggcaagagacagggcagagaattcatctggaacgacctgctgtccctggaaaccggcagcctgaagctggccaacggaagagtgatcgagaagacactgtacaacagaagaacccggcaggatgagcctgccctgttcgtggccctgaccttcgagcggcgggaggtcctggactcctccaatatcaaaccaatgaacctgatcggcgtggcaagaggcgaaaacatccccgccgtgatcgccctgaccgaccccgagggctgcccactgagccggtttaaggatagcctgggaaacccaacccacatcctgagaatcggcgagagctataaggagaagcagcggaccatccaggccaagaaggaggtggagcagcggagagccggcggctacagccggaagtacgccagcaaagccaagaatctggcagacgatatggtgagaaacaccgctagagatctgctgtactacgccgtgacccaggatgccatgctgatcttcgccaacctgagccggggcttcggccggcagggcaagcggaccttcatggccgagagacagtacacacggatggaggactggctgaccgccaagctggcctacgagggcctgagcaagacctacctgtccaagacactggcccagtacacctccaagacatgcagcaactgtgggtttaccatcaccagcgccgactacgacagggtgctggagaagctgaagaagacagcaacaggctggatgaccacaattaacggcaaggagctgaaggtggagggccagattacctactacaacagatacaagagacagaacgtagtcaaggacctgtccgtcgagctggatagactgagcgaagaatctgtgaacaacgacatctcctcctggacaaagggcagaagcggagaagctctgagcctcctgaagaaaagattctcccatagacccgtgcaggagaagttcgtgtgcctgaactgcggcttcgagacacacgcagccgagcaagccgccctgaacatcgccagatcctggctgttcctgcggagccaggagtacaagaaataccagacaaacaagacaaccggcaacaccgataagagagccttcgtcgagacctggcagtccttttaccggaagaagcttaaggaggtgtggaaacctgccgtgcggtctggcggatctggcggaggctccacaagccagccccagggcaccgtgaccttcaaggacgtggaggtgaccttcagccaggacgagtggggcctgctggacgccagccagaggaacctgtacagggacgtgatgctggagaactacggcaacatggccagcgtggtgggccccttcaccaagcccgccctgatcagctggctggaggccagggagccctggggcctgaacgtgcagggcgtgcagttcaagggcaaccccggcgccgcccccaccagccccaagaaaaagagaaaagtctaagctgccttctgcggggcttgccttctggccatgcccttcttctctcccttgcacctgtacctcttggtctttgaataaagcctgagtaggaaggctagcaaaaaaaaaaaaaaaaaaaaaaaaaaaaaaaaaaaaaaaaaaaaaaaaaaaaaaaaaaaaaaaaaaaaaaaaaaaaaaaa

SEQ ID NO: 6022 - RNA, 5797 nt, synthetic construct
  source 1..5797: mol_type = other RNA
aggaaataagagagaaaagaagagtaagaagaaatataagagccaccatggcccctaagaagaagcgtaaagtgagccggatggaacgcctcgtctacgaggtgcggcagaagtgcagaaacatcgaggacatctgcatctcctgcggatctctgaacgtgaccctggagcacccactgttcatcggcggcatgtgccagaactgtaaaaactgttttctggagtgtgcctatcaatacgacgatgacggctaccagagctactgcaccatctgttgcggcggaagagaggtgctgatgtgtggaaataacaactgctgccggtgcttctgcgtggaatgcgtggacctgctggtgggccccggcgccgcccaggccgctattaaggaagatccttggaactgctacatgtgcggccacaagggcacatacggcctgctgagacggagagaggactggcctagcagactgcagatgttcttcgccaataaccacgaccaggagttcgacccccctaaggtgtaccctcccgtccccgccgagaagagaaagcccatccgggtcctgagcctgttcgatggcatcgccaccggtctgctggtgctgaaggacctgggcatccaggtggataggtacattgcctccgaggtgtgcgaggactccatcaccgtgggaatggtgcgtcatcagggcaagatcatgtacgtgggcgacgtgcggagcgtgacacagaagcatatccaggagtggggccctttcgacctggtgatcggcggcagcccttgcaatgacctgagcatcgtgaacccagcccggaagggcctgtacgagggaaccggcagactgttcttcgagttttacagactgctgcacgacgcccggcctaaggaaggcgacgaccggcccttcttttggctgttcgagaatgtggtggccatgggagtcagcgacaagcgggatattagccggttcctggagagcaaccccgtgatgatcgatgccaaggaagtgagcgccgcccaccgggccagatacttctggggcaatctgcctggcatgaacagacccctggccagcaccgtgaacgacaagctggagctgcaggagtgcctggagcacggccggatcgccaagttcagcaaggtgagaaccatcaccacccgaagcaacagcatcaaacaaggcaaggaccagcactttcctgtgttcatgaacgagaaggaggacatcctgtggtgtaccgagatggagagagtgttcgggttcccagtccactacacagatgtcagcaacatgtctagactggccagacagagactgctgggaagaagctggtccgtccctgtgatcagacacctgttcgcccctctgaaggagtacttcgcctgcgtgagcagcggcaacagcaacgccaacagccggggccccagcttctctagcggcctggtgccactgtccctgagagggagccacatgggccccatggagatctacaaaaccgtgagcgcctggaagcggcagcctgtgcgcgtgctgagcctgtttcggaatatcgataaagtcctgaaaagcctgggattcctggagagcggctctggctccggcggtggcaccctgaagtacgtggaggatgtgacaaacgtggtcagacgggatgtggagaagtggggccccttcgatctggtgtacggcagcacccaacccctgggcagctcttgtgaccggtgccctggctggtacatgtttcagttccaccggatcctgcagtacgccctgccgagacaggagtcccagcggccattcttttggattttcatggacaacttgctgctgaccgaggatgaccaggaaactaccactcggttcctgcagaccgaagccgtgaccctgcaggacgtgagaggccgggactaccagaacgccatgcgggtgtggtccaacatccctggactgaaaagcaagcacgcacctctgacccctaaagaagaggagtacctgcaggcccaggtgcggagcagaagcaagctggacgcccctaaggtggatctgctggtgaagaattgcctcctgcccctgagagagtacttcaagtatttcagccagaatagtctgcccctgggcggcccaagcagcggcgcccctcctcccagcggcggcagcccagccggctccccaacctctaccgaggagggcacctctgagtccgccacccccgagagcggccctggcacctccaccgagcccagcgagggcagcgcacccggcagccctgccggcagccccacctccacagaggagggaaccagcaccgagcccagcgaaggcagcgccccaggcaccagcaccgagcctagtgagggcggctctggcggcggcagcgcccaggagattaaacggatcaacaagatcagaagaagacttgtgaaagacagcaacaccaagaaggccggcaagacaggccccatgaaaaccctgctggttagagtgatgacacccgatctgagagagcggctggaaaacctgagaaagaagcctgaaaatatcccccagcccatcagcaatacatctagagccaacctgaataagctgctgaccgattacaccgaaatgaagaaggcgatcctgcatgtgtactgggaagagttccagaaggaccctgtgggcctgatgagccgggtggcccagcctgccagcaagaagatcgatcagaacaagctgaaacctgagatggacgagaagggcaacctgaccaccgccggctttgcctgctctcagtgtggccagcccctgttcgtgtacaagctggagcaggtgtctgagaagggcaaggcttacaccaactacttcggacggtgcaatgtggccgagcacgaaaagctgatcctgctggcccagctgaagcccgagaaggatagcgacgaagccgtgacatatagcctgggaaagtttgggcagagggccctggatttctacagcattcatgtgaccaaggagtccacccaccccgtgaagcccctggcccagatcgccggaaacagatacgcctccggacctgtgggaaaggccctgagcgacgcatgtatgggcacaatcgcctccttcctgtctaagtaccaggacatcatcatcgaacaccagaaggtggtgaagggcaaccagaagagactggagagcctgcgggagctggccggcaaggaaaacctggaataccctagcgtgaccctgccacctcagcctcacaccaaggagggcgttgatgcctacaacgaagtgatcgcccgggtgcgaatgtgggtgaacctgaacctgtggcagaagctgaagctaagcagagatgatgccaagcctctgctgagactgaagggattcccttcctttcctctggtcgagagacaggccaacgaagtggactggtgggacatggtgtgtaacgtgaagaagctgatcaacgagaaaaaggaggatggcaaggtgttttggcagaatctggctggctacaagagacaggaagccctgagaccatacctgagcagcgaggaagatcggaagaagggaaagaaattcgctcggtaccagctgggcgacctgctgctgcacctggaaaagaagcacggcgaggactggggaaaggtgtacgacgaggcctgggagcggattgacaagaaagtggaaggcctgagcaagcacatcaagctggaagaggaacggagaagcgaggacgcccagagcaaggccgccctgaccgactggctgcgggctaaggccagcttcgtgatcgagggcctgaaggaggccgacaaggacgagttctgcagatgcgagctgaagctgcagaagtggtacggggacctgcggggaaagcccttcgccatcgaagccgagaacagcatcctggacatcagcggcttcagcaagcagtacaactgtgccttcatctggcagaaggacggcgtgaagaagctgaacctgtacctgatcatcaactacttcaagggcggcaagctgcggttcaagaagatcaaacctgaagccttcgaagccaacagattctacaccgtgatcaacaaaaagagcggcgagatcgtgcccatggaggtgaacttcaacttcgacgaccccaacctgatcatcctgcctctggcctttggcaagagacagggcagagaattcatctggaacgacctgctgtccctggaaaccggcagcctgaagctggccaacggaagagtgatcgagaagacactgtacaacagaagaacccggcaggatgagcctgccctgttcgtggccctgaccttcgagcggcgggaggtcctggactcctccaatatcaaaccaatgaacctgatcggcgtggcaagaggcgaaaacatccccgccgtgatcgccctgaccgaccccgagggctgcccactgagccggtttaaggatagcctgggaaacccaacccacatcctgagaatcggcgagagctataaggagaagcagcggaccatccaggccaagaaggaggtggagcagcggagagccggcggctacagccggaagtacgccagcaaagccaagaatctggcagacgatatggtgagaaacaccgctagagatctgctgtactacgccgtgacccaggatgccatgctgatcttcgccaacctgagccggggcttcggccggcagggcaagcggaccttcatggccgagagacagtacacacggatggaggactggctgaccgccaagctggcctacgagggcctgagcaagacctacctgtccaagacactggcccagtacacctccaagacatgcagcaactgtgggtttaccatcaccagcgccgactacgacagggtgctggagaagctgaagaagacagcaacaggctggatgaccacaattaacggcaaggagctgaaggtggagggccagattacctactacaacagatacaagagacagaacgtagtcaaggacctgtccgtcgagctggatagactgagcgaagaatctgtgaacaacgacatctcctcctggacaaagggcagaagcggagaagctctgagcctcctgaagaaaagattctcccatagacccgtgcaggagaagttcgtgtgcctgaactgcggcttcgagacacacgcagccgagcaagccgccctgaacatcgccagatcctggctgttcctgcggagccaggagtacaagaaataccagacaaacaagacaaccggcaacaccgataagagagccttcgtcgagacctggcagtccttttaccggaagaagcttaaggaggtgtggaaacctgccgtgcggtctggcggatctggcggaggctccacaagcgtgcaggagcccgtgaccttcaaggacgtggccgtggacttcacccaggaggagtggggccagctggacctggtgcagaggaccctgtacagggacgtgatgctggagacctacggccacctgctgagcgtgggcaaccagatcgccaagcccgaggtgatcagcctgctggagcagggcgaggagccctggagcgtggagcaggcctgcccccagagggcctgccccgagtggatgaggaacaccagccccaagaaaaagagaaaagtctaagctgccttctgcggggcttgccttctggccatgcccttcttctctcccttgcacctgtacctcttggtctttgaataaagcctgagtaggaaggctagcaaaaaaaaaaaaaaaaaaaaaaaaaaaaaaaaaaaaaaaaaaaaaaaaaaaaaaaaaaaaaaaaaaaaaaaaaaaaaaaa

SEQ ID NO: 6023 - RNA, 5797 nt, synthetic construct
  source 1..5797: mol_type = other RNA
aggaaataagagagaaaagaagagtaagaagaaatataagagccaccatggcccctaagaagaagcgtaaagtgagccggatggaacgcctcgtctacgaggtgcggcagaagtgcagaaacatcgaggacatctgcatctcctgcggatctctgaacgtgaccctggagcacccactgttcatcggcggcatgtgccagaactgtaaaaactgttttctggagtgtgcctatcaatacgacgatgacggctaccagagctactgcaccatctgttgcggcggaagagaggtgctgatgtgtggaaataacaactgctgccggtgcttctgcgtggaatgcgtggacctgctggtgggccccggcgccgcccaggccgctattaaggaagatccttggaactgctacatgtgcggccacaagggcacatacggcctgctgagacggagagaggactggcctagcagactgcagatgttcttcgccaataaccacgaccaggagttcgacccccctaaggtgtaccctcccgtccccgccgagaagagaaagcccatccgggtcctgagcctgttcgatggcatcgccaccggtctgctggtgctgaaggacctgggcatccaggtggataggtacattgcctccgaggtgtgcgaggactccatcaccgtgggaatggtgcgtcatcagggcaagatcatgtacgtgggcgacgtgcggagcgtgacacagaagcatatccaggagtggggccctttcgacctggtgatcggcggcagcccttgcaatgacctgagcatcgtgaacccagcccggaagggcctgtacgagggaaccggcagactgttcttcgagttttacagactgctgcacgacgcccggcctaaggaaggcgacgaccggcccttcttttggctgttcgagaatgtggtggccatgggagtcagcgacaagcgggatattagccggttcctggagagcaaccccgtgatgatcgatgccaaggaagtgagcgccgcccaccgggccagatacttctggggcaatctgcctggcatgaacagacccctggccagcaccgtgaacgacaagctggagctgcaggagtgcctggagcacggccggatcgccaagttcagcaaggtgagaaccatcaccacccgaagcaacagcatcaaacaaggcaaggaccagcactttcctgtgttcatgaacgagaaggaggacatcctgtggtgtaccgagatggagagagtgttcgggttcccagtccactacacagatgtcagcaacatgtctagactggccagacagagactgctgggaagaagctggtccgtccctgtgatcagacacctgttcgcccctctgaaggagtacttcgcctgcgtgagcagcggcaacagcaacgccaacagccggggccccagcttctctagcggcctggtgccactgtccctgagagggagccacatgggccccatggagatctacaaaaccgtgagcgcctggaagcggcagcctgtgcgcgtgctgagcctgtttcggaatatcgataaagtcctgaaaagcctgggattcctggagagcggctctggctccggcggtggcaccctgaagtacgtggaggatgtgacaaacgtggtcagacgggatgtggagaagtggggccccttcgatctggtgtacggcagcacccaacccctgggcagctcttgtgaccggtgccctggctggtacatgtttcagttccaccggatcctgcagtacgccctgccgagacaggagtcccagcggccattcttttggattttcatggacaacttgctgctgaccgaggatgaccaggaaactaccactcggttcctgcagaccgaagccgtgaccctgcaggacgtgagaggccgggactaccagaacgccatgcgggtgtggtccaacatccctggactgaaaagcaagcacgcacctctgacccctaaagaagaggagtacctgcaggcccaggtgcggagcagaagcaagctggacgcccctaaggtggatctgctggtgaagaattgcctcctgcccctgagagagtacttcaagtatttcagccagaatagtctgcccctgggcggcccaagcagcggcgcccctcctcccagcggcggcagcccagccggctccccaacctctaccgaggagggcacctctgagtccgccacccccgagagcggccctggcacctccaccgagcccagcgagggcagcgcacccggcagccctgccggcagccccacctccacagaggagggaaccagcaccgagcccagcgaaggcagcgccccaggcaccagcaccgagcctagtgagggcggctctggcggcggcagcgcccaggagattaaacggatcaacaagatcagaagaagacttgtgaaagacagcaacaccaagaaggccggcaagacaggccccatgaaaaccctgctggttagagtgatgacacccgatctgagagagcggctggaaaacctgagaaagaagcctgaaaatatcccccagcccatcagcaatacatctagagccaacctgaataagctgctgaccgattacaccgaaatgaagaaggcgatcctgcatgtgtactgggaagagttccagaaggaccctgtgggcctgatgagccgggtggcccagcctgccagcaagaagatcgatcagaacaagctgaaacctgagatggacgagaagggcaacctgaccaccgccggctttgcctgctctcagtgtggccagcccctgttcgtgtacaagctggagcaggtgtctgagaagggcaaggcttacaccaactacttcggacggtgcaatgtggccgagcacgaaaagctgatcctgctggcccagctgaagcccgagaaggatagcgacgaagccgtgacatatagcctgggaaagtttgggcagagggccctggatttctacagcattcatgtgaccaaggagtccacccaccccgtgaagcccctggcccagatcgccggaaacagatacgcctccggacctgtgggaaaggccctgagcgacgcatgtatgggcacaatcgcctccttcctgtctaagtaccaggacatcatcatcgaacaccagaaggtggtgaagggcaaccagaagagactggagagcctgcgggagctggccggcaaggaaaacctggaataccctagcgtgaccctgccacctcagcctcacaccaaggagggcgttgatgcctacaacgaagtgatcgcccgggtgcgaatgtgggtgaacctgaacctgtggcagaagctgaagctaagcagagatgatgccaagcctctgctgagactgaagggattcccttcctttcctctggtcgagagacaggccaacgaagtggactggtgggacatggtgtgtaacgtgaagaagctgatcaacgagaaaaaggaggatggcaaggtgttttggcagaatctggctggctacaagagacaggaagccctgagaccatacctgagcagcgaggaagatcggaagaagggaaagaaattcgctcggtaccagctgggcgacctgctgctgcacctggaaaagaagcacggcgaggactggggaaaggtgtacgacgaggcctgggagcggattgacaagaaagtggaaggcctgagcaagcacatcaagctggaagaggaacggagaagcgaggacgcccagagcaaggccgccctgaccgactggctgcgggctaaggccagcttcgtgatcgagggcctgaaggaggccgacaaggacgagttctgcagatgcgagctgaagctgcagaagtggtacggggacctgcggggaaagcccttcgccatcgaagccgagaacagcatcctggacatcagcggcttcagcaagcagtacaactgtgccttcatctggcagaaggacggcgtgaagaagctgaacctgtacctgatcatcaactacttcaagggcggcaagctgcggttcaagaagatcaaacctgaagccttcgaagccaacagattctacaccgtgatcaacaaaaagagcggcgagatcgtgcccatggaggtgaacttcaacttcgacgaccccaacctgatcatcctgcctctggcctttggcaagagacagggcagagaattcatctggaacgacctgctgtccctggaaaccggcagcctgaagctggccaacggaagagtgatcgagaagacactgtacaacagaagaacccggcaggatgagcctgccctgttcgtggccctgaccttcgagcggcgggaggtcctggactcctccaatatcaaaccaatgaacctgatcggcgtggcaagaggcgaaaacatccccgccgtgatcgccctgaccgaccccgagggctgcccactgagccggtttaaggatagcctgggaaacccaacccacatcctgagaatcggcgagagctataaggagaagcagcggaccatccaggccaagaaggaggtggagcagcggagagccggcggctacagccggaagtacgccagcaaagccaagaatctggcagacgatatggtgagaaacaccgctagagatctgctgtactacgccgtgacccaggatgccatgctgatcttcgccaacctgagccggggcttcggccggcagggcaagcggaccttcatggccgagagacagtacacacggatggaggactggctgaccgccaagctggcctacgagggcctgagcaagacctacctgtccaagacactggcccagtacacctccaagacatgcagcaactgtgggtttaccatcaccagcgccgactacgacagggtgctggagaagctgaagaagacagcaacaggctggatgaccacaattaacggcaaggagctgaaggtggagggccagattacctactacaacagatacaagagacagaacgtagtcaaggacctgtccgtcgagctggatagactgagcgaagaatctgtgaacaacgacatctcctcctggacaaagggcagaagcggagaagctctgagcctcctgaagaaaagattctcccatagacccgtgcaggagaagttcgtgtgcctgaactgcggcttcgagacacacgcagccgagcaagccgccctgaacatcgccagatcctggctgttcctgcggagccaggagtacaagaaataccagacaaacaagacaaccggcaacaccgataagagagccttcgtcgagacctggcagtccttttaccggaagaagcttaaggaggtgtggaaacctgccgtgcggtctggcggatctggcggaggctccacaagcatgaacgccgtgacctacgacgacgtgcacgtggacttcacctgggacgagtgggccctgctggaccccagccagaagaacctgtacaagaacgtgatgctggagacctacaggaacctgaccgccatcggctacaagtgggaggagcacaacatcaacgagaagttccagaggagcaggaggaacaggaggcacgagaggagccacaccggcgagaagagctacgagtgcaaccagtgcggcaccagccccaagaaaaagagaaaagtctaagctgccttctgcggggcttgccttctggccatgcccttcttctctcccttgcacctgtacctcttggtctttgaataaagcctgagtaggaaggctagcaaaaaaaaaaaaaaaaaaaaaaaaaaaaaaaaaaaaaaaaaaaaaaaaaaaaaaaaaaaaaaaaaaaaaaaaaaaaaaaa

SEQ ID NO: 6024 - RNA, 5797 nt, synthetic construct
  source 1..5797: mol_type = other RNA
aggaaataagagagaaaagaagagtaagaagaaatataagagccaccatggcccctaagaagaagcgtaaagtgagccggatggaacgcctcgtctacgaggtgcggcagaagtgcagaaacatcgaggacatctgcatctcctgcggatctctgaacgtgaccctggagcacccactgttcatcggcggcatgtgccagaactgtaaaaactgttttctggagtgtgcctatcaatacgacgatgacggctaccagagctactgcaccatctgttgcggcggaagagaggtgctgatgtgtggaaataacaactgctgccggtgcttctgcgtggaatgcgtggacctgctggtgggccccggcgccgcccaggccgctattaaggaagatccttggaactgctacatgtgcggccacaagggcacatacggcctgctgagacggagagaggactggcctagcagactgcagatgttcttcgccaataaccacgaccaggagttcgacccccctaaggtgtaccctcccgtccccgccgagaagagaaagcccatccgggtcctgagcctgttcgatggcatcgccaccggtctgctggtgctgaaggacctgggcatccaggtggataggtacattgcctccgaggtgtgcgaggactccatcaccgtgggaatggtgcgtcatcagggcaagatcatgtacgtgggcgacgtgcggagcgtgacacagaagcatatccaggagtggggccctttcgacctggtgatcggcggcagcccttgcaatgacctgagcatcgtgaacccagcccggaagggcctgtacgagggaaccggcagactgttcttcgagttttacagactgctgcacgacgcccggcctaaggaaggcgacgaccggcccttcttttggctgttcgagaatgtggtggccatgggagtcagcgacaagcgggatattagccggttcctggagagcaaccccgtgatgatcgatgccaaggaagtgagcgccgcccaccgggccagatacttctggggcaatctgcctggcatgaacagacccctggccagcaccgtgaacgacaagctggagctgcaggagtgcctggagcacggccggatcgccaagttcagcaaggtgagaaccatcaccacccgaagcaacagcatcaaacaaggcaaggaccagcactttcctgtgttcatgaacgagaaggaggacatcctgtggtgtaccgagatggagagagtgttcgggttcccagtccactacacagatgtcagcaacatgtctagactggccagacagagactgctgggaagaagctggtccgtccctgtgatcagacacctgttcgcccctctgaaggagtacttcgcctgcgtgagcagcggcaacagcaacgccaacagccggggccccagcttctctagcggcctggtgccactgtccctgagagggagccacatgggccccatggagatctacaaaaccgtgagcgcctggaagcggcagcctgtgcgcgtgctgagcctgtttcggaatatcgataaagtcctgaaaagcctgggattcctggagagcggctctggctccggcggtggcaccctgaagtacgtggaggatgtgacaaacgtggtcagacgggatgtggagaagtggggccccttcgatctggtgtacggcagcacccaacccctgggcagctcttgtgaccggtgccctggctggtacatgtttcagttccaccggatcctgcagtacgccctgccgagacaggagtcccagcggccattcttttggattttcatggacaacttgctgctgaccgaggatgaccaggaaactaccactcggttcctgcagaccgaagccgtgaccctgcaggacgtgagaggccgggactaccagaacgccatgcgggtgtggtccaacatccctggactgaaaagcaagcacgcacctctgacccctaaagaagaggagtacctgcaggcccaggtgcggagcagaagcaagctggacgcccctaaggtggatctgctggtgaagaattgcctcctgcccctgagagagtacttcaagtatttcagccagaatagtctgcccctgggcggcccaagcagcggcgcccctcctcccagcggcggcagcccagccggctccccaacctctaccgaggagggcacctctgagtccgccacccccgagagcggccctggcacctccaccgagcccagcgagggcagcgcacccggcagccctgccggcagccccacctccacagaggagggaaccagcaccgagcccagcgaaggcagcgccccaggcaccagcaccgagcctagtgagggcggctctggcggcggcagcgcccaggagattaaacggatcaacaagatcagaagaagacttgtgaaagacagcaacaccaagaaggccggcaagacaggccccatgaaaaccctgctggttagagtgatgacacccgatctgagagagcggctggaaaacctgagaaagaagcctgaaaatatcccccagcccatcagcaatacatctagagccaacctgaataagctgctgaccgattacaccgaaatgaagaaggcgatcctgcatgtgtactgggaagagttccagaaggaccctgtgggcctgatgagccgggtggcccagcctgccagcaagaagatcgatcagaacaagctgaaacctgagatggacgagaagggcaacctgaccaccgccggctttgcctgctctcagtgtggccagcccctgttcgtgtacaagctggagcaggtgtctgagaagggcaaggcttacaccaactacttcggacggtgcaatgtggccgagcacgaaaagctgatcctgctggcccagctgaagcccgagaaggatagcgacgaagccgtgacatatagcctgggaaagtttgggcagagggccctggatttctacagcattcatgtgaccaaggagtccacccaccccgtgaagcccctggcccagatcgccggaaacagatacgcctccggacctgtgggaaaggccctgagcgacgcatgtatgggcacaatcgcctccttcctgtctaagtaccaggacatcatcatcgaacaccagaaggtggtgaagggcaaccagaagagactggagagcctgcgggagctggccggcaaggaaaacctggaataccctagcgtgaccctgccacctcagcctcacaccaaggagggcgttgatgcctacaacgaagtgatcgcccgggtgcgaatgtgggtgaacctgaacctgtggcagaagctgaagctaagcagagatgatgccaagcctctgctgagactgaagggattcccttcctttcctctggtcgagagacaggccaacgaagtggactggtgggacatggtgtgtaacgtgaagaagctgatcaacgagaaaaaggaggatggcaaggtgttttggcagaatctggctggctacaagagacaggaagccctgagaccatacctgagcagcgaggaagatcggaagaagggaaagaaattcgctcggtaccagctgggcgacctgctgctgcacctggaaaagaagcacggcgaggactggggaaaggtgtacgacgaggcctgggagcggattgacaagaaagtggaaggcctgagcaagcacatcaagctggaagaggaacggagaagcgaggacgcccagagcaaggccgccctgaccgactggctgcgggctaaggccagcttcgtgatcgagggcctgaaggaggccgacaaggacgagttctgcagatgcgagctgaagctgcagaagtggtacggggacctgcggggaaagcccttcgccatcgaagccgagaacagcatcctggacatcagcggcttcagcaagcagtacaactgtgccttcatctggcagaaggacggcgtgaagaagctgaacctgtacctgatcatcaactacttcaagggcggcaagctgcggttcaagaagatcaaacctgaagccttcgaagccaacagattctacaccgtgatcaacaaaaagagcggcgagatcgtgcccatggaggtgaacttcaacttcgacgaccccaacctgatcatcctgcctctggcctttggcaagagacagggcagagaattcatctggaacgacctgctgtccctggaaaccggcagcctgaagctggccaacggaagagtgatcgagaagacactgtacaacagaagaacccggcaggatgagcctgccctgttcgtggccctgaccttcgagcggcgggaggtcctggactcctccaatatcaaaccaatgaacctgatcggcgtggcaagaggcgaaaacatccccgccgtgatcgccctgaccgaccccgagggctgcccactgagccggtttaaggatagcctgggaaacccaacccacatcctgagaatcggcgagagctataaggagaagcagcggaccatccaggccaagaaggaggtggagcagcggagagccggcggctacagccggaagtacgccagcaaagccaagaatctggcagacgatatggtgagaaacaccgctagagatctgctgtactacgccgtgacccaggatgccatgctgatcttcgccaacctgagccggggcttcggccggcagggcaagcggaccttcatggccgagagacagtacacacggatggaggactggctgaccgccaagctggcctacgagggcctgagcaagacctacctgtccaagacactggcccagtacacctccaagacatgcagcaactgtgggtttaccatcaccagcgccgactacgacagggtgctggagaagctgaagaagacagcaacaggctggatgaccacaattaacggcaaggagctgaaggtggagggccagattacctactacaacagatacaagagacagaacgtagtcaaggacctgtccgtcgagctggatagactgagcgaagaatctgtgaacaacgacatctcctcctggacaaagggcagaagcggagaagctctgagcctcctgaagaaaagattctcccatagacccgtgcaggagaagttcgtgtgcctgaactgcggcttcgagacacacgcagccgagcaagccgccctgaacatcgccagatcctggctgttcctgcggagccaggagtacaagaaataccagacaaacaagacaaccggcaacaccgataagagagccttcgtcgagacctggcagtccttttaccggaagaagcttaaggaggtgtggaaacctgccgtgcggtctggcggatctggcggaggctccacaagcgtgaacgacctggtgaccttcaaggacgtggccatcgacttcagccaggaggagtggcagtggatgaaccccgcccagaagaggctgtacaggagcatgatgctggagaactaccagagcctggtgagcctgggcctgtgcgtgagcaagccctacgtgatcagcctgctggagcagggcagggagccctgggagatgaccagcgagatgaggaggagccccttcagcgactgggagagcatcaccagccccaagaaaaagagaaaagtctaagctgccttctgcggggcttgccttctggccatgcccttcttctctcccttgcacctgtacctcttggtctttgaataaagcctgagtaggaaggctagcaaaaaaaaaaaaaaaaaaaaaaaaaaaaaaaaaaaaaaaaaaaaaaaaaaaaaaaaaaaaaaaaaaaaaaaaaaaaaaaa

SEQ ID NO: 6025 - RNA, 5806 nt, synthetic construct
  source 1..5806: mol_type = other RNA
aggaaataagagagaaaagaagagtaagaagaaatataagagccaccatggcccctaagaagaagcgtaaagtgagccggatggaacgcctcgtctacgaggtgcggcagaagtgcagaaacatcgaggacatctgcatctcctgcggatctctgaacgtgaccctggagcacccactgttcatcggcggcatgtgccagaactgtaaaaactgttttctggagtgtgcctatcaatacgacgatgacggctaccagagctactgcaccatctgttgcggcggaagagaggtgctgatgtgtggaaataacaactgctgccggtgcttctgcgtggaatgcgtggacctgctggtgggccccggcgccgcccaggccgctattaaggaagatccttggaactgctacatgtgcggccacaagggcacatacggcctgctgagacggagagaggactggcctagcagactgcagatgttcttcgccaataaccacgaccaggagttcgacccccctaaggtgtaccctcccgtccccgccgagaagagaaagcccatccgggtcctgagcctgttcgatggcatcgccaccggtctgctggtgctgaaggacctgggcatccaggtggataggtacattgcctccgaggtgtgcgaggactccatcaccgtgggaatggtgcgtcatcagggcaagatcatgtacgtgggcgacgtgcggagcgtgacacagaagcatatccaggagtggggccctttcgacctggtgatcggcggcagcccttgcaatgacctgagcatcgtgaacccagcccggaagggcctgtacgagggaaccggcagactgttcttcgagttttacagactgctgcacgacgcccggcctaaggaaggcgacgaccggcccttcttttggctgttcgagaatgtggtggccatgggagtcagcgacaagcgggatattagccggttcctggagagcaaccccgtgatgatcgatgccaaggaagtgagcgccgcccaccgggccagatacttctggggcaatctgcctggcatgaacagacccctggccagcaccgtgaacgacaagctggagctgcaggagtgcctggagcacggccggatcgccaagttcagcaaggtgagaaccatcaccacccgaagcaacagcatcaaacaaggcaaggaccagcactttcctgtgttcatgaacgagaaggaggacatcctgtggtgtaccgagatggagagagtgttcgggttcccagtccactacacagatgtcagcaacatgtctagactggccagacagagactgctgggaagaagctggtccgtccctgtgatcagacacctgttcgcccctctgaaggagtacttcgcctgcgtgagcagcggcaacagcaacgccaacagccggggccccagcttctctagcggcctggtgccactgtccctgagagggagccacatgggccccatggagatctacaaaaccgtgagcgcctggaagcggcagcctgtgcgcgtgctgagcctgtttcggaatatcgataaagtcctgaaaagcctgggattcctggagagcggctctggctccggcggtggcaccctgaagtacgtggaggatgtgacaaacgtggtcagacgggatgtggagaagtggggccccttcgatctggtgtacggcagcacccaacccctgggcagctcttgtgaccggtgccctggctggtacatgtttcagttccaccggatcctgcagtacgccctgccgagacaggagtcccagcggccattcttttggattttcatggacaacttgctgctgaccgaggatgaccaggaaactaccactcggttcctgcagaccgaagccgtgaccctgcaggacgtgagaggccgggactaccagaacgccatgcgggtgtggtccaacatccctggactgaaaagcaagcacgcacctctgacccctaaagaagaggagtacctgcaggcccaggtgcggagcagaagcaagctggacgcccctaaggtggatctgctggtgaagaattgcctcctgcccctgagagagtacttcaagtatttcagccagaatagtctgcccctgggcggcccaagcagcggcgcccctcctcccagcggcggcagcccagccggctccccaacctctaccgaggagggcacctctgagtccgccacccccgagagcggccctggcacctccaccgagcccagcgagggcagcgcacccggcagccctgccggcagccccacctccacagaggagggaaccagcaccgagcccagcgaaggcagcgccccaggcaccagcaccgagcctagtgagggcggctctggcggcggcagcgcccaggagattaaacggatcaacaagatcagaagaagacttgtgaaagacagcaacaccaagaaggccggcaagacaggccccatgaaaaccctgctggttagagtgatgacacccgatctgagagagcggctggaaaacctgagaaagaagcctgaaaatatcccccagcccatcagcaatacatctagagccaacctgaataagctgctgaccgattacaccgaaatgaagaaggcgatcctgcatgtgtactgggaagagttccagaaggaccctgtgggcctgatgagccgggtggcccagcctgccagcaagaagatcgatcagaacaagctgaaacctgagatggacgagaagggcaacctgaccaccgccggctttgcctgctctcagtgtggccagcccctgttcgtgtacaagctggagcaggtgtctgagaagggcaaggcttacaccaactacttcggacggtgcaatgtggccgagcacgaaaagctgatcctgctggcccagctgaagcccgagaaggatagcgacgaagccgtgacatatagcctgggaaagtttgggcagagggccctggatttctacagcattcatgtgaccaaggagtccacccaccccgtgaagcccctggcccagatcgccggaaacagatacgcctccggacctgtgggaaaggccctgagcgacgcatgtatgggcacaatcgcctccttcctgtctaagtaccaggacatcatcatcgaacaccagaaggtggtgaagggcaaccagaagagactggagagcctgcgggagctggccggcaaggaaaacctggaataccctagcgtgaccctgccacctcagcctcacaccaaggagggcgttgatgcctacaacgaagtgatcgcccgggtgcgaatgtgggtgaacctgaacctgtggcagaagctgaagctaagcagagatgatgccaagcctctgctgagactgaagggattcccttcctttcctctggtcgagagacaggccaacgaagtggactggtgggacatggtgtgtaacgtgaagaagctgatcaacgagaaaaaggaggatggcaaggtgttttggcagaatctggctggctacaagagacaggaagccctgagaccatacctgagcagcgaggaagatcggaagaagggaaagaaattcgctcggtaccagctgggcgacctgctgctgcacctggaaaagaagcacggcgaggactggggaaaggtgtacgacgaggcctgggagcggattgacaagaaagtggaaggcctgagcaagcacatcaagctggaagaggaacggagaagcgaggacgcccagagcaaggccgccctgaccgactggctgcgggctaaggccagcttcgtgatcgagggcctgaaggaggccgacaaggacgagttctgcagatgcgagctgaagctgcagaagtggtacggggacctgcggggaaagcccttcgccatcgaagccgagaacagcatcctggacatcagcggcttcagcaagcagtacaactgtgccttcatctggcagaaggacggcgtgaagaagctgaacctgtacctgatcatcaactacttcaagggcggcaagctgcggttcaagaagatcaaacctgaagccttcgaagccaacagattctacaccgtgatcaacaaaaagagcggcgagatcgtgcccatggaggtgaacttcaacttcgacgaccccaacctgatcatcctgcctctggcctttggcaagagacagggcagagaattcatctggaacgacctgctgtccctggaaaccggcagcctgaagctggccaacggaagagtgatcgagaagacactgtacaacagaagaacccggcaggatgagcctgccctgttcgtggccctgaccttcgagcggcgggaggtcctggactcctccaatatcaaaccaatgaacctgatcggcgtggcaagaggcgaaaacatccccgccgtgatcgccctgaccgaccccgagggctgcccactgagccggtttaaggatagcctgggaaacccaacccacatcctgagaatcggcgagagctataaggagaagcagcggaccatccaggccaagaaggaggtggagcagcggagagccggcggctacagccggaagtacgccagcaaagccaagaatctggcagacgatatggtgagaaacaccgctagagatctgctgtactacgccgtgacccaggatgccatgctgatcttcgccaacctgagccggggcttcggccggcagggcaagcggaccttcatggccgagagacagtacacacggatggaggactggctgaccgccaagctggcctacgagggcctgagcaagacctacctgtccaagacactggcccagtacacctccaagacatgcagcaactgtgggtttaccatcaccagcgccgactacgacagggtgctggagaagctgaagaagacagcaacaggctggatgaccacaattaacggcaaggagctgaaggtggagggccagattacctactacaacagatacaagagacagaacgtagtcaaggacctgtccgtcgagctggatagactgagcgaagaatctgtgaacaacgacatctcctcctggacaaagggcagaagcggagaagctctgagcctcctgaagaaaagattctcccatagacccgtgcaggagaagttcgtgtgcctgaactgcggcttcgagacacacgcagccgagcaagccgccctgaacatcgccagatcctggctgttcctgcggagccaggagtacaagaaataccagacaaacaagacaaccggcaacaccgataagagagccttcgtcgagacctggcagtccttttaccggaagaagcttaaggaggtgtggaaacctgccgtgcggtctggcggatctggcggaggctccacaagcatcacctacgacgacgtgcacgtgaacttcacctgggaggagtggaccctgctggaccccttccagaagaacctgtacaaggacgtgatgctggagacctacaggaacctgaccaccatcggctacagctgggaggacagcaacatcgaggtgcactgccagagcagcggcaggcacgagaggcacgagaggagccacaccggcgagaagcccagcgtgtacacccagtgcgtggagaccttcgcccaccacaccagccccaagaaaaagagaaaagtctaagctgccttctgcggggcttgccttctggccatgcccttcttctctcccttgcacctgtacctcttggtctttgaataaagcctgagtaggaaggctagcaaaaaaaaaaaaaaaaaaaaaaaaaaaaaaaaaaaaaaaaaaaaaaaaaaaaaaaaaaaaaaaaaaaaaaaaaaaaaaaa

SEQ ID NO: 6026 - RNA, 5797 nt, synthetic construct
  source 1..5797: mol_type = other RNA
aggaaataagagagaaaagaagagtaagaagaaatataagagccaccatggcccctaagaagaagcgtaaagtgagccggatggaacgcctcgtctacgaggtgcggcagaagtgcagaaacatcgaggacatctgcatctcctgcggatctctgaacgtgaccctggagcacccactgttcatcggcggcatgtgccagaactgtaaaaactgttttctggagtgtgcctatcaatacgacgatgacggctaccagagctactgcaccatctgttgcggcggaagagaggtgctgatgtgtggaaataacaactgctgccggtgcttctgcgtggaatgcgtggacctgctggtgggccccggcgccgcccaggccgctattaaggaagatccttggaactgctacatgtgcggccacaagggcacatacggcctgctgagacggagagaggactggcctagcagactgcagatgttcttcgccaataaccacgaccaggagttcgacccccctaaggtgtaccctcccgtccccgccgagaagagaaagcccatccgggtcctgagcctgttcgatggcatcgccaccggtctgctggtgctgaaggacctgggcatccaggtggataggtacattgcctccgaggtgtgcgaggactccatcaccgtgggaatggtgcgtcatcagggcaagatcatgtacgtgggcgacgtgcggagcgtgacacagaagcatatccaggagtggggccctttcgacctggtgatcggcggcagcccttgcaatgacctgagcatcgtgaacccagcccggaagggcctgtacgagggaaccggcagactgttcttcgagttttacagactgctgcacgacgcccggcctaaggaaggcgacgaccggcccttcttttggctgttcgagaatgtggtggccatgggagtcagcgacaagcgggatattagccggttcctggagagcaaccccgtgatgatcgatgccaaggaagtgagcgccgcccaccgggccagatacttctggggcaatctgcctggcatgaacagacccctggccagcaccgtgaacgacaagctggagctgcaggagtgcctggagcacggccggatcgccaagttcagcaaggtgagaaccatcaccacccgaagcaacagcatcaaacaaggcaaggaccagcactttcctgtgttcatgaacgagaaggaggacatcctgtggtgtaccgagatggagagagtgttcgggttcccagtccactacacagatgtcagcaacatgtctagactggccagacagagactgctgggaagaagctggtccgtccctgtgatcagacacctgttcgcccctctgaaggagtacttcgcctgcgtgagcagcggcaacagcaacgccaacagccggggccccagcttctctagcggcctggtgccactgtccctgagagggagccacatgggccccatggagatctacaaaaccgtgagcgcctggaagcggcagcctgtgcgcgtgctgagcctgtttcggaatatcgataaagtcctgaaaagcctgggattcctggagagcggctctggctccggcggtggcaccctgaagtacgtggaggatgtgacaaacgtggtcagacgggatgtggagaagtggggccccttcgatctggtgtacggcagcacccaacccctgggcagctcttgtgaccggtgccctggctggtacatgtttcagttccaccggatcctgcagtacgccctgccgagacaggagtcccagcggccattcttttggattttcatggacaacttgctgctgaccgaggatgaccaggaaactaccactcggttcctgcagaccgaagccgtgaccctgcaggacgtgagaggccgggactaccagaacgccatgcgggtgtggtccaacatccctggactgaaaagcaagcacgcacctctgacccctaaagaagaggagtacctgcaggcccaggtgcggagcagaagcaagctggacgcccctaaggtggatctgctggtgaagaattgcctcctgcccctgagagagtacttcaagtatttcagccagaatagtctgcccctgggcggcccaagcagcggcgcccctcctcccagcggcggcagcccagccggctccccaacctctaccgaggagggcacctctgagtccgccacccccgagagcggccctggcacctccaccgagcccagcgagggcagcgcacccggcagccctgccggcagccccacctccacagaggagggaaccagcaccgagcccagcgaaggcagcgccccaggcaccagcaccgagcctagtgagggcggctctggcggcggcagcgcccaggagattaaacggatcaacaagatcagaagaagacttgtgaaagacagcaacaccaagaaggccggcaagacaggccccatgaaaaccctgctggttagagtgatgacacccgatctgagagagcggctggaaaacctgagaaagaagcctgaaaatatcccccagcccatcagcaatacatctagagccaacctgaataagctgctgaccgattacaccgaaatgaagaaggcgatcctgcatgtgtactgggaagagttccagaaggaccctgtgggcctgatgagccgggtggcccagcctgccagcaagaagatcgatcagaacaagctgaaacctgagatggacgagaagggcaacctgaccaccgccggctttgcctgctctcagtgtggccagcccctgttcgtgtacaagctggagcaggtgtctgagaagggcaaggcttacaccaactacttcggacggtgcaatgtggccgagcacgaaaagctgatcctgctggcccagctgaagcccgagaaggatagcgacgaagccgtgacatatagcctgggaaagtttgggcagagggccctggatttctacagcattcatgtgaccaaggagtccacccaccccgtgaagcccctggcccagatcgccggaaacagatacgcctccggacctgtgggaaaggccctgagcgacgcatgtatgggcacaatcgcctccttcctgtctaagtaccaggacatcatcatcgaacaccagaaggtggtgaagggcaaccagaagagactggagagcctgcgggagctggccggcaaggaaaacctggaataccctagcgtgaccctgccacctcagcctcacaccaaggagggcgttgatgcctacaacgaagtgatcgcccgggtgcgaatgtgggtgaacctgaacctgtggcagaagctgaagctaagcagagatgatgccaagcctctgctgagactgaagggattcccttcctttcctctggtcgagagacaggccaacgaagtggactggtgggacatggtgtgtaacgtgaagaagctgatcaacgagaaaaaggaggatggcaaggtgttttggcagaatctggctggctacaagagacaggaagccctgagaccatacctgagcagcgaggaagatcggaagaagggaaagaaattcgctcggtaccagctgggcgacctgctgctgcacctggaaaagaagcacggcgaggactggggaaaggtgtacgacgaggcctgggagcggattgacaagaaagtggaaggcctgagcaagcacatcaagctggaagaggaacggagaagcgaggacgcccagagcaaggccgccctgaccgactggctgcgggctaaggccagcttcgtgatcgagggcctgaaggaggccgacaaggacgagttctgcagatgcgagctgaagctgcagaagtggtacggggacctgcggggaaagcccttcgccatcgaagccgagaacagcatcctggacatcagcggcttcagcaagcagtacaactgtgccttcatctggcagaaggacggcgtgaagaagctgaacctgtacctgatcatcaactacttcaagggcggcaagctgcggttcaagaagatcaaacctgaagccttcgaagccaacagattctacaccgtgatcaacaaaaagagcggcgagatcgtgcccatggaggtgaacttcaacttcgacgaccccaacctgatcatcctgcctctggcctttggcaagagacagggcagagaattcatctggaacgacctgctgtccctggaaaccggcagcctgaagctggccaacggaagagtgatcgagaagacactgtacaacagaagaacccggcaggatgagcctgccctgttcgtggccctgaccttcgagcggcgggaggtcctggactcctccaatatcaaaccaatgaacctgatcggcgtggcaagaggcgaaaacatccccgccgtgatcgccctgaccgaccccgagggctgcccactgagccggtttaaggatagcctgggaaacccaacccacatcctgagaatcggcgagagctataaggagaagcagcggaccatccaggccaagaaggaggtggagcagcggagagccggcggctacagccggaagtacgccagcaaagccaagaatctggcagacgatatggtgagaaacaccgctagagatctgctgtactacgccgtgacccaggatgccatgctgatcttcgccaacctgagccggggcttcggccggcagggcaagcggaccttcatggccgagagacagtacacacggatggaggactggctgaccgccaagctggcctacgagggcctgagcaagacctacctgtccaagacactggcccagtacacctccaagacatgcagcaactgtgggtttaccatcaccagcgccgactacgacagggtgctggagaagctgaagaagacagcaacaggctggatgaccacaattaacggcaaggagctgaaggtggagggccagattacctactacaacagatacaagagacagaacgtagtcaaggacctgtccgtcgagctggatagactgagcgaagaatctgtgaacaacgacatctcctcctggacaaagggcagaagcggagaagctctgagcctcctgaagaaaagattctcccatagacccgtgcaggagaagttcgtgtgcctgaactgcggcttcgagacacacgcagccgagcaagccgccctgaacatcgccagatcctggctgttcctgcggagccaggagtacaagaaataccagacaaacaagacaaccggcaacaccgataagagagccttcgtcgagacctggcagtccttttaccggaagaagcttaaggaggtgtggaaacctgccgtgcggtctggcggatctggcggaggctccacaagcgacgccgtgacctaccaggacctgcacatcaccttcacccaggaggagtgggccctgctggacagcagccagaggaacctgtacaaggacgtgatgctggagacctacatgaacctgaacgccatcggctacaagtgggaggacaacgacatcgagcagcactgcaggagcccccagaggcacggcaggcacgagaggagccccaccagggagaagcccagcgcctacatgcagtgcgacaagaccagccccaagaaaaagagaaaagtctaagctgccttctgcggggcttgccttctggccatgcccttcttctctcccttgcacctgtacctcttggtctttgaataaagcctgagtaggaaggctagcaaaaaaaaaaaaaaaaaaaaaaaaaaaaaaaaaaaaaaaaaaaaaaaaaaaaaaaaaaaaaaaaaaaaaaaaaaaaaaaa

SEQ ID NO: 6027 - RNA, 5797 nt, synthetic construct
  source 1..5797: mol_type = other RNA
aggaaataagagagaaaagaagagtaagaagaaatataagagccaccatggcccctaagaagaagcgtaaagtgagccggatggaacgcctcgtctacgaggtgcggcagaagtgcagaaacatcgaggacatctgcatctcctgcggatctctgaacgtgaccctggagcacccactgttcatcggcggcatgtgccagaactgtaaaaactgttttctggagtgtgcctatcaatacgacgatgacggctaccagagctactgcaccatctgttgcggcggaagagaggtgctgatgtgtggaaataacaactgctgccggtgcttctgcgtggaatgcgtggacctgctggtgggccccggcgccgcccaggccgctattaaggaagatccttggaactgctacatgtgcggccacaagggcacatacggcctgctgagacggagagaggactggcctagcagactgcagatgttcttcgccaataaccacgaccaggagttcgacccccctaaggtgtaccctcccgtccccgccgagaagagaaagcccatccgggtcctgagcctgttcgatggcatcgccaccggtctgctggtgctgaaggacctgggcatccaggtggataggtacattgcctccgaggtgtgcgaggactccatcaccgtgggaatggtgcgtcatcagggcaagatcatgtacgtgggcgacgtgcggagcgtgacacagaagcatatccaggagtggggccctttcgacctggtgatcggcggcagcccttgcaatgacctgagcatcgtgaacccagcccggaagggcctgtacgagggaaccggcagactgttcttcgagttttacagactgctgcacgacgcccggcctaaggaaggcgacgaccggcccttcttttggctgttcgagaatgtggtggccatgggagtcagcgacaagcgggatattagccggttcctggagagcaaccccgtgatgatcgatgccaaggaagtgagcgccgcccaccgggccagatacttctggggcaatctgcctggcatgaacagacccctggccagcaccgtgaacgacaagctggagctgcaggagtgcctggagcacggccggatcgccaagttcagcaaggtgagaaccatcaccacccgaagcaacagcatcaaacaaggcaaggaccagcactttcctgtgttcatgaacgagaaggaggacatcctgtggtgtaccgagatggagagagtgttcgggttcccagtccactacacagatgtcagcaacatgtctagactggccagacagagactgctgggaagaagctggtccgtccctgtgatcagacacctgttcgcccctctgaaggagtacttcgcctgcgtgagcagcggcaacagcaacgccaacagccggggccccagcttctctagcggcctggtgccactgtccctgagagggagccacatgggccccatggagatctacaaaaccgtgagcgcctggaagcggcagcctgtgcgcgtgctgagcctgtttcggaatatcgataaagtcctgaaaagcctgggattcctggagagcggctctggctccggcggtggcaccctgaagtacgtggaggatgtgacaaacgtggtcagacgggatgtggagaagtggggccccttcgatctggtgtacggcagcacccaacccctgggcagctcttgtgaccggtgccctggctggtacatgtttcagttccaccggatcctgcagtacgccctgccgagacaggagtcccagcggccattcttttggattttcatggacaacttgctgctgaccgaggatgaccaggaaactaccactcggttcctgcagaccgaagccgtgaccctgcaggacgtgagaggccgggactaccagaacgccatgcgggtgtggtccaacatccctggactgaaaagcaagcacgcacctctgacccctaaagaagaggagtacctgcaggcccaggtgcggagcagaagcaagctggacgcccctaaggtggatctgctggtgaagaattgcctcctgcccctgagagagtacttcaagtatttcagccagaatagtctgcccctgggcggcccaagcagcggcgcccctcctcccagcggcggcagcccagccggctccccaacctctaccgaggagggcacctctgagtccgccacccccgagagcggccctggcacctccaccgagcccagcgagggcagcgcacccggcagccctgccggcagccccacctccacagaggagggaaccagcaccgagcccagcgaaggcagcgccccaggcaccagcaccgagcctagtgagggcggctctggcggcggcagcgcccaggagattaaacggatcaacaagatcagaagaagacttgtgaaagacagcaacaccaagaaggccggcaagacaggccccatgaaaaccctgctggttagagtgatgacacccgatctgagagagcggctggaaaacctgagaaagaagcctgaaaatatcccccagcccatcagcaatacatctagagccaacctgaataagctgctgaccgattacaccgaaatgaagaaggcgatcctgcatgtgtactgggaagagttccagaaggaccctgtgggcctgatgagccgggtggcccagcctgccagcaagaagatcgatcagaacaagctgaaacctgagatggacgagaagggcaacctgaccaccgccggctttgcctgctctcagtgtggccagcccctgttcgtgtacaagctggagcaggtgtctgagaagggcaaggcttacaccaactacttcggacggtgcaatgtggccgagcacgaaaagctgatcctgctggcccagctgaagcccgagaaggatagcgacgaagccgtgacatatagcctgggaaagtttgggcagagggccctggatttctacagcattcatgtgaccaaggagtccacccaccccgtgaagcccctggcccagatcgccggaaacagatacgcctccggacctgtgggaaaggccctgagcgacgcatgtatgggcacaatcgcctccttcctgtctaagtaccaggacatcatcatcgaacaccagaaggtggtgaagggcaaccagaagagactggagagcctgcgggagctggccggcaaggaaaacctggaataccctagcgtgaccctgccacctcagcctcacaccaaggagggcgttgatgcctacaacgaagtgatcgcccgggtgcgaatgtgggtgaacctgaacctgtggcagaagctgaagctaagcagagatgatgccaagcctctgctgagactgaagggattcccttcctttcctctggtcgagagacaggccaacgaagtggactggtgggacatggtgtgtaacgtgaagaagctgatcaacgagaaaaaggaggatggcaaggtgttttggcagaatctggctggctacaagagacaggaagccctgagaccatacctgagcagcgaggaagatcggaagaagggaaagaaattcgctcggtaccagctgggcgacctgctgctgcacctggaaaagaagcacggcgaggactggggaaaggtgtacgacgaggcctgggagcggattgacaagaaagtggaaggcctgagcaagcacatcaagctggaagaggaacggagaagcgaggacgcccagagcaaggccgccctgaccgactggctgcgggctaaggccagcttcgtgatcgagggcctgaaggaggccgacaaggacgagttctgcagatgcgagctgaagctgcagaagtggtacggggacctgcggggaaagcccttcgccatcgaagccgagaacagcatcctggacatcagcggcttcagcaagcagtacaactgtgccttcatctggcagaaggacggcgtgaagaagctgaacctgtacctgatcatcaactacttcaagggcggcaagctgcggttcaagaagatcaaacctgaagccttcgaagccaacagattctacaccgtgatcaacaaaaagagcggcgagatcgtgcccatggaggtgaacttcaacttcgacgaccccaacctgatcatcctgcctctggcctttggcaagagacagggcagagaattcatctggaacgacctgctgtccctggaaaccggcagcctgaagctggccaacggaagagtgatcgagaagacactgtacaacagaagaacccggcaggatgagcctgccctgttcgtggccctgaccttcgagcggcgggaggtcctggactcctccaatatcaaaccaatgaacctgatcggcgtggcaagaggcgaaaacatccccgccgtgatcgccctgaccgaccccgagggctgcccactgagccggtttaaggatagcctgggaaacccaacccacatcctgagaatcggcgagagctataaggagaagcagcggaccatccaggccaagaaggaggtggagcagcggagagccggcggctacagccggaagtacgccagcaaagccaagaatctggcagacgatatggtgagaaacaccgctagagatctgctgtactacgccgtgacccaggatgccatgctgatcttcgccaacctgagccggggcttcggccggcagggcaagcggaccttcatggccgagagacagtacacacggatggaggactggctgaccgccaagctggcctacgagggcctgagcaagacctacctgtccaagacactggcccagtacacctccaagacatgcagcaactgtgggtttaccatcaccagcgccgactacgacagggtgctggagaagctgaagaagacagcaacaggctggatgaccacaattaacggcaaggagctgaaggtggagggccagattacctactacaacagatacaagagacagaacgtagtcaaggacctgtccgtcgagctggatagactgagcgaagaatctgtgaacaacgacatctcctcctggacaaagggcagaagcggagaagctctgagcctcctgaagaaaagattctcccatagacccgtgcaggagaagttcgtgtgcctgaactgcggcttcgagacacacgcagccgagcaagccgccctgaacatcgccagatcctggctgttcctgcggagccaggagtacaagaaataccagacaaacaagacaaccggcaacaccgataagagagccttcgtcgagacctggcagtccttttaccggaagaagcttaaggaggtgtggaaacctgccgtgcggtctggcggatctggcggaggctccacaagcagccagagcctggtgaccttcggcgacgtggccgtggacttcagcagggaggagtgggagtggctgagcagcgcccagaggaacctgtacaggaccgtgatgctggagaactacaggaacctggtgagcctgggcctgtgcatcagcaagcccgagatgatcagcagcctggagcagaggaaggagccctggatggccaagaggaggctgaccaggggcaggtgccccgacctgaagatcgtgaccagccccaagaaaaagagaaaagtctaagctgccttctgcggggcttgccttctggccatgcccttcttctctcccttgcacctgtacctcttggtctttgaataaagcctgagtaggaaggctagcaaaaaaaaaaaaaaaaaaaaaaaaaaaaaaaaaaaaaaaaaaaaaaaaaaaaaaaaaaaaaaaaaaaaaaaaaaaaaaaa

SEQ ID NO: 6028 - RNA, 5797 nt, synthetic construct
  source 1..5797: mol_type = other RNA
aggaaataagagagaaaagaagagtaagaagaaatataagagccaccatggcccctaagaagaagcgtaaagtgagccggatggaacgcctcgtctacgaggtgcggcagaagtgcagaaacatcgaggacatctgcatctcctgcggatctctgaacgtgaccctggagcacccactgttcatcggcggcatgtgccagaactgtaaaaactgttttctggagtgtgcctatcaatacgacgatgacggctaccagagctactgcaccatctgttgcggcggaagagaggtgctgatgtgtggaaataacaactgctgccggtgcttctgcgtggaatgcgtggacctgctggtgggccccggcgccgcccaggccgctattaaggaagatccttggaactgctacatgtgcggccacaagggcacatacggcctgctgagacggagagaggactggcctagcagactgcagatgttcttcgccaataaccacgaccaggagttcgacccccctaaggtgtaccctcccgtccccgccgagaagagaaagcccatccgggtcctgagcctgttcgatggcatcgccaccggtctgctggtgctgaaggacctgggcatccaggtggataggtacattgcctccgaggtgtgcgaggactccatcaccgtgggaatggtgcgtcatcagggcaagatcatgtacgtgggcgacgtgcggagcgtgacacagaagcatatccaggagtggggccctttcgacctggtgatcggcggcagcccttgcaatgacctgagcatcgtgaacccagcccggaagggcctgtacgagggaaccggcagactgttcttcgagttttacagactgctgcacgacgcccggcctaaggaaggcgacgaccggcccttcttttggctgttcgagaatgtggtggccatgggagtcagcgacaagcgggatattagccggttcctggagagcaaccccgtgatgatcgatgccaaggaagtgagcgccgcccaccgggccagatacttctggggcaatctgcctggcatgaacagacccctggccagcaccgtgaacgacaagctggagctgcaggagtgcctggagcacggccggatcgccaagttcagcaaggtgagaaccatcaccacccgaagcaacagcatcaaacaaggcaaggaccagcactttcctgtgttcatgaacgagaaggaggacatcctgtggtgtaccgagatggagagagtgttcgggttcccagtccactacacagatgtcagcaacatgtctagactggccagacagagactgctgggaagaagctggtccgtccctgtgatcagacacctgttcgcccctctgaaggagtacttcgcctgcgtgagcagcggcaacagcaacgccaacagccggggccccagcttctctagcggcctggtgccactgtccctgagagggagccacatgggccccatggagatctacaaaaccgtgagcgcctggaagcggcagcctgtgcgcgtgctgagcctgtttcggaatatcgataaagtcctgaaaagcctgggattcctggagagcggctctggctccggcggtggcaccctgaagtacgtggaggatgtgacaaacgtggtcagacgggatgtggagaagtggggccccttcgatctggtgtacggcagcacccaacccctgggcagctcttgtgaccggtgccctggctggtacatgtttcagttccaccggatcctgcagtacgccctgccgagacaggagtcccagcggccattcttttggattttcatggacaacttgctgctgaccgaggatgaccaggaaactaccactcggttcctgcagaccgaagccgtgaccctgcaggacgtgagaggccgggactaccagaacgccatgcgggtgtggtccaacatccctggactgaaaagcaagcacgcacctctgacccctaaagaagaggagtacctgcaggcccaggtgcggagcagaagcaagctggacgcccctaaggtggatctgctggtgaagaattgcctcctgcccctgagagagtacttcaagtatttcagccagaatagtctgcccctgggcggcccaagcagcggcgcccctcctcccagcggcggcagcccagccggctccccaacctctaccgaggagggcacctctgagtccgccacccccgagagcggccctggcacctccaccgagcccagcgagggcagcgcacccggcagccctgccggcagccccacctccacagaggagggaaccagcaccgagcccagcgaaggcagcgccccaggcaccagcaccgagcctagtgagggcggctctggcggcggcagcgcccaggagattaaacggatcaacaagatcagaagaagacttgtgaaagacagcaacaccaagaaggccggcaagacaggccccatgaaaaccctgctggttagagtgatgacacccgatctgagagagcggctggaaaacctgagaaagaagcctgaaaatatcccccagcccatcagcaatacatctagagccaacctgaataagctgctgaccgattacaccgaaatgaagaaggcgatcctgcatgtgtactgggaagagttccagaaggaccctgtgggcctgatgagccgggtggcccagcctgccagcaagaagatcgatcagaacaagctgaaacctgagatggacgagaagggcaacctgaccaccgccggctttgcctgctctcagtgtggccagcccctgttcgtgtacaagctggagcaggtgtctgagaagggcaaggcttacaccaactacttcggacggtgcaatgtggccgagcacgaaaagctgatcctgctggcccagctgaagcccgagaaggatagcgacgaagccgtgacatatagcctgggaaagtttgggcagagggccctggatttctacagcattcatgtgaccaaggagtccacccaccccgtgaagcccctggcccagatcgccggaaacagatacgcctccggacctgtgggaaaggccctgagcgacgcatgtatgggcacaatcgcctccttcctgtctaagtaccaggacatcatcatcgaacaccagaaggtggtgaagggcaaccagaagagactggagagcctgcgggagctggccggcaaggaaaacctggaataccctagcgtgaccctgccacctcagcctcacaccaaggagggcgttgatgcctacaacgaagtgatcgcccgggtgcgaatgtgggtgaacctgaacctgtggcagaagctgaagctaagcagagatgatgccaagcctctgctgagactgaagggattcccttcctttcctctggtcgagagacaggccaacgaagtggactggtgggacatggtgtgtaacgtgaagaagctgatcaacgagaaaaaggaggatggcaaggtgttttggcagaatctggctggctacaagagacaggaagccctgagaccatacctgagcagcgaggaagatcggaagaagggaaagaaattcgctcggtaccagctgggcgacctgctgctgcacctggaaaagaagcacggcgaggactggggaaaggtgtacgacgaggcctgggagcggattgacaagaaagtggaaggcctgagcaagcacatcaagctggaagaggaacggagaagcgaggacgcccagagcaaggccgccctgaccgactggctgcgggctaaggccagcttcgtgatcgagggcctgaaggaggccgacaaggacgagttctgcagatgcgagctgaagctgcagaagtggtacggggacctgcggggaaagcccttcgccatcgaagccgagaacagcatcctggacatcagcggcttcagcaagcagtacaactgtgccttcatctggcagaaggacggcgtgaagaagctgaacctgtacctgatcatcaactacttcaagggcggcaagctgcggttcaagaagatcaaacctgaagccttcgaagccaacagattctacaccgtgatcaacaaaaagagcggcgagatcgtgcccatggaggtgaacttcaacttcgacgaccccaacctgatcatcctgcctctggcctttggcaagagacagggcagagaattcatctggaacgacctgctgtccctggaaaccggcagcctgaagctggccaacggaagagtgatcgagaagacactgtacaacagaagaacccggcaggatgagcctgccctgttcgtggccctgaccttcgagcggcgggaggtcctggactcctccaatatcaaaccaatgaacctgatcggcgtggcaagaggcgaaaacatccccgccgtgatcgccctgaccgaccccgagggctgcccactgagccggtttaaggatagcctgggaaacccaacccacatcctgagaatcggcgagagctataaggagaagcagcggaccatccaggccaagaaggaggtggagcagcggagagccggcggctacagccggaagtacgccagcaaagccaagaatctggcagacgatatggtgagaaacaccgctagagatctgctgtactacgccgtgacccaggatgccatgctgatcttcgccaacctgagccggggcttcggccggcagggcaagcggaccttcatggccgagagacagtacacacggatggaggactggctgaccgccaagctggcctacgagggcctgagcaagacctacctgtccaagacactggcccagtacacctccaagacatgcagcaactgtgggtttaccatcaccagcgccgactacgacagggtgctggagaagctgaagaagacagcaacaggctggatgaccacaattaacggcaaggagctgaaggtggagggccagattacctactacaacagatacaagagacagaacgtagtcaaggacctgtccgtcgagctggatagactgagcgaagaatctgtgaacaacgacatctcctcctggacaaagggcagaagcggagaagctctgagcctcctgaagaaaagattctcccatagacccgtgcaggagaagttcgtgtgcctgaactgcggcttcgagacacacgcagccgagcaagccgccctgaacatcgccagatcctggctgttcctgcggagccaggagtacaagaaataccagacaaacaagacaaccggcaacaccgataagagagccttcgtcgagacctggcagtccttttaccggaagaagcttaaggaggtgtggaaacctgccgtgcggtctggcggatctggcggaggctccacaagcagccagggcctggtgagcttcaaggacgtggccgtggacttcacccaggacgagtggcagcagctggaccccgcccagaggaccctgtacagggacgtgatgctggagaactacagccacctggtgagcatgggctaccccgtgagcaagcccgacgtgatcagcaagctggagcagggcgaggacccctggatcatcaagagggacatcagcaactggatctaccccgacgagaaccaggccaccagccccaagaaaaagagaaaagtctaagctgccttctgcggggcttgccttctggccatgcccttcttctctcccttgcacctgtacctcttggtctttgaataaagcctgagtaggaaggctagcaaaaaaaaaaaaaaaaaaaaaaaaaaaaaaaaaaaaaaaaaaaaaaaaaaaaaaaaaaaaaaaaaaaaaaaaaaaaaaaa

SEQ ID NO: 6029 - RNA, 5797 nt, synthetic construct
  source 1..5797: mol_type = other RNA
aggaaataagagagaaaagaagagtaagaagaaatataagagccaccatggcccctaagaagaagcgtaaagtgagccggatggaacgcctcgtctacgaggtgcggcagaagtgcagaaacatcgaggacatctgcatctcctgcggatctctgaacgtgaccctggagcacccactgttcatcggcggcatgtgccagaactgtaaaaactgttttctggagtgtgcctatcaatacgacgatgacggctaccagagctactgcaccatctgttgcggcggaagagaggtgctgatgtgtggaaataacaactgctgccggtgcttctgcgtggaatgcgtggacctgctggtgggccccggcgccgcccaggccgctattaaggaagatccttggaactgctacatgtgcggccacaagggcacatacggcctgctgagacggagagaggactggcctagcagactgcagatgttcttcgccaataaccacgaccaggagttcgacccccctaaggtgtaccctcccgtccccgccgagaagagaaagcccatccgggtcctgagcctgttcgatggcatcgccaccggtctgctggtgctgaaggacctgggcatccaggtggataggtacattgcctccgaggtgtgcgaggactccatcaccgtgggaatggtgcgtcatcagggcaagatcatgtacgtgggcgacgtgcggagcgtgacacagaagcatatccaggagtggggccctttcgacctggtgatcggcggcagcccttgcaatgacctgagcatcgtgaacccagcccggaagggcctgtacgagggaaccggcagactgttcttcgagttttacagactgctgcacgacgcccggcctaaggaaggcgacgaccggcccttcttttggctgttcgagaatgtggtggccatgggagtcagcgacaagcgggatattagccggttcctggagagcaaccccgtgatgatcgatgccaaggaagtgagcgccgcccaccgggccagatacttctggggcaatctgcctggcatgaacagacccctggccagcaccgtgaacgacaagctggagctgcaggagtgcctggagcacggccggatcgccaagttcagcaaggtgagaaccatcaccacccgaagcaacagcatcaaacaaggcaaggaccagcactttcctgtgttcatgaacgagaaggaggacatcctgtggtgtaccgagatggagagagtgttcgggttcccagtccactacacagatgtcagcaacatgtctagactggccagacagagactgctgggaagaagctggtccgtccctgtgatcagacacctgttcgcccctctgaaggagtacttcgcctgcgtgagcagcggcaacagcaacgccaacagccggggccccagcttctctagcggcctggtgccactgtccctgagagggagccacatgggccccatggagatctacaaaaccgtgagcgcctggaagcggcagcctgtgcgcgtgctgagcctgtttcggaatatcgataaagtcctgaaaagcctgggattcctggagagcggctctggctccggcggtggcaccctgaagtacgtggaggatgtgacaaacgtggtcagacgggatgtggagaagtggggccccttcgatctggtgtacggcagcacccaacccctgggcagctcttgtgaccggtgccctggctggtacatgtttcagttccaccggatcctgcagtacgccctgccgagacaggagtcccagcggccattcttttggattttcatggacaacttgctgctgaccgaggatgaccaggaaactaccactcggttcctgcagaccgaagccgtgaccctgcaggacgtgagaggccgggactaccagaacgccatgcgggtgtggtccaacatccctggactgaaaagcaagcacgcacctctgacccctaaagaagaggagtacctgcaggcccaggtgcggagcagaagcaagctggacgcccctaaggtggatctgctggtgaagaattgcctcctgcccctgagagagtacttcaagtatttcagccagaatagtctgcccctgggcggcccaagcagcggcgcccctcctcccagcggcggcagcccagccggctccccaacctctaccgaggagggcacctctgagtccgccacccccgagagcggccctggcacctccaccgagcccagcgagggcagcgcacccggcagccctgccggcagccccacctccacagaggagggaaccagcaccgagcccagcgaaggcagcgccccaggcaccagcaccgagcctagtgagggcggctctggcggcggcagcgcccaggagattaaacggatcaacaagatcagaagaagacttgtgaaagacagcaacaccaagaaggccggcaagacaggccccatgaaaaccctgctggttagagtgatgacacccgatctgagagagcggctggaaaacctgagaaagaagcctgaaaatatcccccagcccatcagcaatacatctagagccaacctgaataagctgctgaccgattacaccgaaatgaagaaggcgatcctgcatgtgtactgggaagagttccagaaggaccctgtgggcctgatgagccgggtggcccagcctgccagcaagaagatcgatcagaacaagctgaaacctgagatggacgagaagggcaacctgaccaccgccggctttgcctgctctcagtgtggccagcccctgttcgtgtacaagctggagcaggtgtctgagaagggcaaggcttacaccaactacttcggacggtgcaatgtggccgagcacgaaaagctgatcctgctggcccagctgaagcccgagaaggatagcgacgaagccgtgacatatagcctgggaaagtttgggcagagggccctggatttctacagcattcatgtgaccaaggagtccacccaccccgtgaagcccctggcccagatcgccggaaacagatacgcctccggacctgtgggaaaggccctgagcgacgcatgtatgggcacaatcgcctccttcctgtctaagtaccaggacatcatcatcgaacaccagaaggtggtgaagggcaaccagaagagactggagagcctgcgggagctggccggcaaggaaaacctggaataccctagcgtgaccctgccacctcagcctcacaccaaggagggcgttgatgcctacaacgaagtgatcgcccgggtgcgaatgtgggtgaacctgaacctgtggcagaagctgaagctaagcagagatgatgccaagcctctgctgagactgaagggattcccttcctttcctctggtcgagagacaggccaacgaagtggactggtgggacatggtgtgtaacgtgaagaagctgatcaacgagaaaaaggaggatggcaaggtgttttggcagaatctggctggctacaagagacaggaagccctgagaccatacctgagcagcgaggaagatcggaagaagggaaagaaattcgctcggtaccagctgggcgacctgctgctgcacctggaaaagaagcacggcgaggactggggaaaggtgtacgacgaggcctgggagcggattgacaagaaagtggaaggcctgagcaagcacatcaagctggaagaggaacggagaagcgaggacgcccagagcaaggccgccctgaccgactggctgcgggctaaggccagcttcgtgatcgagggcctgaaggaggccgacaaggacgagttctgcagatgcgagctgaagctgcagaagtggtacggggacctgcggggaaagcccttcgccatcgaagccgagaacagcatcctggacatcagcggcttcagcaagcagtacaactgtgccttcatctggcagaaggacggcgtgaagaagctgaacctgtacctgatcatcaactacttcaagggcggcaagctgcggttcaagaagatcaaacctgaagccttcgaagccaacagattctacaccgtgatcaacaaaaagagcggcgagatcgtgcccatggaggtgaacttcaacttcgacgaccccaacctgatcatcctgcctctggcctttggcaagagacagggcagagaattcatctggaacgacctgctgtccctggaaaccggcagcctgaagctggccaacggaagagtgatcgagaagacactgtacaacagaagaacccggcaggatgagcctgccctgttcgtggccctgaccttcgagcggcgggaggtcctggactcctccaatatcaaaccaatgaacctgatcggcgtggcaagaggcgaaaacatccccgccgtgatcgccctgaccgaccccgagggctgcccactgagccggtttaaggatagcctgggaaacccaacccacatcctgagaatcggcgagagctataaggagaagcagcggaccatccaggccaagaaggaggtggagcagcggagagccggcggctacagccggaagtacgccagcaaagccaagaatctggcagacgatatggtgagaaacaccgctagagatctgctgtactacgccgtgacccaggatgccatgctgatcttcgccaacctgagccggggcttcggccggcagggcaagcggaccttcatggccgagagacagtacacacggatggaggactggctgaccgccaagctggcctacgagggcctgagcaagacctacctgtccaagacactggcccagtacacctccaagacatgcagcaactgtgggtttaccatcaccagcgccgactacgacagggtgctggagaagctgaagaagacagcaacaggctggatgaccacaattaacggcaaggagctgaaggtggagggccagattacctactacaacagatacaagagacagaacgtagtcaaggacctgtccgtcgagctggatagactgagcgaagaatctgtgaacaacgacatctcctcctggacaaagggcagaagcggagaagctctgagcctcctgaagaaaagattctcccatagacccgtgcaggagaagttcgtgtgcctgaactgcggcttcgagacacacgcagccgagcaagccgccctgaacatcgccagatcctggctgttcctgcggagccaggagtacaagaaataccagacaaacaagacaaccggcaacaccgataagagagccttcgtcgagacctggcagtccttttaccggaagaagcttaaggaggtgtggaaacctgccgtgcggtctggcggatctggcggaggctccacaagcgtgcacggcagcgtgaccttcagggacgtggccatcgacttcagccaggaggagtgggagtgcctgcagcccgagcagaggaccctgtacagggacgtgatgctggagaactacagccacctgatcagcctgggcagcagcatcagcaagcccgacgtgatcaccctgctggagcaggagaaggagccctggatggtggtgaggaaggagaccagcaggtggtaccccgacctggagagcaagaccagccccaagaaaaagagaaaagtctaagctgccttctgcggggcttgccttctggccatgcccttcttctctcccttgcacctgtacctcttggtctttgaataaagcctgagtaggaaggctagcaaaaaaaaaaaaaaaaaaaaaaaaaaaaaaaaaaaaaaaaaaaaaaaaaaaaaaaaaaaaaaaaaaaaaaaaaaaaaaaa

SEQ ID NO: 6030 - RNA, 5797 nt, synthetic construct
  source 1..5797: mol_type = other RNA
aggaaataagagagaaaagaagagtaagaagaaatataagagccaccatggcccctaagaagaagcgtaaagtgagccggatggaacgcctcgtctacgaggtgcggcagaagtgcagaaacatcgaggacatctgcatctcctgcggatctctgaacgtgaccctggagcacccactgttcatcggcggcatgtgccagaactgtaaaaactgttttctggagtgtgcctatcaatacgacgatgacggctaccagagctactgcaccatctgttgcggcggaagagaggtgctgatgtgtggaaataacaactgctgccggtgcttctgcgtggaatgcgtggacctgctggtgggccccggcgccgcccaggccgctattaaggaagatccttggaactgctacatgtgcggccacaagggcacatacggcctgctgagacggagagaggactggcctagcagactgcagatgttcttcgccaataaccacgaccaggagttcgacccccctaaggtgtaccctcccgtccccgccgagaagagaaagcccatccgggtcctgagcctgttcgatggcatcgccaccggtctgctggtgctgaaggacctgggcatccaggtggataggtacattgcctccgaggtgtgcgaggactccatcaccgtgggaatggtgcgtcatcagggcaagatcatgtacgtgggcgacgtgcggagcgtgacacagaagcatatccaggagtggggccctttcgacctggtgatcggcggcagcccttgcaatgacctgagcatcgtgaacccagcccggaagggcctgtacgagggaaccggcagactgttcttcgagttttacagactgctgcacgacgcccggcctaaggaaggcgacgaccggcccttcttttggctgttcgagaatgtggtggccatgggagtcagcgacaagcgggatattagccggttcctggagagcaaccccgtgatgatcgatgccaaggaagtgagcgccgcccaccgggccagatacttctggggcaatctgcctggcatgaacagacccctggccagcaccgtgaacgacaagctggagctgcaggagtgcctggagcacggccggatcgccaagttcagcaaggtgagaaccatcaccacccgaagcaacagcatcaaacaaggcaaggaccagcactttcctgtgttcatgaacgagaaggaggacatcctgtggtgtaccgagatggagagagtgttcgggttcccagtccactacacagatgtcagcaacatgtctagactggccagacagagactgctgggaagaagctggtccgtccctgtgatcagacacctgttcgcccctctgaaggagtacttcgcctgcgtgagcagcggcaacagcaacgccaacagccggggccccagcttctctagcggcctggtgccactgtccctgagagggagccacatgggccccatggagatctacaaaaccgtgagcgcctggaagcggcagcctgtgcgcgtgctgagcctgtttcggaatatcgataaagtcctgaaaagcctgggattcctggagagcggctctggctccggcggtggcaccctgaagtacgtggaggatgtgacaaacgtggtcagacgggatgtggagaagtggggccccttcgatctggtgtacggcagcacccaacccctgggcagctcttgtgaccggtgccctggctggtacatgtttcagttccaccggatcctgcagtacgccctgccgagacaggagtcccagcggccattcttttggattttcatggacaacttgctgctgaccgaggatgaccaggaaactaccactcggttcctgcagaccgaagccgtgaccctgcaggacgtgagaggccgggactaccagaacgccatgcgggtgtggtccaacatccctggactgaaaagcaagcacgcacctctgacccctaaagaagaggagtacctgcaggcccaggtgcggagcagaagcaagctggacgcccctaaggtggatctgctggtgaagaattgcctcctgcccctgagagagtacttcaagtatttcagccagaatagtctgcccctgggcggcccaagcagcggcgcccctcctcccagcggcggcagcccagccggctccccaacctctaccgaggagggcacctctgagtccgccacccccgagagcggccctggcacctccaccgagcccagcgagggcagcgcacccggcagccctgccggcagccccacctccacagaggagggaaccagcaccgagcccagcgaaggcagcgccccaggcaccagcaccgagcctagtgagggcggctctggcggcggcagcgcccaggagattaaacggatcaacaagatcagaagaagacttgtgaaagacagcaacaccaagaaggccggcaagacaggccccatgaaaaccctgctggttagagtgatgacacccgatctgagagagcggctggaaaacctgagaaagaagcctgaaaatatcccccagcccatcagcaatacatctagagccaacctgaataagctgctgaccgattacaccgaaatgaagaaggcgatcctgcatgtgtactgggaagagttccagaaggaccctgtgggcctgatgagccgggtggcccagcctgccagcaagaagatcgatcagaacaagctgaaacctgagatggacgagaagggcaacctgaccaccgccggctttgcctgctctcagtgtggccagcccctgttcgtgtacaagctggagcaggtgtctgagaagggcaaggcttacaccaactacttcggacggtgcaatgtggccgagcacgaaaagctgatcctgctggcccagctgaagcccgagaaggatagcgacgaagccgtgacatatagcctgggaaagtttgggcagagggccctggatttctacagcattcatgtgaccaaggagtccacccaccccgtgaagcccctggcccagatcgccggaaacagatacgcctccggacctgtgggaaaggccctgagcgacgcatgtatgggcacaatcgcctccttcctgtctaagtaccaggacatcatcatcgaacaccagaaggtggtgaagggcaaccagaagagactggagagcctgcgggagctggccggcaaggaaaacctggaataccctagcgtgaccctgccacctcagcctcacaccaaggagggcgttgatgcctacaacgaagtgatcgcccgggtgcgaatgtgggtgaacctgaacctgtggcagaagctgaagctaagcagagatgatgccaagcctctgctgagactgaagggattcccttcctttcctctggtcgagagacaggccaacgaagtggactggtgggacatggtgtgtaacgtgaagaagctgatcaacgagaaaaaggaggatggcaaggtgttttggcagaatctggctggctacaagagacaggaagccctgagaccatacctgagcagcgaggaagatcggaagaagggaaagaaattcgctcggtaccagctgggcgacctgctgctgcacctggaaaagaagcacggcgaggactggggaaaggtgtacgacgaggcctgggagcggattgacaagaaagtggaaggcctgagcaagcacatcaagctggaagaggaacggagaagcgaggacgcccagagcaaggccgccctgaccgactggctgcgggctaaggccagcttcgtgatcgagggcctgaaggaggccgacaaggacgagttctgcagatgcgagctgaagctgcagaagtggtacggggacctgcggggaaagcccttcgccatcgaagccgagaacagcatcctggacatcagcggcttcagcaagcagtacaactgtgccttcatctggcagaaggacggcgtgaagaagctgaacctgtacctgatcatcaactacttcaagggcggcaagctgcggttcaagaagatcaaacctgaagccttcgaagccaacagattctacaccgtgatcaacaaaaagagcggcgagatcgtgcccatggaggtgaacttcaacttcgacgaccccaacctgatcatcctgcctctggcctttggcaagagacagggcagagaattcatctggaacgacctgctgtccctggaaaccggcagcctgaagctggccaacggaagagtgatcgagaagacactgtacaacagaagaacccggcaggatgagcctgccctgttcgtggccctgaccttcgagcggcgggaggtcctggactcctccaatatcaaaccaatgaacctgatcggcgtggcaagaggcgaaaacatccccgccgtgatcgccctgaccgaccccgagggctgcccactgagccggtttaaggatagcctgggaaacccaacccacatcctgagaatcggcgagagctataaggagaagcagcggaccatccaggccaagaaggaggtggagcagcggagagccggcggctacagccggaagtacgccagcaaagccaagaatctggcagacgatatggtgagaaacaccgctagagatctgctgtactacgccgtgacccaggatgccatgctgatcttcgccaacctgagccggggcttcggccggcagggcaagcggaccttcatggccgagagacagtacacacggatggaggactggctgaccgccaagctggcctacgagggcctgagcaagacctacctgtccaagacactggcccagtacacctccaagacatgcagcaactgtgggtttaccatcaccagcgccgactacgacagggtgctggagaagctgaagaagacagcaacaggctggatgaccacaattaacggcaaggagctgaaggtggagggccagattacctactacaacagatacaagagacagaacgtagtcaaggacctgtccgtcgagctggatagactgagcgaagaatctgtgaacaacgacatctcctcctggacaaagggcagaagcggagaagctctgagcctcctgaagaaaagattctcccatagacccgtgcaggagaagttcgtgtgcctgaactgcggcttcgagacacacgcagccgagcaagccgccctgaacatcgccagatcctggctgttcctgcggagccaggagtacaagaaataccagacaaacaagacaaccggcaacaccgataagagagccttcgtcgagacctggcagtccttttaccggaagaagcttaaggaggtgtggaaacctgccgtgcggtctggcggatctggcggaggctccacaagcgccctgaggagcgtgatgttcagcgacgtgagcatcgacttcagccccgaggagtgggagtacctggacctggagcagaaggacctgtacagggacgtgatgctggagaactacagcaacctggtgagcctggccggctgcttcatcagcaagcccgacgtgatcagcagcctggagcagggcaaggagccctggaaggtggtgaggaagggcaggaggcagtaccccgacctggagaccaagaccagccccaagaaaaagagaaaagtctaagctgccttctgcggggcttgccttctggccatgcccttcttctctcccttgcacctgtacctcttggtctttgaataaagcctgagtaggaaggctagcaaaaaaaaaaaaaaaaaaaaaaaaaaaaaaaaaaaaaaaaaaaaaaaaaaaaaaaaaaaaaaaaaaaaaaaaaaaaaaaa

SEQ ID NO: 6031 - RNA, 5797 nt, synthetic construct
  source 1..5797: mol_type = other RNA
aggaaataagagagaaaagaagagtaagaagaaatataagagccaccatggcccctaagaagaagcgtaaagtgagccggatggaacgcctcgtctacgaggtgcggcagaagtgcagaaacatcgaggacatctgcatctcctgcggatctctgaacgtgaccctggagcacccactgttcatcggcggcatgtgccagaactgtaaaaactgttttctggagtgtgcctatcaatacgacgatgacggctaccagagctactgcaccatctgttgcggcggaagagaggtgctgatgtgtggaaataacaactgctgccggtgcttctgcgtggaatgcgtggacctgctggtgggccccggcgccgcccaggccgctattaaggaagatccttggaactgctacatgtgcggccacaagggcacatacggcctgctgagacggagagaggactggcctagcagactgcagatgttcttcgccaataaccacgaccaggagttcgacccccctaaggtgtaccctcccgtccccgccgagaagagaaagcccatccgggtcctgagcctgttcgatggcatcgccaccggtctgctggtgctgaaggacctgggcatccaggtggataggtacattgcctccgaggtgtgcgaggactccatcaccgtgggaatggtgcgtcatcagggcaagatcatgtacgtgggcgacgtgcggagcgtgacacagaagcatatccaggagtggggccctttcgacctggtgatcggcggcagcccttgcaatgacctgagcatcgtgaacccagcccggaagggcctgtacgagggaaccggcagactgttcttcgagttttacagactgctgcacgacgcccggcctaaggaaggcgacgaccggcccttcttttggctgttcgagaatgtggtggccatgggagtcagcgacaagcgggatattagccggttcctggagagcaaccccgtgatgatcgatgccaaggaagtgagcgccgcccaccgggccagatacttctggggcaatctgcctggcatgaacagacccctggccagcaccgtgaacgacaagctggagctgcaggagtgcctggagcacggccggatcgccaagttcagcaaggtgagaaccatcaccacccgaagcaacagcatcaaacaaggcaaggaccagcactttcctgtgttcatgaacgagaaggaggacatcctgtggtgtaccgagatggagagagtgttcgggttcccagtccactacacagatgtcagcaacatgtctagactggccagacagagactgctgggaagaagctggtccgtccctgtgatcagacacctgttcgcccctctgaaggagtacttcgcctgcgtgagcagcggcaacagcaacgccaacagccggggccccagcttctctagcggcctggtgccactgtccctgagagggagccacatgggccccatggagatctacaaaaccgtgagcgcctggaagcggcagcctgtgcgcgtgctgagcctgtttcggaatatcgataaagtcctgaaaagcctgggattcctggagagcggctctggctccggcggtggcaccctgaagtacgtggaggatgtgacaaacgtggtcagacgggatgtggagaagtggggccccttcgatctggtgtacggcagcacccaacccctgggcagctcttgtgaccggtgccctggctggtacatgtttcagttccaccggatcctgcagtacgccctgccgagacaggagtcccagcggccattcttttggattttcatggacaacttgctgctgaccgaggatgaccaggaaactaccactcggttcctgcagaccgaagccgtgaccctgcaggacgtgagaggccgggactaccagaacgccatgcgggtgtggtccaacatccctggactgaaaagcaagcacgcacctctgacccctaaagaagaggagtacctgcaggcccaggtgcggagcagaagcaagctggacgcccctaaggtggatctgctggtgaagaattgcctcctgcccctgagagagtacttcaagtatttcagccagaatagtctgcccctgggcggcccaagcagcggcgcccctcctcccagcggcggcagcccagccggctccccaacctctaccgaggagggcacctctgagtccgccacccccgagagcggccctggcacctccaccgagcccagcgagggcagcgcacccggcagccctgccggcagccccacctccacagaggagggaaccagcaccgagcccagcgaaggcagcgccccaggcaccagcaccgagcctagtgagggcggctctggcggcggcagcgcccaggagattaaacggatcaacaagatcagaagaagacttgtgaaagacagcaacaccaagaaggccggcaagacaggccccatgaaaaccctgctggttagagtgatgacacccgatctgagagagcggctggaaaacctgagaaagaagcctgaaaatatcccccagcccatcagcaatacatctagagccaacctgaataagctgctgaccgattacaccgaaatgaagaaggcgatcctgcatgtgtactgggaagagttccagaaggaccctgtgggcctgatgagccgggtggcccagcctgccagcaagaagatcgatcagaacaagctgaaacctgagatggacgagaagggcaacctgaccaccgccggctttgcctgctctcagtgtggccagcccctgttcgtgtacaagctggagcaggtgtctgagaagggcaaggcttacaccaactacttcggacggtgcaatgtggccgagcacgaaaagctgatcctgctggcccagctgaagcccgagaaggatagcgacgaagccgtgacatatagcctgggaaagtttgggcagagggccctggatttctacagcattcatgtgaccaaggagtccacccaccccgtgaagcccctggcccagatcgccggaaacagatacgcctccggacctgtgggaaaggccctgagcgacgcatgtatgggcacaatcgcctccttcctgtctaagtaccaggacatcatcatcgaacaccagaaggtggtgaagggcaaccagaagagactggagagcctgcgggagctggccggcaaggaaaacctggaataccctagcgtgaccctgccacctcagcctcacaccaaggagggcgttgatgcctacaacgaagtgatcgcccgggtgcgaatgtgggtgaacctgaacctgtggcagaagctgaagctaagcagagatgatgccaagcctctgctgagactgaagggattcccttcctttcctctggtcgagagacaggccaacgaagtggactggtgggacatggtgtgtaacgtgaagaagctgatcaacgagaaaaaggaggatggcaaggtgttttggcagaatctggctggctacaagagacaggaagccctgagaccatacctgagcagcgaggaagatcggaagaagggaaagaaattcgctcggtaccagctgggcgacctgctgctgcacctggaaaagaagcacggcgaggactggggaaaggtgtacgacgaggcctgggagcggattgacaagaaagtggaaggcctgagcaagcacatcaagctggaagaggaacggagaagcgaggacgcccagagcaaggccgccctgaccgactggctgcgggctaaggccagcttcgtgatcgagggcctgaaggaggccgacaaggacgagttctgcagatgcgagctgaagctgcagaagtggtacggggacctgcggggaaagcccttcgccatcgaagccgagaacagcatcctggacatcagcggcttcagcaagcagtacaactgtgccttcatctggcagaaggacggcgtgaagaagctgaacctgtacctgatcatcaactacttcaagggcggcaagctgcggttcaagaagatcaaacctgaagccttcgaagccaacagattctacaccgtgatcaacaaaaagagcggcgagatcgtgcccatggaggtgaacttcaacttcgacgaccccaacctgatcatcctgcctctggcctttggcaagagacagggcagagaattcatctggaacgacctgctgtccctggaaaccggcagcctgaagctggccaacggaagagtgatcgagaagacactgtacaacagaagaacccggcaggatgagcctgccctgttcgtggccctgaccttcgagcggcgggaggtcctggactcctccaatatcaaaccaatgaacctgatcggcgtggcaagaggcgaaaacatccccgccgtgatcgccctgaccgaccccgagggctgcccactgagccggtttaaggatagcctgggaaacccaacccacatcctgagaatcggcgagagctataaggagaagcagcggaccatccaggccaagaaggaggtggagcagcggagagccggcggctacagccggaagtacgccagcaaagccaagaatctggcagacgatatggtgagaaacaccgctagagatctgctgtactacgccgtgacccaggatgccatgctgatcttcgccaacctgagccggggcttcggccggcagggcaagcggaccttcatggccgagagacagtacacacggatggaggactggctgaccgccaagctggcctacgagggcctgagcaagacctacctgtccaagacactggcccagtacacctccaagacatgcagcaactgtgggtttaccatcaccagcgccgactacgacagggtgctggagaagctgaagaagacagcaacaggctggatgaccacaattaacggcaaggagctgaaggtggagggccagattacctactacaacagatacaagagacagaacgtagtcaaggacctgtccgtcgagctggatagactgagcgaagaatctgtgaacaacgacatctcctcctggacaaagggcagaagcggagaagctctgagcctcctgaagaaaagattctcccatagacccgtgcaggagaagttcgtgtgcctgaactgcggcttcgagacacacgcagccgagcaagccgccctgaacatcgccagatcctggctgttcctgcggagccaggagtacaagaaataccagacaaacaagacaaccggcaacaccgataagagagccttcgtcgagacctggcagtccttttaccggaagaagcttaaggaggtgtggaaacctgccgtgcggtctggcggatctggcggaggctccacaagcgagatggacagcgtgaccttcgaggacgtggccgtgaacttcaccagcgaggagtgggccctgctggaccccagccagaagaagctgtacagggccgtgatgagggagaccttcaggaacctggccagcatcggcctgaacctgggcaagaagtgggaggaccacaacatcgaggacaggtacaagacccacggcaagaagctgaggagccacatggtggagaagctgcacgagagcaaggagaccagccccaagaaaaagagaaaagtctaagctgccttctgcggggcttgccttctggccatgcccttcttctctcccttgcacctgtacctcttggtctttgaataaagcctgagtaggaaggctagcaaaaaaaaaaaaaaaaaaaaaaaaaaaaaaaaaaaaaaaaaaaaaaaaaaaaaaaaaaaaaaaaaaaaaaaaaaaaaaaa

SEQ ID NO: 6032 - RNA, 5797 nt, synthetic construct
  source 1..5797: mol_type = other RNA
aggaaataagagagaaaagaagagtaagaagaaatataagagccaccatggcccctaagaagaagcgtaaagtgagccggatggaacgcctcgtctacgaggtgcggcagaagtgcagaaacatcgaggacatctgcatctcctgcggatctctgaacgtgaccctggagcacccactgttcatcggcggcatgtgccagaactgtaaaaactgttttctggagtgtgcctatcaatacgacgatgacggctaccagagctactgcaccatctgttgcggcggaagagaggtgctgatgtgtggaaataacaactgctgccggtgcttctgcgtggaatgcgtggacctgctggtgggccccggcgccgcccaggccgctattaaggaagatccttggaactgctacatgtgcggccacaagggcacatacggcctgctgagacggagagaggactggcctagcagactgcagatgttcttcgccaataaccacgaccaggagttcgacccccctaaggtgtaccctcccgtccccgccgagaagagaaagcccatccgggtcctgagcctgttcgatggcatcgccaccggtctgctggtgctgaaggacctgggcatccaggtggataggtacattgcctccgaggtgtgcgaggactccatcaccgtgggaatggtgcgtcatcagggcaagatcatgtacgtgggcgacgtgcggagcgtgacacagaagcatatccaggagtggggccctttcgacctggtgatcggcggcagcccttgcaatgacctgagcatcgtgaacccagcccggaagggcctgtacgagggaaccggcagactgttcttcgagttttacagactgctgcacgacgcccggcctaaggaaggcgacgaccggcccttcttttggctgttcgagaatgtggtggccatgggagtcagcgacaagcgggatattagccggttcctggagagcaaccccgtgatgatcgatgccaaggaagtgagcgccgcccaccgggccagatacttctggggcaatctgcctggcatgaacagacccctggccagcaccgtgaacgacaagctggagctgcaggagtgcctggagcacggccggatcgccaagttcagcaaggtgagaaccatcaccacccgaagcaacagcatcaaacaaggcaaggaccagcactttcctgtgttcatgaacgagaaggaggacatcctgtggtgtaccgagatggagagagtgttcgggttcccagtccactacacagatgtcagcaacatgtctagactggccagacagagactgctgggaagaagctggtccgtccctgtgatcagacacctgttcgcccctctgaaggagtacttcgcctgcgtgagcagcggcaacagcaacgccaacagccggggccccagcttctctagcggcctggtgccactgtccctgagagggagccacatgggccccatggagatctacaaaaccgtgagcgcctggaagcggcagcctgtgcgcgtgctgagcctgtttcggaatatcgataaagtcctgaaaagcctgggattcctggagagcggctctggctccggcggtggcaccctgaagtacgtggaggatgtgacaaacgtggtcagacgggatgtggagaagtggggccccttcgatctggtgtacggcagcacccaacccctgggcagctcttgtgaccggtgccctggctggtacatgtttcagttccaccggatcctgcagtacgccctgccgagacaggagtcccagcggccattcttttggattttcatggacaacttgctgctgaccgaggatgaccaggaaactaccactcggttcctgcagaccgaagccgtgaccctgcaggacgtgagaggccgggactaccagaacgccatgcgggtgtggtccaacatccctggactgaaaagcaagcacgcacctctgacccctaaagaagaggagtacctgcaggcccaggtgcggagcagaagcaagctggacgcccctaaggtggatctgctggtgaagaattgcctcctgcccctgagagagtacttcaagtatttcagccagaatagtctgcccctgggcggcccaagcagcggcgcccctcctcccagcggcggcagcccagccggctccccaacctctaccgaggagggcacctctgagtccgccacccccgagagcggccctggcacctccaccgagcccagcgagggcagcgcacccggcagccctgccggcagccccacctccacagaggagggaaccagcaccgagcccagcgaaggcagcgccccaggcaccagcaccgagcctagtgagggcggctctggcggcggcagcgcccaggagattaaacggatcaacaagatcagaagaagacttgtgaaagacagcaacaccaagaaggccggcaagacaggccccatgaaaaccctgctggttagagtgatgacacccgatctgagagagcggctggaaaacctgagaaagaagcctgaaaatatcccccagcccatcagcaatacatctagagccaacctgaataagctgctgaccgattacaccgaaatgaagaaggcgatcctgcatgtgtactgggaagagttccagaaggaccctgtgggcctgatgagccgggtggcccagcctgccagcaagaagatcgatcagaacaagctgaaacctgagatggacgagaagggcaacctgaccaccgccggctttgcctgctctcagtgtggccagcccctgttcgtgtacaagctggagcaggtgtctgagaagggcaaggcttacaccaactacttcggacggtgcaatgtggccgagcacgaaaagctgatcctgctggcccagctgaagcccgagaaggatagcgacgaagccgtgacatatagcctgggaaagtttgggcagagggccctggatttctacagcattcatgtgaccaaggagtccacccaccccgtgaagcccctggcccagatcgccggaaacagatacgcctccggacctgtgggaaaggccctgagcgacgcatgtatgggcacaatcgcctccttcctgtctaagtaccaggacatcatcatcgaacaccagaaggtggtgaagggcaaccagaagagactggagagcctgcgggagctggccggcaaggaaaacctggaataccctagcgtgaccctgccacctcagcctcacaccaaggagggcgttgatgcctacaacgaagtgatcgcccgggtgcgaatgtgggtgaacctgaacctgtggcagaagctgaagctaagcagagatgatgccaagcctctgctgagactgaagggattcccttcctttcctctggtcgagagacaggccaacgaagtggactggtgggacatggtgtgtaacgtgaagaagctgatcaacgagaaaaaggaggatggcaaggtgttttggcagaatctggctggctacaagagacaggaagccctgagaccatacctgagcagcgaggaagatcggaagaagggaaagaaattcgctcggtaccagctgggcgacctgctgctgcacctggaaaagaagcacggcgaggactggggaaaggtgtacgacgaggcctgggagcggattgacaagaaagtggaaggcctgagcaagcacatcaagctggaagaggaacggagaagcgaggacgcccagagcaaggccgccctgaccgactggctgcgggctaaggccagcttcgtgatcgagggcctgaaggaggccgacaaggacgagttctgcagatgcgagctgaagctgcagaagtggtacggggacctgcggggaaagcccttcgccatcgaagccgagaacagcatcctggacatcagcggcttcagcaagcagtacaactgtgccttcatctggcagaaggacggcgtgaagaagctgaacctgtacctgatcatcaactacttcaagggcggcaagctgcggttcaagaagatcaaacctgaagccttcgaagccaacagattctacaccgtgatcaacaaaaagagcggcgagatcgtgcccatggaggtgaacttcaacttcgacgaccccaacctgatcatcctgcctctggcctttggcaagagacagggcagagaattcatctggaacgacctgctgtccctggaaaccggcagcctgaagctggccaacggaagagtgatcgagaagacactgtacaacagaagaacccggcaggatgagcctgccctgttcgtggccctgaccttcgagcggcgggaggtcctggactcctccaatatcaaaccaatgaacctgatcggcgtggcaagaggcgaaaacatccccgccgtgatcgccctgaccgaccccgagggctgcccactgagccggtttaaggatagcctgggaaacccaacccacatcctgagaatcggcgagagctataaggagaagcagcggaccatccaggccaagaaggaggtggagcagcggagagccggcggctacagccggaagtacgccagcaaagccaagaatctggcagacgatatggtgagaaacaccgctagagatctgctgtactacgccgtgacccaggatgccatgctgatcttcgccaacctgagccggggcttcggccggcagggcaagcggaccttcatggccgagagacagtacacacggatggaggactggctgaccgccaagctggcctacgagggcctgagcaagacctacctgtccaagacactggcccagtacacctccaagacatgcagcaactgtgggtttaccatcaccagcgccgactacgacagggtgctggagaagctgaagaagacagcaacaggctggatgaccacaattaacggcaaggagctgaaggtggagggccagattacctactacaacagatacaagagacagaacgtagtcaaggacctgtccgtcgagctggatagactgagcgaagaatctgtgaacaacgacatctcctcctggacaaagggcagaagcggagaagctctgagcctcctgaagaaaagattctcccatagacccgtgcaggagaagttcgtgtgcctgaactgcggcttcgagacacacgcagccgagcaagccgccctgaacatcgccagatcctggctgttcctgcggagccaggagtacaagaaataccagacaaacaagacaaccggcaacaccgataagagagccttcgtcgagacctggcagtccttttaccggaagaagcttaaggaggtgtggaaacctgccgtgcggtctggcggatctggcggaggctccacaagcagccaggagagcgtgaccttccaggacgtggccgtggacttcaccagggaggagtggaagaggctggacagcgcccagagggacctgtacagggacgtgatgctggagaactaccagaacctggtgagcctgggcctgctggtgttccagagcgacgtgatcagccagctggagaacggcgaggtgcccctggtgcccggcggcgaggtgcccaggggcaccaggcccggcagcgtgaaccagaccagccccaagaaaaagagaaaagtctaagctgccttctgcggggcttgccttctggccatgcccttcttctctcccttgcacctgtacctcttggtctttgaataaagcctgagtaggaaggctagcaaaaaaaaaaaaaaaaaaaaaaaaaaaaaaaaaaaaaaaaaaaaaaaaaaaaaaaaaaaaaaaaaaaaaaaaaaaaaaaa

SEQ ID NO: 6033 - RNA, 5794 nt, synthetic construct
  source 1..5794: mol_type = other RNA
aggaaataagagagaaaagaagagtaagaagaaatataagagccaccatggcccctaagaagaagcgtaaagtgagccggatggaacgcctcgtctacgaggtgcggcagaagtgcagaaacatcgaggacatctgcatctcctgcggatctctgaacgtgaccctggagcacccactgttcatcggcggcatgtgccagaactgtaaaaactgttttctggagtgtgcctatcaatacgacgatgacggctaccagagctactgcaccatctgttgcggcggaagagaggtgctgatgtgtggaaataacaactgctgccggtgcttctgcgtggaatgcgtggacctgctggtgggccccggcgccgcccaggccgctattaaggaagatccttggaactgctacatgtgcggccacaagggcacatacggcctgctgagacggagagaggactggcctagcagactgcagatgttcttcgccaataaccacgaccaggagttcgacccccctaaggtgtaccctcccgtccccgccgagaagagaaagcccatccgggtcctgagcctgttcgatggcatcgccaccggtctgctggtgctgaaggacctgggcatccaggtggataggtacattgcctccgaggtgtgcgaggactccatcaccgtgggaatggtgcgtcatcagggcaagatcatgtacgtgggcgacgtgcggagcgtgacacagaagcatatccaggagtggggccctttcgacctggtgatcggcggcagcccttgcaatgacctgagcatcgtgaacccagcccggaagggcctgtacgagggaaccggcagactgttcttcgagttttacagactgctgcacgacgcccggcctaaggaaggcgacgaccggcccttcttttggctgttcgagaatgtggtggccatgggagtcagcgacaagcgggatattagccggttcctggagagcaaccccgtgatgatcgatgccaaggaagtgagcgccgcccaccgggccagatacttctggggcaatctgcctggcatgaacagacccctggccagcaccgtgaacgacaagctggagctgcaggagtgcctggagcacggccggatcgccaagttcagcaaggtgagaaccatcaccacccgaagcaacagcatcaaacaaggcaaggaccagcactttcctgtgttcatgaacgagaaggaggacatcctgtggtgtaccgagatggagagagtgttcgggttcccagtccactacacagatgtcagcaacatgtctagactggccagacagagactgctgggaagaagctggtccgtccctgtgatcagacacctgttcgcccctctgaaggagtacttcgcctgcgtgagcagcggcaacagcaacgccaacagccggggccccagcttctctagcggcctggtgccactgtccctgagagggagccacatgggccccatggagatctacaaaaccgtgagcgcctggaagcggcagcctgtgcgcgtgctgagcctgtttcggaatatcgataaagtcctgaaaagcctgggattcctggagagcggctctggctccggcggtggcaccctgaagtacgtggaggatgtgacaaacgtggtcagacgggatgtggagaagtggggccccttcgatctggtgtacggcagcacccaacccctgggcagctcttgtgaccggtgccctggctggtacatgtttcagttccaccggatcctgcagtacgccctgccgagacaggagtcccagcggccattcttttggattttcatggacaacttgctgctgaccgaggatgaccaggaaactaccactcggttcctgcagaccgaagccgtgaccctgcaggacgtgagaggccgggactaccagaacgccatgcgggtgtggtccaacatccctggactgaaaagcaagcacgcacctctgacccctaaagaagaggagtacctgcaggcccaggtgcggagcagaagcaagctggacgcccctaaggtggatctgctggtgaagaattgcctcctgcccctgagagagtacttcaagtatttcagccagaatagtctgcccctgggcggcccaagcagcggcgcccctcctcccagcggcggcagcccagccggctccccaacctctaccgaggagggcacctctgagtccgccacccccgagagcggccctggcacctccaccgagcccagcgagggcagcgcacccggcagccctgccggcagccccacctccacagaggagggaaccagcaccgagcccagcgaaggcagcgccccaggcaccagcaccgagcctagtgagggcggctctggcggcggcagcgcccaggagattaaacggatcaacaagatcagaagaagacttgtgaaagacagcaacaccaagaaggccggcaagacaggccccatgaaaaccctgctggttagagtgatgacacccgatctgagagagcggctggaaaacctgagaaagaagcctgaaaatatcccccagcccatcagcaatacatctagagccaacctgaataagctgctgaccgattacaccgaaatgaagaaggcgatcctgcatgtgtactgggaagagttccagaaggaccctgtgggcctgatgagccgggtggcccagcctgccagcaagaagatcgatcagaacaagctgaaacctgagatggacgagaagggcaacctgaccaccgccggctttgcctgctctcagtgtggccagcccctgttcgtgtacaagctggagcaggtgtctgagaagggcaaggcttacaccaactacttcggacggtgcaatgtggccgagcacgaaaagctgatcctgctggcccagctgaagcccgagaaggatagcgacgaagccgtgacatatagcctgggaaagtttgggcagagggccctggatttctacagcattcatgtgaccaaggagtccacccaccccgtgaagcccctggcccagatcgccggaaacagatacgcctccggacctgtgggaaaggccctgagcgacgcatgtatgggcacaatcgcctccttcctgtctaagtaccaggacatcatcatcgaacaccagaaggtggtgaagggcaaccagaagagactggagagcctgcgggagctggccggcaaggaaaacctggaataccctagcgtgaccctgccacctcagcctcacaccaaggagggcgttgatgcctacaacgaagtgatcgcccgggtgcgaatgtgggtgaacctgaacctgtggcagaagctgaagctaagcagagatgatgccaagcctctgctgagactgaagggattcccttcctttcctctggtcgagagacaggccaacgaagtggactggtgggacatggtgtgtaacgtgaagaagctgatcaacgagaaaaaggaggatggcaaggtgttttggcagaatctggctggctacaagagacaggaagccctgagaccatacctgagcagcgaggaagatcggaagaagggaaagaaattcgctcggtaccagctgggcgacctgctgctgcacctggaaaagaagcacggcgaggactggggaaaggtgtacgacgaggcctgggagcggattgacaagaaagtggaaggcctgagcaagcacatcaagctggaagaggaacggagaagcgaggacgcccagagcaaggccgccctgaccgactggctgcgggctaaggccagcttcgtgatcgagggcctgaaggaggccgacaaggacgagttctgcagatgcgagctgaagctgcagaagtggtacggggacctgcggggaaagcccttcgccatcgaagccgagaacagcatcctggacatcagcggcttcagcaagcagtacaactgtgccttcatctggcagaaggacggcgtgaagaagctgaacctgtacctgatcatcaactacttcaagggcggcaagctgcggttcaagaagatcaaacctgaagccttcgaagccaacagattctacaccgtgatcaacaaaaagagcggcgagatcgtgcccatggaggtgaacttcaacttcgacgaccccaacctgatcatcctgcctctggcctttggcaagagacagggcagagaattcatctggaacgacctgctgtccctggaaaccggcagcctgaagctggccaacggaagagtgatcgagaagacactgtacaacagaagaacccggcaggatgagcctgccctgttcgtggccctgaccttcgagcggcgggaggtcctggactcctccaatatcaaaccaatgaacctgatcggcgtggcaagaggcgaaaacatccccgccgtgatcgccctgaccgaccccgagggctgcccactgagccggtttaaggatagcctgggaaacccaacccacatcctgagaatcggcgagagctataaggagaagcagcggaccatccaggccaagaaggaggtggagcagcggagagccggcggctacagccggaagtacgccagcaaagccaagaatctggcagacgatatggtgagaaacaccgctagagatctgctgtactacgccgtgacccaggatgccatgctgatcttcgccaacctgagccggggcttcggccggcagggcaagcggaccttcatggccgagagacagtacacacggatggaggactggctgaccgccaagctggcctacgagggcctgagcaagacctacctgtccaagacactggcccagtacacctccaagacatgcagcaactgtgggtttaccatcaccagcgccgactacgacagggtgctggagaagctgaagaagacagcaacaggctggatgaccacaattaacggcaaggagctgaaggtggagggccagattacctactacaacagatacaagagacagaacgtagtcaaggacctgtccgtcgagctggatagactgagcgaagaatctgtgaacaacgacatctcctcctggacaaagggcagaagcggagaagctctgagcctcctgaagaaaagattctcccatagacccgtgcaggagaagttcgtgtgcctgaactgcggcttcgagacacacgcagccgagcaagccgccctgaacatcgccagatcctggctgttcctgcggagccaggagtacaagaaataccagacaaacaagacaaccggcaacaccgataagagagccttcgtcgagacctggcagtccttttaccggaagaagcttaaggaggtgtggaaacctgccgtgcggtctggcggatctggcggaggctccacaagcctgcagaggctgctgaccttcggcgacgtggccatcgagttcagccaggaggagtggaggtgcctgagccacacccagagggagctgtacagggacgtgatgctggagaactacaggcacctgctgttcctgggcctgatcgtgagcaagcccgacctggtgagcctgctggagcagaggaaggagccctgggacgtgaagaggaagaagaccgtggtgttcgaccccggcaggtgggagaccagccccaagaaaaagagaaaagtctaagctgccttctgcggggcttgccttctggccatgcccttcttctctcccttgcacctgtacctcttggtctttgaataaagcctgagtaggaaggctagcaaaaaaaaaaaaaaaaaaaaaaaaaaaaaaaaaaaaaaaaaaaaaaaaaaaaaaaaaaaaaaaaaaaaaaaaaaaaaaaa

SEQ ID NO: 6034 - RNA, 5797 nt, synthetic construct
  source 1..5797: mol_type = other RNA
aggaaataagagagaaaagaagagtaagaagaaatataagagccaccatggcccctaagaagaagcgtaaagtgagccggatggaacgcctcgtctacgaggtgcggcagaagtgcagaaacatcgaggacatctgcatctcctgcggatctctgaacgtgaccctggagcacccactgttcatcggcggcatgtgccagaactgtaaaaactgttttctggagtgtgcctatcaatacgacgatgacggctaccagagctactgcaccatctgttgcggcggaagagaggtgctgatgtgtggaaataacaactgctgccggtgcttctgcgtggaatgcgtggacctgctggtgggccccggcgccgcccaggccgctattaaggaagatccttggaactgctacatgtgcggccacaagggcacatacggcctgctgagacggagagaggactggcctagcagactgcagatgttcttcgccaataaccacgaccaggagttcgacccccctaaggtgtaccctcccgtccccgccgagaagagaaagcccatccgggtcctgagcctgttcgatggcatcgccaccggtctgctggtgctgaaggacctgggcatccaggtggataggtacattgcctccgaggtgtgcgaggactccatcaccgtgggaatggtgcgtcatcagggcaagatcatgtacgtgggcgacgtgcggagcgtgacacagaagcatatccaggagtggggccctttcgacctggtgatcggcggcagcccttgcaatgacctgagcatcgtgaacccagcccggaagggcctgtacgagggaaccggcagactgttcttcgagttttacagactgctgcacgacgcccggcctaaggaaggcgacgaccggcccttcttttggctgttcgagaatgtggtggccatgggagtcagcgacaagcgggatattagccggttcctggagagcaaccccgtgatgatcgatgccaaggaagtgagcgccgcccaccgggccagatacttctggggcaatctgcctggcatgaacagacccctggccagcaccgtgaacgacaagctggagctgcaggagtgcctggagcacggccggatcgccaagttcagcaaggtgagaaccatcaccacccgaagcaacagcatcaaacaaggcaaggaccagcactttcctgtgttcatgaacgagaaggaggacatcctgtggtgtaccgagatggagagagtgttcgggttcccagtccactacacagatgtcagcaacatgtctagactggccagacagagactgctgggaagaagctggtccgtccctgtgatcagacacctgttcgcccctctgaaggagtacttcgcctgcgtgagcagcggcaacagcaacgccaacagccggggccccagcttctctagcggcctggtgccactgtccctgagagggagccacatgggccccatggagatctacaaaaccgtgagcgcctggaagcggcagcctgtgcgcgtgctgagcctgtttcggaatatcgataaagtcctgaaaagcctgggattcctggagagcggctctggctccggcggtggcaccctgaagtacgtggaggatgtgacaaacgtggtcagacgggatgtggagaagtggggccccttcgatctggtgtacggcagcacccaacccctgggcagctcttgtgaccggtgccctggctggtacatgtttcagttccaccggatcctgcagtacgccctgccgagacaggagtcccagcggccattcttttggattttcatggacaacttgctgctgaccgaggatgaccaggaaactaccactcggttcctgcagaccgaagccgtgaccctgcaggacgtgagaggccgggactaccagaacgccatgcgggtgtggtccaacatccctggactgaaaagcaagcacgcacctctgacccctaaagaagaggagtacctgcaggcccaggtgcggagcagaagcaagctggacgcccctaaggtggatctgctggtgaagaattgcctcctgcccctgagagagtacttcaagtatttcagccagaatagtctgcccctgggcggcccaagcagcggcgcccctcctcccagcggcggcagcccagccggctccccaacctctaccgaggagggcacctctgagtccgccacccccgagagcggccctggcacctccaccgagcccagcgagggcagcgcacccggcagccctgccggcagccccacctccacagaggagggaaccagcaccgagcccagcgaaggcagcgccccaggcaccagcaccgagcctagtgagggcggctctggcggcggcagcgcccaggagattaaacggatcaacaagatcagaagaagacttgtgaaagacagcaacaccaagaaggccggcaagacaggccccatgaaaaccctgctggttagagtgatgacacccgatctgagagagcggctggaaaacctgagaaagaagcctgaaaatatcccccagcccatcagcaatacatctagagccaacctgaataagctgctgaccgattacaccgaaatgaagaaggcgatcctgcatgtgtactgggaagagttccagaaggaccctgtgggcctgatgagccgggtggcccagcctgccagcaagaagatcgatcagaacaagctgaaacctgagatggacgagaagggcaacctgaccaccgccggctttgcctgctctcagtgtggccagcccctgttcgtgtacaagctggagcaggtgtctgagaagggcaaggcttacaccaactacttcggacggtgcaatgtggccgagcacgaaaagctgatcctgctggcccagctgaagcccgagaaggatagcgacgaagccgtgacatatagcctgggaaagtttgggcagagggccctggatttctacagcattcatgtgaccaaggagtccacccaccccgtgaagcccctggcccagatcgccggaaacagatacgcctccggacctgtgggaaaggccctgagcgacgcatgtatgggcacaatcgcctccttcctgtctaagtaccaggacatcatcatcgaacaccagaaggtggtgaagggcaaccagaagagactggagagcctgcgggagctggccggcaaggaaaacctggaataccctagcgtgaccctgccacctcagcctcacaccaaggagggcgttgatgcctacaacgaagtgatcgcccgggtgcgaatgtgggtgaacctgaacctgtggcagaagctgaagctaagcagagatgatgccaagcctctgctgagactgaagggattcccttcctttcctctggtcgagagacaggccaacgaagtggactggtgggacatggtgtgtaacgtgaagaagctgatcaacgagaaaaaggaggatggcaaggtgttttggcagaatctggctggctacaagagacaggaagccctgagaccatacctgagcagcgaggaagatcggaagaagggaaagaaattcgctcggtaccagctgggcgacctgctgctgcacctggaaaagaagcacggcgaggactggggaaaggtgtacgacgaggcctgggagcggattgacaagaaagtggaaggcctgagcaagcacatcaagctggaagaggaacggagaagcgaggacgcccagagcaaggccgccctgaccgactggctgcgggctaaggccagcttcgtgatcgagggcctgaaggaggccgacaaggacgagttctgcagatgcgagctgaagctgcagaagtggtacggggacctgcggggaaagcccttcgccatcgaagccgagaacagcatcctggacatcagcggcttcagcaagcagtacaactgtgccttcatctggcagaaggacggcgtgaagaagctgaacctgtacctgatcatcaactacttcaagggcggcaagctgcggttcaagaagatcaaacctgaagccttcgaagccaacagattctacaccgtgatcaacaaaaagagcggcgagatcgtgcccatggaggtgaacttcaacttcgacgaccccaacctgatcatcctgcctctggcctttggcaagagacagggcagagaattcatctggaacgacctgctgtccctggaaaccggcagcctgaagctggccaacggaagagtgatcgagaagacactgtacaacagaagaacccggcaggatgagcctgccctgttcgtggccctgaccttcgagcggcgggaggtcctggactcctccaatatcaaaccaatgaacctgatcggcgtggcaagaggcgaaaacatccccgccgtgatcgccctgaccgaccccgagggctgcccactgagccggtttaaggatagcctgggaaacccaacccacatcctgagaatcggcgagagctataaggagaagcagcggaccatccaggccaagaaggaggtggagcagcggagagccggcggctacagccggaagtacgccagcaaagccaagaatctggcagacgatatggtgagaaacaccgctagagatctgctgtactacgccgtgacccaggatgccatgctgatcttcgccaacctgagccggggcttcggccggcagggcaagcggaccttcatggccgagagacagtacacacggatggaggactggctgaccgccaagctggcctacgagggcctgagcaagacctacctgtccaagacactggcccagtacacctccaagacatgcagcaactgtgggtttaccatcaccagcgccgactacgacagggtgctggagaagctgaagaagacagcaacaggctggatgaccacaattaacggcaaggagctgaaggtggagggccagattacctactacaacagatacaagagacagaacgtagtcaaggacctgtccgtcgagctggatagactgagcgaagaatctgtgaacaacgacatctcctcctggacaaagggcagaagcggagaagctctgagcctcctgaagaaaagattctcccatagacccgtgcaggagaagttcgtgtgcctgaactgcggcttcgagacacacgcagccgagcaagccgccctgaacatcgccagatcctggctgttcctgcggagccaggagtacaagaaataccagacaaacaagacaaccggcaacaccgataagagagccttcgtcgagacctggcagtccttttaccggaagaagcttaaggaggtgtggaaacctgccgtgcggtctggcggatctggcggaggctccacaagcgaccacgagctggtgaccttcagggacgtgatcatcaacttcagccaggacgagtgggagtacctgaacagcgcccagagggacctgtactgggacgtgatgatggagaactacagcaacctggtgagcctgggctgcttcatcagcaagcccgacgtgatcagcctgctggagcagggcaaggagccctggaaggtggtgaggaaggagaggaggaggtaccccgacctggagaccaggcacaccagccccaagaaaaagagaaaagtctaagctgccttctgcggggcttgccttctggccatgcccttcttctctcccttgcacctgtacctcttggtctttgaataaagcctgagtaggaaggctagcaaaaaaaaaaaaaaaaaaaaaaaaaaaaaaaaaaaaaaaaaaaaaaaaaaaaaaaaaaaaaaaaaaaaaaaaaaaaaaaa

SEQ ID NO: 6035 - RNA, 5797 nt, synthetic construct
  source 1..5797: mol_type = other RNA
aggaaataagagagaaaagaagagtaagaagaaatataagagccaccatggcccctaagaagaagcgtaaagtgagccggatggaacgcctcgtctacgaggtgcggcagaagtgcagaaacatcgaggacatctgcatctcctgcggatctctgaacgtgaccctggagcacccactgttcatcggcggcatgtgccagaactgtaaaaactgttttctggagtgtgcctatcaatacgacgatgacggctaccagagctactgcaccatctgttgcggcggaagagaggtgctgatgtgtggaaataacaactgctgccggtgcttctgcgtggaatgcgtggacctgctggtgggccccggcgccgcccaggccgctattaaggaagatccttggaactgctacatgtgcggccacaagggcacatacggcctgctgagacggagagaggactggcctagcagactgcagatgttcttcgccaataaccacgaccaggagttcgacccccctaaggtgtaccctcccgtccccgccgagaagagaaagcccatccgggtcctgagcctgttcgatggcatcgccaccggtctgctggtgctgaaggacctgggcatccaggtggataggtacattgcctccgaggtgtgcgaggactccatcaccgtgggaatggtgcgtcatcagggcaagatcatgtacgtgggcgacgtgcggagcgtgacacagaagcatatccaggagtggggccctttcgacctggtgatcggcggcagcccttgcaatgacctgagcatcgtgaacccagcccggaagggcctgtacgagggaaccggcagactgttcttcgagttttacagactgctgcacgacgcccggcctaaggaaggcgacgaccggcccttcttttggctgttcgagaatgtggtggccatgggagtcagcgacaagcgggatattagccggttcctggagagcaaccccgtgatgatcgatgccaaggaagtgagcgccgcccaccgggccagatacttctggggcaatctgcctggcatgaacagacccctggccagcaccgtgaacgacaagctggagctgcaggagtgcctggagcacggccggatcgccaagttcagcaaggtgagaaccatcaccacccgaagcaacagcatcaaacaaggcaaggaccagcactttcctgtgttcatgaacgagaaggaggacatcctgtggtgtaccgagatggagagagtgttcgggttcccagtccactacacagatgtcagcaacatgtctagactggccagacagagactgctgggaagaagctggtccgtccctgtgatcagacacctgttcgcccctctgaaggagtacttcgcctgcgtgagcagcggcaacagcaacgccaacagccggggccccagcttctctagcggcctggtgccactgtccctgagagggagccacatgggccccatggagatctacaaaaccgtgagcgcctggaagcggcagcctgtgcgcgtgctgagcctgtttcggaatatcgataaagtcctgaaaagcctgggattcctggagagcggctctggctccggcggtggcaccctgaagtacgtggaggatgtgacaaacgtggtcagacgggatgtggagaagtggggccccttcgatctggtgtacggcagcacccaacccctgggcagctcttgtgaccggtgccctggctggtacatgtttcagttccaccggatcctgcagtacgccctgccgagacaggagtcccagcggccattcttttggattttcatggacaacttgctgctgaccgaggatgaccaggaaactaccactcggttcctgcagaccgaagccgtgaccctgcaggacgtgagaggccgggactaccagaacgccatgcgggtgtggtccaacatccctggactgaaaagcaagcacgcacctctgacccctaaagaagaggagtacctgcaggcccaggtgcggagcagaagcaagctggacgcccctaaggtggatctgctggtgaagaattgcctcctgcccctgagagagtacttcaagtatttcagccagaatagtctgcccctgggcggcccaagcagcggcgcccctcctcccagcggcggcagcccagccggctccccaacctctaccgaggagggcacctctgagtccgccacccccgagagcggccctggcacctccaccgagcccagcgagggcagcgcacccggcagccctgccggcagccccacctccacagaggagggaaccagcaccgagcccagcgaaggcagcgccccaggcaccagcaccgagcctagtgagggcggctctggcggcggcagcgcccaggagattaaacggatcaacaagatcagaagaagacttgtgaaagacagcaacaccaagaaggccggcaagacaggccccatgaaaaccctgctggttagagtgatgacacccgatctgagagagcggctggaaaacctgagaaagaagcctgaaaatatcccccagcccatcagcaatacatctagagccaacctgaataagctgctgaccgattacaccgaaatgaagaaggcgatcctgcatgtgtactgggaagagttccagaaggaccctgtgggcctgatgagccgggtggcccagcctgccagcaagaagatcgatcagaacaagctgaaacctgagatggacgagaagggcaacctgaccaccgccggctttgcctgctctcagtgtggccagcccctgttcgtgtacaagctggagcaggtgtctgagaagggcaaggcttacaccaactacttcggacggtgcaatgtggccgagcacgaaaagctgatcctgctggcccagctgaagcccgagaaggatagcgacgaagccgtgacatatagcctgggaaagtttgggcagagggccctggatttctacagcattcatgtgaccaaggagtccacccaccccgtgaagcccctggcccagatcgccggaaacagatacgcctccggacctgtgggaaaggccctgagcgacgcatgtatgggcacaatcgcctccttcctgtctaagtaccaggacatcatcatcgaacaccagaaggtggtgaagggcaaccagaagagactggagagcctgcgggagctggccggcaaggaaaacctggaataccctagcgtgaccctgccacctcagcctcacaccaaggagggcgttgatgcctacaacgaagtgatcgcccgggtgcgaatgtgggtgaacctgaacctgtggcagaagctgaagctaagcagagatgatgccaagcctctgctgagactgaagggattcccttcctttcctctggtcgagagacaggccaacgaagtggactggtgggacatggtgtgtaacgtgaagaagctgatcaacgagaaaaaggaggatggcaaggtgttttggcagaatctggctggctacaagagacaggaagccctgagaccatacctgagcagcgaggaagatcggaagaagggaaagaaattcgctcggtaccagctgggcgacctgctgctgcacctggaaaagaagcacggcgaggactggggaaaggtgtacgacgaggcctgggagcggattgacaagaaagtggaaggcctgagcaagcacatcaagctggaagaggaacggagaagcgaggacgcccagagcaaggccgccctgaccgactggctgcgggctaaggccagcttcgtgatcgagggcctgaaggaggccgacaaggacgagttctgcagatgcgagctgaagctgcagaagtggtacggggacctgcggggaaagcccttcgccatcgaagccgagaacagcatcctggacatcagcggcttcagcaagcagtacaactgtgccttcatctggcagaaggacggcgtgaagaagctgaacctgtacctgatcatcaactacttcaagggcggcaagctgcggttcaagaagatcaaacctgaagccttcgaagccaacagattctacaccgtgatcaacaaaaagagcggcgagatcgtgcccatggaggtgaacttcaacttcgacgaccccaacctgatcatcctgcctctggcctttggcaagagacagggcagagaattcatctggaacgacctgctgtccctggaaaccggcagcctgaagctggccaacggaagagtgatcgagaagacactgtacaacagaagaacccggcaggatgagcctgccctgttcgtggccctgaccttcgagcggcgggaggtcctggactcctccaatatcaaaccaatgaacctgatcggcgtggcaagaggcgaaaacatccccgccgtgatcgccctgaccgaccccgagggctgcccactgagccggtttaaggatagcctgggaaacccaacccacatcctgagaatcggcgagagctataaggagaagcagcggaccatccaggccaagaaggaggtggagcagcggagagccggcggctacagccggaagtacgccagcaaagccaagaatctggcagacgatatggtgagaaacaccgctagagatctgctgtactacgccgtgacccaggatgccatgctgatcttcgccaacctgagccggggcttcggccggcagggcaagcggaccttcatggccgagagacagtacacacggatggaggactggctgaccgccaagctggcctacgagggcctgagcaagacctacctgtccaagacactggcccagtacacctccaagacatgcagcaactgtgggtttaccatcaccagcgccgactacgacagggtgctggagaagctgaagaagacagcaacaggctggatgaccacaattaacggcaaggagctgaaggtggagggccagattacctactacaacagatacaagagacagaacgtagtcaaggacctgtccgtcgagctggatagactgagcgaagaatctgtgaacaacgacatctcctcctggacaaagggcagaagcggagaagctctgagcctcctgaagaaaagattctcccatagacccgtgcaggagaagttcgtgtgcctgaactgcggcttcgagacacacgcagccgagcaagccgccctgaacatcgccagatcctggctgttcctgcggagccaggagtacaagaaataccagacaaacaagacaaccggcaacaccgataagagagccttcgtcgagacctggcagtccttttaccggaagaagcttaaggaggtgtggaaacctgccgtgcggtctggcggatctggcggaggctccacaagccagctgggcagcgtggccttcgaggacgtggccgtggacttcacccaggaggagtggggctacctggcccccgcccagagggacctgcacagggaggtgatgctggagaactacaggaacctggtgttcctgggcctggtggccagcaagcccgacgtgatctgccacctggagcagaggaaggagccctggagcctgaggggcatcgagaagaggaaggccctgaggggcacctgccccgacaccagccccaagaaaaagagaaaagtctaagctgccttctgcggggcttgccttctggccatgcccttcttctctcccttgcacctgtacctcttggtctttgaataaagcctgagtaggaaggctagcaaaaaaaaaaaaaaaaaaaaaaaaaaaaaaaaaaaaaaaaaaaaaaaaaaaaaaaaaaaaaaaaaaaaaaaaaaaaaaaa

SEQ ID NO: 6036 - RNA, 5797 nt, synthetic construct
  source 1..5797: mol_type = other RNA
aggaaataagagagaaaagaagagtaagaagaaatataagagccaccatggcccctaagaagaagcgtaaagtgagccggatggaacgcctcgtctacgaggtgcggcagaagtgcagaaacatcgaggacatctgcatctcctgcggatctctgaacgtgaccctggagcacccactgttcatcggcggcatgtgccagaactgtaaaaactgttttctggagtgtgcctatcaatacgacgatgacggctaccagagctactgcaccatctgttgcggcggaagagaggtgctgatgtgtggaaataacaactgctgccggtgcttctgcgtggaatgcgtggacctgctggtgggccccggcgccgcccaggccgctattaaggaagatccttggaactgctacatgtgcggccacaagggcacatacggcctgctgagacggagagaggactggcctagcagactgcagatgttcttcgccaataaccacgaccaggagttcgacccccctaaggtgtaccctcccgtccccgccgagaagagaaagcccatccgggtcctgagcctgttcgatggcatcgccaccggtctgctggtgctgaaggacctgggcatccaggtggataggtacattgcctccgaggtgtgcgaggactccatcaccgtgggaatggtgcgtcatcagggcaagatcatgtacgtgggcgacgtgcggagcgtgacacagaagcatatccaggagtggggccctttcgacctggtgatcggcggcagcccttgcaatgacctgagcatcgtgaacccagcccggaagggcctgtacgagggaaccggcagactgttcttcgagttttacagactgctgcacgacgcccggcctaaggaaggcgacgaccggcccttcttttggctgttcgagaatgtggtggccatgggagtcagcgacaagcgggatattagccggttcctggagagcaaccccgtgatgatcgatgccaaggaagtgagcgccgcccaccgggccagatacttctggggcaatctgcctggcatgaacagacccctggccagcaccgtgaacgacaagctggagctgcaggagtgcctggagcacggccggatcgccaagttcagcaaggtgagaaccatcaccacccgaagcaacagcatcaaacaaggcaaggaccagcactttcctgtgttcatgaacgagaaggaggacatcctgtggtgtaccgagatggagagagtgttcgggttcccagtccactacacagatgtcagcaacatgtctagactggccagacagagactgctgggaagaagctggtccgtccctgtgatcagacacctgttcgcccctctgaaggagtacttcgcctgcgtgagcagcggcaacagcaacgccaacagccggggccccagcttctctagcggcctggtgccactgtccctgagagggagccacatgggccccatggagatctacaaaaccgtgagcgcctggaagcggcagcctgtgcgcgtgctgagcctgtttcggaatatcgataaagtcctgaaaagcctgggattcctggagagcggctctggctccggcggtggcaccctgaagtacgtggaggatgtgacaaacgtggtcagacgggatgtggagaagtggggccccttcgatctggtgtacggcagcacccaacccctgggcagctcttgtgaccggtgccctggctggtacatgtttcagttccaccggatcctgcagtacgccctgccgagacaggagtcccagcggccattcttttggattttcatggacaacttgctgctgaccgaggatgaccaggaaactaccactcggttcctgcagaccgaagccgtgaccctgcaggacgtgagaggccgggactaccagaacgccatgcgggtgtggtccaacatccctggactgaaaagcaagcacgcacctctgacccctaaagaagaggagtacctgcaggcccaggtgcggagcagaagcaagctggacgcccctaaggtggatctgctggtgaagaattgcctcctgcccctgagagagtacttcaagtatttcagccagaatagtctgcccctgggcggcccaagcagcggcgcccctcctcccagcggcggcagcccagccggctccccaacctctaccgaggagggcacctctgagtccgccacccccgagagcggccctggcacctccaccgagcccagcgagggcagcgcacccggcagccctgccggcagccccacctccacagaggagggaaccagcaccgagcccagcgaaggcagcgccccaggcaccagcaccgagcctagtgagggcggctctggcggcggcagcgcccaggagattaaacggatcaacaagatcagaagaagacttgtgaaagacagcaacaccaagaaggccggcaagacaggccccatgaaaaccctgctggttagagtgatgacacccgatctgagagagcggctggaaaacctgagaaagaagcctgaaaatatcccccagcccatcagcaatacatctagagccaacctgaataagctgctgaccgattacaccgaaatgaagaaggcgatcctgcatgtgtactgggaagagttccagaaggaccctgtgggcctgatgagccgggtggcccagcctgccagcaagaagatcgatcagaacaagctgaaacctgagatggacgagaagggcaacctgaccaccgccggctttgcctgctctcagtgtggccagcccctgttcgtgtacaagctggagcaggtgtctgagaagggcaaggcttacaccaactacttcggacggtgcaatgtggccgagcacgaaaagctgatcctgctggcccagctgaagcccgagaaggatagcgacgaagccgtgacatatagcctgggaaagtttgggcagagggccctggatttctacagcattcatgtgaccaaggagtccacccaccccgtgaagcccctggcccagatcgccggaaacagatacgcctccggacctgtgggaaaggccctgagcgacgcatgtatgggcacaatcgcctccttcctgtctaagtaccaggacatcatcatcgaacaccagaaggtggtgaagggcaaccagaagagactggagagcctgcgggagctggccggcaaggaaaacctggaataccctagcgtgaccctgccacctcagcctcacaccaaggagggcgttgatgcctacaacgaagtgatcgcccgggtgcgaatgtgggtgaacctgaacctgtggcagaagctgaagctaagcagagatgatgccaagcctctgctgagactgaagggattcccttcctttcctctggtcgagagacaggccaacgaagtggactggtgggacatggtgtgtaacgtgaagaagctgatcaacgagaaaaaggaggatggcaaggtgttttggcagaatctggctggctacaagagacaggaagccctgagaccatacctgagcagcgaggaagatcggaagaagggaaagaaattcgctcggtaccagctgggcgacctgctgctgcacctggaaaagaagcacggcgaggactggggaaaggtgtacgacgaggcctgggagcggattgacaagaaagtggaaggcctgagcaagcacatcaagctggaagaggaacggagaagcgaggacgcccagagcaaggccgccctgaccgactggctgcgggctaaggccagcttcgtgatcgagggcctgaaggaggccgacaaggacgagttctgcagatgcgagctgaagctgcagaagtggtacggggacctgcggggaaagcccttcgccatcgaagccgagaacagcatcctggacatcagcggcttcagcaagcagtacaactgtgccttcatctggcagaaggacggcgtgaagaagctgaacctgtacctgatcatcaactacttcaagggcggcaagctgcggttcaagaagatcaaacctgaagccttcgaagccaacagattctacaccgtgatcaacaaaaagagcggcgagatcgtgcccatggaggtgaacttcaacttcgacgaccccaacctgatcatcctgcctctggcctttggcaagagacagggcagagaattcatctggaacgacctgctgtccctggaaaccggcagcctgaagctggccaacggaagagtgatcgagaagacactgtacaacagaagaacccggcaggatgagcctgccctgttcgtggccctgaccttcgagcggcgggaggtcctggactcctccaatatcaaaccaatgaacctgatcggcgtggcaagaggcgaaaacatccccgccgtgatcgccctgaccgaccccgagggctgcccactgagccggtttaaggatagcctgggaaacccaacccacatcctgagaatcggcgagagctataaggagaagcagcggaccatccaggccaagaaggaggtggagcagcggagagccggcggctacagccggaagtacgccagcaaagccaagaatctggcagacgatatggtgagaaacaccgctagagatctgctgtactacgccgtgacccaggatgccatgctgatcttcgccaacctgagccggggcttcggccggcagggcaagcggaccttcatggccgagagacagtacacacggatggaggactggctgaccgccaagctggcctacgagggcctgagcaagacctacctgtccaagacactggcccagtacacctccaagacatgcagcaactgtgggtttaccatcaccagcgccgactacgacagggtgctggagaagctgaagaagacagcaacaggctggatgaccacaattaacggcaaggagctgaaggtggagggccagattacctactacaacagatacaagagacagaacgtagtcaaggacctgtccgtcgagctggatagactgagcgaagaatctgtgaacaacgacatctcctcctggacaaagggcagaagcggagaagctctgagcctcctgaagaaaagattctcccatagacccgtgcaggagaagttcgtgtgcctgaactgcggcttcgagacacacgcagccgagcaagccgccctgaacatcgccagatcctggctgttcctgcggagccaggagtacaagaaataccagacaaacaagacaaccggcaacaccgataagagagccttcgtcgagacctggcagtccttttaccggaagaagcttaaggaggtgtggaaacctgccgtgcggtctggcggatctggcggaggctccacaagccccaccgcccccgtggccttcagcgacctgaccatctgcttcagccaggaggagtggggctggctgagccccacccagaagctgctgtacgaggaggtgatgctggagaactaccagaacctggtgagcgtgggcctgtgcaccaggaagccccacatcatcaccctgctggagaagggcaaggacccctggatcgccgagcccctgaggaagaggggcggccccgaccccgccagcaggtacaccagccccaagaaaaagagaaaagtctaagctgccttctgcggggcttgccttctggccatgcccttcttctctcccttgcacctgtacctcttggtctttgaataaagcctgagtaggaaggctagcaaaaaaaaaaaaaaaaaaaaaaaaaaaaaaaaaaaaaaaaaaaaaaaaaaaaaaaaaaaaaaaaaaaaaaaaaaaaaaaa

SEQ ID NO: 6037 - RNA, 5797 nt, synthetic construct
  source 1..5797: mol_type = other RNA
aggaaataagagagaaaagaagagtaagaagaaatataagagccaccatggcccctaagaagaagcgtaaagtgagccggatggaacgcctcgtctacgaggtgcggcagaagtgcagaaacatcgaggacatctgcatctcctgcggatctctgaacgtgaccctggagcacccactgttcatcggcggcatgtgccagaactgtaaaaactgttttctggagtgtgcctatcaatacgacgatgacggctaccagagctactgcaccatctgttgcggcggaagagaggtgctgatgtgtggaaataacaactgctgccggtgcttctgcgtggaatgcgtggacctgctggtgggccccggcgccgcccaggccgctattaaggaagatccttggaactgctacatgtgcggccacaagggcacatacggcctgctgagacggagagaggactggcctagcagactgcagatgttcttcgccaataaccacgaccaggagttcgacccccctaaggtgtaccctcccgtccccgccgagaagagaaagcccatccgggtcctgagcctgttcgatggcatcgccaccggtctgctggtgctgaaggacctgggcatccaggtggataggtacattgcctccgaggtgtgcgaggactccatcaccgtgggaatggtgcgtcatcagggcaagatcatgtacgtgggcgacgtgcggagcgtgacacagaagcatatccaggagtggggccctttcgacctggtgatcggcggcagcccttgcaatgacctgagcatcgtgaacccagcccggaagggcctgtacgagggaaccggcagactgttcttcgagttttacagactgctgcacgacgcccggcctaaggaaggcgacgaccggcccttcttttggctgttcgagaatgtggtggccatgggagtcagcgacaagcgggatattagccggttcctggagagcaaccccgtgatgatcgatgccaaggaagtgagcgccgcccaccgggccagatacttctggggcaatctgcctggcatgaacagacccctggccagcaccgtgaacgacaagctggagctgcaggagtgcctggagcacggccggatcgccaagttcagcaaggtgagaaccatcaccacccgaagcaacagcatcaaacaaggcaaggaccagcactttcctgtgttcatgaacgagaaggaggacatcctgtggtgtaccgagatggagagagtgttcgggttcccagtccactacacagatgtcagcaacatgtctagactggccagacagagactgctgggaagaagctggtccgtccctgtgatcagacacctgttcgcccctctgaaggagtacttcgcctgcgtgagcagcggcaacagcaacgccaacagccggggccccagcttctctagcggcctggtgccactgtccctgagagggagccacatgggccccatggagatctacaaaaccgtgagcgcctggaagcggcagcctgtgcgcgtgctgagcctgtttcggaatatcgataaagtcctgaaaagcctgggattcctggagagcggctctggctccggcggtggcaccctgaagtacgtggaggatgtgacaaacgtggtcagacgggatgtggagaagtggggccccttcgatctggtgtacggcagcacccaacccctgggcagctcttgtgaccggtgccctggctggtacatgtttcagttccaccggatcctgcagtacgccctgccgagacaggagtcccagcggccattcttttggattttcatggacaacttgctgctgaccgaggatgaccaggaaactaccactcggttcctgcagaccgaagccgtgaccctgcaggacgtgagaggccgggactaccagaacgccatgcgggtgtggtccaacatccctggactgaaaagcaagcacgcacctctgacccctaaagaagaggagtacctgcaggcccaggtgcggagcagaagcaagctggacgcccctaaggtggatctgctggtgaagaattgcctcctgcccctgagagagtacttcaagtatttcagccagaatagtctgcccctgggcggcccaagcagcggcgcccctcctcccagcggcggcagcccagccggctccccaacctctaccgaggagggcacctctgagtccgccacccccgagagcggccctggcacctccaccgagcccagcgagggcagcgcacccggcagccctgccggcagccccacctccacagaggagggaaccagcaccgagcccagcgaaggcagcgccccaggcaccagcaccgagcctagtgagggcggctctggcggcggcagcgcccaggagattaaacggatcaacaagatcagaagaagacttgtgaaagacagcaacaccaagaaggccggcaagacaggccccatgaaaaccctgctggttagagtgatgacacccgatctgagagagcggctggaaaacctgagaaagaagcctgaaaatatcccccagcccatcagcaatacatctagagccaacctgaataagctgctgaccgattacaccgaaatgaagaaggcgatcctgcatgtgtactgggaagagttccagaaggaccctgtgggcctgatgagccgggtggcccagcctgccagcaagaagatcgatcagaacaagctgaaacctgagatggacgagaagggcaacctgaccaccgccggctttgcctgctctcagtgtggccagcccctgttcgtgtacaagctggagcaggtgtctgagaagggcaaggcttacaccaactacttcggacggtgcaatgtggccgagcacgaaaagctgatcctgctggcccagctgaagcccgagaaggatagcgacgaagccgtgacatatagcctgggaaagtttgggcagagggccctggatttctacagcattcatgtgaccaaggagtccacccaccccgtgaagcccctggcccagatcgccggaaacagatacgcctccggacctgtgggaaaggccctgagcgacgcatgtatgggcacaatcgcctccttcctgtctaagtaccaggacatcatcatcgaacaccagaaggtggtgaagggcaaccagaagagactggagagcctgcgggagctggccggcaaggaaaacctggaataccctagcgtgaccctgccacctcagcctcacaccaaggagggcgttgatgcctacaacgaagtgatcgcccgggtgcgaatgtgggtgaacctgaacctgtggcagaagctgaagctaagcagagatgatgccaagcctctgctgagactgaagggattcccttcctttcctctggtcgagagacaggccaacgaagtggactggtgggacatggtgtgtaacgtgaagaagctgatcaacgagaaaaaggaggatggcaaggtgttttggcagaatctggctggctacaagagacaggaagccctgagaccatacctgagcagcgaggaagatcggaagaagggaaagaaattcgctcggtaccagctgggcgacctgctgctgcacctggaaaagaagcacggcgaggactggggaaaggtgtacgacgaggcctgggagcggattgacaagaaagtggaaggcctgagcaagcacatcaagctggaagaggaacggagaagcgaggacgcccagagcaaggccgccctgaccgactggctgcgggctaaggccagcttcgtgatcgagggcctgaaggaggccgacaaggacgagttctgcagatgcgagctgaagctgcagaagtggtacggggacctgcggggaaagcccttcgccatcgaagccgagaacagcatcctggacatcagcggcttcagcaagcagtacaactgtgccttcatctggcagaaggacggcgtgaagaagctgaacctgtacctgatcatcaactacttcaagggcggcaagctgcggttcaagaagatcaaacctgaagccttcgaagccaacagattctacaccgtgatcaacaaaaagagcggcgagatcgtgcccatggaggtgaacttcaacttcgacgaccccaacctgatcatcctgcctctggcctttggcaagagacagggcagagaattcatctggaacgacctgctgtccctggaaaccggcagcctgaagctggccaacggaagagtgatcgagaagacactgtacaacagaagaacccggcaggatgagcctgccctgttcgtggccctgaccttcgagcggcgggaggtcctggactcctccaatatcaaaccaatgaacctgatcggcgtggcaagaggcgaaaacatccccgccgtgatcgccctgaccgaccccgagggctgcccactgagccggtttaaggatagcctgggaaacccaacccacatcctgagaatcggcgagagctataaggagaagcagcggaccatccaggccaagaaggaggtggagcagcggagagccggcggctacagccggaagtacgccagcaaagccaagaatctggcagacgatatggtgagaaacaccgctagagatctgctgtactacgccgtgacccaggatgccatgctgatcttcgccaacctgagccggggcttcggccggcagggcaagcggaccttcatggccgagagacagtacacacggatggaggactggctgaccgccaagctggcctacgagggcctgagcaagacctacctgtccaagacactggcccagtacacctccaagacatgcagcaactgtgggtttaccatcaccagcgccgactacgacagggtgctggagaagctgaagaagacagcaacaggctggatgaccacaattaacggcaaggagctgaaggtggagggccagattacctactacaacagatacaagagacagaacgtagtcaaggacctgtccgtcgagctggatagactgagcgaagaatctgtgaacaacgacatctcctcctggacaaagggcagaagcggagaagctctgagcctcctgaagaaaagattctcccatagacccgtgcaggagaagttcgtgtgcctgaactgcggcttcgagacacacgcagccgagcaagccgccctgaacatcgccagatcctggctgttcctgcggagccaggagtacaagaaataccagacaaacaagacaaccggcaacaccgataagagagccttcgtcgagacctggcagtccttttaccggaagaagcttaaggaggtgtggaaacctgccgtgcggtctggcggatctggcggaggctccacaagcgaggagccccccgtggtgttcgaggacgtggccgtgtacttcaccagggaggagtggggcaccctggtgaccaggcagaaggagctgtacagggacgtgatgaggctgaactacgagctgctggccagcctggagcccgccgccgccaagcccgacctgatcagcaagctggagaggagggccgccccctggatcagggaccccagcggccccaagtggggcaagggcaggccccccggcaagaccagccccaagaaaaagagaaaagtctaagctgccttctgcggggcttgccttctggccatgcccttcttctctcccttgcacctgtacctcttggtctttgaataaagcctgagtaggaaggctagcaaaaaaaaaaaaaaaaaaaaaaaaaaaaaaaaaaaaaaaaaaaaaaaaaaaaaaaaaaaaaaaaaaaaaaaaaaaaaaaa

SEQ ID NO: 6038 - RNA, 5797 nt, synthetic construct
  source 1..5797: mol_type = other RNA
aggaaataagagagaaaagaagagtaagaagaaatataagagccaccatggcccctaagaagaagcgtaaagtgagccggatggaacgcctcgtctacgaggtgcggcagaagtgcagaaacatcgaggacatctgcatctcctgcggatctctgaacgtgaccctggagcacccactgttcatcggcggcatgtgccagaactgtaaaaactgttttctggagtgtgcctatcaatacgacgatgacggctaccagagctactgcaccatctgttgcggcggaagagaggtgctgatgtgtggaaataacaactgctgccggtgcttctgcgtggaatgcgtggacctgctggtgggccccggcgccgcccaggccgctattaaggaagatccttggaactgctacatgtgcggccacaagggcacatacggcctgctgagacggagagaggactggcctagcagactgcagatgttcttcgccaataaccacgaccaggagttcgacccccctaaggtgtaccctcccgtccccgccgagaagagaaagcccatccgggtcctgagcctgttcgatggcatcgccaccggtctgctggtgctgaaggacctgggcatccaggtggataggtacattgcctccgaggtgtgcgaggactccatcaccgtgggaatggtgcgtcatcagggcaagatcatgtacgtgggcgacgtgcggagcgtgacacagaagcatatccaggagtggggccctttcgacctggtgatcggcggcagcccttgcaatgacctgagcatcgtgaacccagcccggaagggcctgtacgagggaaccggcagactgttcttcgagttttacagactgctgcacgacgcccggcctaaggaaggcgacgaccggcccttcttttggctgttcgagaatgtggtggccatgggagtcagcgacaagcgggatattagccggttcctggagagcaaccccgtgatgatcgatgccaaggaagtgagcgccgcccaccgggccagatacttctggggcaatctgcctggcatgaacagacccctggccagcaccgtgaacgacaagctggagctgcaggagtgcctggagcacggccggatcgccaagttcagcaaggtgagaaccatcaccacccgaagcaacagcatcaaacaaggcaaggaccagcactttcctgtgttcatgaacgagaaggaggacatcctgtggtgtaccgagatggagagagtgttcgggttcccagtccactacacagatgtcagcaacatgtctagactggccagacagagactgctgggaagaagctggtccgtccctgtgatcagacacctgttcgcccctctgaaggagtacttcgcctgcgtgagcagcggcaacagcaacgccaacagccggggccccagcttctctagcggcctggtgccactgtccctgagagggagccacatgggccccatggagatctacaaaaccgtgagcgcctggaagcggcagcctgtgcgcgtgctgagcctgtttcggaatatcgataaagtcctgaaaagcctgggattcctggagagcggctctggctccggcggtggcaccctgaagtacgtggaggatgtgacaaacgtggtcagacgggatgtggagaagtggggccccttcgatctggtgtacggcagcacccaacccctgggcagctcttgtgaccggtgccctggctggtacatgtttcagttccaccggatcctgcagtacgccctgccgagacaggagtcccagcggccattcttttggattttcatggacaacttgctgctgaccgaggatgaccaggaaactaccactcggttcctgcagaccgaagccgtgaccctgcaggacgtgagaggccgggactaccagaacgccatgcgggtgtggtccaacatccctggactgaaaagcaagcacgcacctctgacccctaaagaagaggagtacctgcaggcccaggtgcggagcagaagcaagctggacgcccctaaggtggatctgctggtgaagaattgcctcctgcccctgagagagtacttcaagtatttcagccagaatagtctgcccctgggcggcccaagcagcggcgcccctcctcccagcggcggcagcccagccggctccccaacctctaccgaggagggcacctctgagtccgccacccccgagagcggccctggcacctccaccgagcccagcgagggcagcgcacccggcagccctgccggcagccccacctccacagaggagggaaccagcaccgagcccagcgaaggcagcgccccaggcaccagcaccgagcctagtgagggcggctctggcggcggcagcgcccaggagattaaacggatcaacaagatcagaagaagacttgtgaaagacagcaacaccaagaaggccggcaagacaggccccatgaaaaccctgctggttagagtgatgacacccgatctgagagagcggctggaaaacctgagaaagaagcctgaaaatatcccccagcccatcagcaatacatctagagccaacctgaataagctgctgaccgattacaccgaaatgaagaaggcgatcctgcatgtgtactgggaagagttccagaaggaccctgtgggcctgatgagccgggtggcccagcctgccagcaagaagatcgatcagaacaagctgaaacctgagatggacgagaagggcaacctgaccaccgccggctttgcctgctctcagtgtggccagcccctgttcgtgtacaagctggagcaggtgtctgagaagggcaaggcttacaccaactacttcggacggtgcaatgtggccgagcacgaaaagctgatcctgctggcccagctgaagcccgagaaggatagcgacgaagccgtgacatatagcctgggaaagtttgggcagagggccctggatttctacagcattcatgtgaccaaggagtccacccaccccgtgaagcccctggcccagatcgccggaaacagatacgcctccggacctgtgggaaaggccctgagcgacgcatgtatgggcacaatcgcctccttcctgtctaagtaccaggacatcatcatcgaacaccagaaggtggtgaagggcaaccagaagagactggagagcctgcgggagctggccggcaaggaaaacctggaataccctagcgtgaccctgccacctcagcctcacaccaaggagggcgttgatgcctacaacgaagtgatcgcccgggtgcgaatgtgggtgaacctgaacctgtggcagaagctgaagctaagcagagatgatgccaagcctctgctgagactgaagggattcccttcctttcctctggtcgagagacaggccaacgaagtggactggtgggacatggtgtgtaacgtgaagaagctgatcaacgagaaaaaggaggatggcaaggtgttttggcagaatctggctggctacaagagacaggaagccctgagaccatacctgagcagcgaggaagatcggaagaagggaaagaaattcgctcggtaccagctgggcgacctgctgctgcacctggaaaagaagcacggcgaggactggggaaaggtgtacgacgaggcctgggagcggattgacaagaaagtggaaggcctgagcaagcacatcaagctggaagaggaacggagaagcgaggacgcccagagcaaggccgccctgaccgactggctgcgggctaaggccagcttcgtgatcgagggcctgaaggaggccgacaaggacgagttctgcagatgcgagctgaagctgcagaagtggtacggggacctgcggggaaagcccttcgccatcgaagccgagaacagcatcctggacatcagcggcttcagcaagcagtacaactgtgccttcatctggcagaaggacggcgtgaagaagctgaacctgtacctgatcatcaactacttcaagggcggcaagctgcggttcaagaagatcaaacctgaagccttcgaagccaacagattctacaccgtgatcaacaaaaagagcggcgagatcgtgcccatggaggtgaacttcaacttcgacgaccccaacctgatcatcctgcctctggcctttggcaagagacagggcagagaattcatctggaacgacctgctgtccctggaaaccggcagcctgaagctggccaacggaagagtgatcgagaagacactgtacaacagaagaacccggcaggatgagcctgccctgttcgtggccctgaccttcgagcggcgggaggtcctggactcctccaatatcaaaccaatgaacctgatcggcgtggcaagaggcgaaaacatccccgccgtgatcgccctgaccgaccccgagggctgcccactgagccggtttaaggatagcctgggaaacccaacccacatcctgagaatcggcgagagctataaggagaagcagcggaccatccaggccaagaaggaggtggagcagcggagagccggcggctacagccggaagtacgccagcaaagccaagaatctggcagacgatatggtgagaaacaccgctagagatctgctgtactacgccgtgacccaggatgccatgctgatcttcgccaacctgagccggggcttcggccggcagggcaagcggaccttcatggccgagagacagtacacacggatggaggactggctgaccgccaagctggcctacgagggcctgagcaagacctacctgtccaagacactggcccagtacacctccaagacatgcagcaactgtgggtttaccatcaccagcgccgactacgacagggtgctggagaagctgaagaagacagcaacaggctggatgaccacaattaacggcaaggagctgaaggtggagggccagattacctactacaacagatacaagagacagaacgtagtcaaggacctgtccgtcgagctggatagactgagcgaagaatctgtgaacaacgacatctcctcctggacaaagggcagaagcggagaagctctgagcctcctgaagaaaagattctcccatagacccgtgcaggagaagttcgtgtgcctgaactgcggcttcgagacacacgcagccgagcaagccgccctgaacatcgccagatcctggctgttcctgcggagccaggagtacaagaaataccagacaaacaagacaaccggcaacaccgataagagagccttcgtcgagacctggcagtccttttaccggaagaagcttaaggaggtgtggaaacctgccgtgcggtctggcggatctggcggaggctccacaagccagggcagcgtgatgttcagcgacgtgagcatcatcttcagccaggaggagtgggagtacctggacagggagcagaggaacctgtacaggaacgtgatgatggagaactacagcaacctggtgagcctggccggctgcttcatcagcaagcccgacgtgatcaccctgctggagcagggcaaggacccctggaaggtggtgaggaagggcaggaagaggtacagcgacctggagaccagccacaccagccccaagaaaaagagaaaagtctaagctgccttctgcggggcttgccttctggccatgcccttcttctctcccttgcacctgtacctcttggtctttgaataaagcctgagtaggaaggctagcaaaaaaaaaaaaaaaaaaaaaaaaaaaaaaaaaaaaaaaaaaaaaaaaaaaaaaaaaaaaaaaaaaaaaaaaaaaaaaaa

SEQ ID NO: 6039 - RNA, 5797 nt, synthetic construct
  source 1..5797: mol_type = other RNA
aggaaataagagagaaaagaagagtaagaagaaatataagagccaccatggcccctaagaagaagcgtaaagtgagccggatggaacgcctcgtctacgaggtgcggcagaagtgcagaaacatcgaggacatctgcatctcctgcggatctctgaacgtgaccctggagcacccactgttcatcggcggcatgtgccagaactgtaaaaactgttttctggagtgtgcctatcaatacgacgatgacggctaccagagctactgcaccatctgttgcggcggaagagaggtgctgatgtgtggaaataacaactgctgccggtgcttctgcgtggaatgcgtggacctgctggtgggccccggcgccgcccaggccgctattaaggaagatccttggaactgctacatgtgcggccacaagggcacatacggcctgctgagacggagagaggactggcctagcagactgcagatgttcttcgccaataaccacgaccaggagttcgacccccctaaggtgtaccctcccgtccccgccgagaagagaaagcccatccgggtcctgagcctgttcgatggcatcgccaccggtctgctggtgctgaaggacctgggcatccaggtggataggtacattgcctccgaggtgtgcgaggactccatcaccgtgggaatggtgcgtcatcagggcaagatcatgtacgtgggcgacgtgcggagcgtgacacagaagcatatccaggagtggggccctttcgacctggtgatcggcggcagcccttgcaatgacctgagcatcgtgaacccagcccggaagggcctgtacgagggaaccggcagactgttcttcgagttttacagactgctgcacgacgcccggcctaaggaaggcgacgaccggcccttcttttggctgttcgagaatgtggtggccatgggagtcagcgacaagcgggatattagccggttcctggagagcaaccccgtgatgatcgatgccaaggaagtgagcgccgcccaccgggccagatacttctggggcaatctgcctggcatgaacagacccctggccagcaccgtgaacgacaagctggagctgcaggagtgcctggagcacggccggatcgccaagttcagcaaggtgagaaccatcaccacccgaagcaacagcatcaaacaaggcaaggaccagcactttcctgtgttcatgaacgagaaggaggacatcctgtggtgtaccgagatggagagagtgttcgggttcccagtccactacacagatgtcagcaacatgtctagactggccagacagagactgctgggaagaagctggtccgtccctgtgatcagacacctgttcgcccctctgaaggagtacttcgcctgcgtgagcagcggcaacagcaacgccaacagccggggccccagcttctctagcggcctggtgccactgtccctgagagggagccacatgggccccatggagatctacaaaaccgtgagcgcctggaagcggcagcctgtgcgcgtgctgagcctgtttcggaatatcgataaagtcctgaaaagcctgggattcctggagagcggctctggctccggcggtggcaccctgaagtacgtggaggatgtgacaaacgtggtcagacgggatgtggagaagtggggccccttcgatctggtgtacggcagcacccaacccctgggcagctcttgtgaccggtgccctggctggtacatgtttcagttccaccggatcctgcagtacgccctgccgagacaggagtcccagcggccattcttttggattttcatggacaacttgctgctgaccgaggatgaccaggaaactaccactcggttcctgcagaccgaagccgtgaccctgcaggacgtgagaggccgggactaccagaacgccatgcgggtgtggtccaacatccctggactgaaaagcaagcacgcacctctgacccctaaagaagaggagtacctgcaggcccaggtgcggagcagaagcaagctggacgcccctaaggtggatctgctggtgaagaattgcctcctgcccctgagagagtacttcaagtatttcagccagaatagtctgcccctgggcggcccaagcagcggcgcccctcctcccagcggcggcagcccagccggctccccaacctctaccgaggagggcacctctgagtccgccacccccgagagcggccctggcacctccaccgagcccagcgagggcagcgcacccggcagccctgccggcagccccacctccacagaggagggaaccagcaccgagcccagcgaaggcagcgccccaggcaccagcaccgagcctagtgagggcggctctggcggcggcagcgcccaggagattaaacggatcaacaagatcagaagaagacttgtgaaagacagcaacaccaagaaggccggcaagacaggccccatgaaaaccctgctggttagagtgatgacacccgatctgagagagcggctggaaaacctgagaaagaagcctgaaaatatcccccagcccatcagcaatacatctagagccaacctgaataagctgctgaccgattacaccgaaatgaagaaggcgatcctgcatgtgtactgggaagagttccagaaggaccctgtgggcctgatgagccgggtggcccagcctgccagcaagaagatcgatcagaacaagctgaaacctgagatggacgagaagggcaacctgaccaccgccggctttgcctgctctcagtgtggccagcccctgttcgtgtacaagctggagcaggtgtctgagaagggcaaggcttacaccaactacttcggacggtgcaatgtggccgagcacgaaaagctgatcctgctggcccagctgaagcccgagaaggatagcgacgaagccgtgacatatagcctgggaaagtttgggcagagggccctggatttctacagcattcatgtgaccaaggagtccacccaccccgtgaagcccctggcccagatcgccggaaacagatacgcctccggacctgtgggaaaggccctgagcgacgcatgtatgggcacaatcgcctccttcctgtctaagtaccaggacatcatcatcgaacaccagaaggtggtgaagggcaaccagaagagactggagagcctgcgggagctggccggcaaggaaaacctggaataccctagcgtgaccctgccacctcagcctcacaccaaggagggcgttgatgcctacaacgaagtgatcgcccgggtgcgaatgtgggtgaacctgaacctgtggcagaagctgaagctaagcagagatgatgccaagcctctgctgagactgaagggattcccttcctttcctctggtcgagagacaggccaacgaagtggactggtgggacatggtgtgtaacgtgaagaagctgatcaacgagaaaaaggaggatggcaaggtgttttggcagaatctggctggctacaagagacaggaagccctgagaccatacctgagcagcgaggaagatcggaagaagggaaagaaattcgctcggtaccagctgggcgacctgctgctgcacctggaaaagaagcacggcgaggactggggaaaggtgtacgacgaggcctgggagcggattgacaagaaagtggaaggcctgagcaagcacatcaagctggaagaggaacggagaagcgaggacgcccagagcaaggccgccctgaccgactggctgcgggctaaggccagcttcgtgatcgagggcctgaaggaggccgacaaggacgagttctgcagatgcgagctgaagctgcagaagtggtacggggacctgcggggaaagcccttcgccatcgaagccgagaacagcatcctggacatcagcggcttcagcaagcagtacaactgtgccttcatctggcagaaggacggcgtgaagaagctgaacctgtacctgatcatcaactacttcaagggcggcaagctgcggttcaagaagatcaaacctgaagccttcgaagccaacagattctacaccgtgatcaacaaaaagagcggcgagatcgtgcccatggaggtgaacttcaacttcgacgaccccaacctgatcatcctgcctctggcctttggcaagagacagggcagagaattcatctggaacgacctgctgtccctggaaaccggcagcctgaagctggccaacggaagagtgatcgagaagacactgtacaacagaagaacccggcaggatgagcctgccctgttcgtggccctgaccttcgagcggcgggaggtcctggactcctccaatatcaaaccaatgaacctgatcggcgtggcaagaggcgaaaacatccccgccgtgatcgccctgaccgaccccgagggctgcccactgagccggtttaaggatagcctgggaaacccaacccacatcctgagaatcggcgagagctataaggagaagcagcggaccatccaggccaagaaggaggtggagcagcggagagccggcggctacagccggaagtacgccagcaaagccaagaatctggcagacgatatggtgagaaacaccgctagagatctgctgtactacgccgtgacccaggatgccatgctgatcttcgccaacctgagccggggcttcggccggcagggcaagcggaccttcatggccgagagacagtacacacggatggaggactggctgaccgccaagctggcctacgagggcctgagcaagacctacctgtccaagacactggcccagtacacctccaagacatgcagcaactgtgggtttaccatcaccagcgccgactacgacagggtgctggagaagctgaagaagacagcaacaggctggatgaccacaattaacggcaaggagctgaaggtggagggccagattacctactacaacagatacaagagacagaacgtagtcaaggacctgtccgtcgagctggatagactgagcgaagaatctgtgaacaacgacatctcctcctggacaaagggcagaagcggagaagctctgagcctcctgaagaaaagattctcccatagacccgtgcaggagaagttcgtgtgcctgaactgcggcttcgagacacacgcagccgagcaagccgccctgaacatcgccagatcctggctgttcctgcggagccaggagtacaagaaataccagacaaacaagacaaccggcaacaccgataagagagccttcgtcgagacctggcagtccttttaccggaagaagcttaaggaggtgtggaaacctgccgtgcggtctggcggatctggcggaggctccacaagcacccagggcagcctgaccttcaaggacgtggccatcgagttcagccaggaggagtggaagtgcctggaccccgtgcagaaggccctgtacagggacgtgatgctggagaactacaggaacctgggcttcctgggcctgtgcctgcccgacctggacatcatcagcatgctggagcagggcaaggagccctggaccgtggtgagccaggtgaagatcaccaggaaccccaactgcggcgagtgcaccagccccaagaaaaagagaaaagtctaagctgccttctgcggggcttgccttctggccatgcccttcttctctcccttgcacctgtacctcttggtctttgaataaagcctgagtaggaaggctagcaaaaaaaaaaaaaaaaaaaaaaaaaaaaaaaaaaaaaaaaaaaaaaaaaaaaaaaaaaaaaaaaaaaaaaaaaaaaaaaa

SEQ ID NO: 6040 - RNA, 5797 nt, synthetic construct
  source 1..5797: mol_type = other RNA
aggaaataagagagaaaagaagagtaagaagaaatataagagccaccatggcccctaagaagaagcgtaaagtgagccggatggaacgcctcgtctacgaggtgcggcagaagtgcagaaacatcgaggacatctgcatctcctgcggatctctgaacgtgaccctggagcacccactgttcatcggcggcatgtgccagaactgtaaaaactgttttctggagtgtgcctatcaatacgacgatgacggctaccagagctactgcaccatctgttgcggcggaagagaggtgctgatgtgtggaaataacaactgctgccggtgcttctgcgtggaatgcgtggacctgctggtgggccccggcgccgcccaggccgctattaaggaagatccttggaactgctacatgtgcggccacaagggcacatacggcctgctgagacggagagaggactggcctagcagactgcagatgttcttcgccaataaccacgaccaggagttcgacccccctaaggtgtaccctcccgtccccgccgagaagagaaagcccatccgggtcctgagcctgttcgatggcatcgccaccggtctgctggtgctgaaggacctgggcatccaggtggataggtacattgcctccgaggtgtgcgaggactccatcaccgtgggaatggtgcgtcatcagggcaagatcatgtacgtgggcgacgtgcggagcgtgacacagaagcatatccaggagtggggccctttcgacctggtgatcggcggcagcccttgcaatgacctgagcatcgtgaacccagcccggaagggcctgtacgagggaaccggcagactgttcttcgagttttacagactgctgcacgacgcccggcctaaggaaggcgacgaccggcccttcttttggctgttcgagaatgtggtggccatgggagtcagcgacaagcgggatattagccggttcctggagagcaaccccgtgatgatcgatgccaaggaagtgagcgccgcccaccgggccagatacttctggggcaatctgcctggcatgaacagacccctggccagcaccgtgaacgacaagctggagctgcaggagtgcctggagcacggccggatcgccaagttcagcaaggtgagaaccatcaccacccgaagcaacagcatcaaacaaggcaaggaccagcactttcctgtgttcatgaacgagaaggaggacatcctgtggtgtaccgagatggagagagtgttcgggttcccagtccactacacagatgtcagcaacatgtctagactggccagacagagactgctgggaagaagctggtccgtccctgtgatcagacacctgttcgcccctctgaaggagtacttcgcctgcgtgagcagcggcaacagcaacgccaacagccggggccccagcttctctagcggcctggtgccactgtccctgagagggagccacatgggccccatggagatctacaaaaccgtgagcgcctggaagcggcagcctgtgcgcgtgctgagcctgtttcggaatatcgataaagtcctgaaaagcctgggattcctggagagcggctctggctccggcggtggcaccctgaagtacgtggaggatgtgacaaacgtggtcagacgggatgtggagaagtggggccccttcgatctggtgtacggcagcacccaacccctgggcagctcttgtgaccggtgccctggctggtacatgtttcagttccaccggatcctgcagtacgccctgccgagacaggagtcccagcggccattcttttggattttcatggacaacttgctgctgaccgaggatgaccaggaaactaccactcggttcctgcagaccgaagccgtgaccctgcaggacgtgagaggccgggactaccagaacgccatgcgggtgtggtccaacatccctggactgaaaagcaagcacgcacctctgacccctaaagaagaggagtacctgcaggcccaggtgcggagcagaagcaagctggacgcccctaaggtggatctgctggtgaagaattgcctcctgcccctgagagagtacttcaagtatttcagccagaatagtctgcccctgggcggcccaagcagcggcgcccctcctcccagcggcggcagcccagccggctccccaacctctaccgaggagggcacctctgagtccgccacccccgagagcggccctggcacctccaccgagcccagcgagggcagcgcacccggcagccctgccggcagccccacctccacagaggagggaaccagcaccgagcccagcgaaggcagcgccccaggcaccagcaccgagcctagtgagggcggctctggcggcggcagcgcccaggagattaaacggatcaacaagatcagaagaagacttgtgaaagacagcaacaccaagaaggccggcaagacaggccccatgaaaaccctgctggttagagtgatgacacccgatctgagagagcggctggaaaacctgagaaagaagcctgaaaatatcccccagcccatcagcaatacatctagagccaacctgaataagctgctgaccgattacaccgaaatgaagaaggcgatcctgcatgtgtactgggaagagttccagaaggaccctgtgggcctgatgagccgggtggcccagcctgccagcaagaagatcgatcagaacaagctgaaacctgagatggacgagaagggcaacctgaccaccgccggctttgcctgctctcagtgtggccagcccctgttcgtgtacaagctggagcaggtgtctgagaagggcaaggcttacaccaactacttcggacggtgcaatgtggccgagcacgaaaagctgatcctgctggcccagctgaagcccgagaaggatagcgacgaagccgtgacatatagcctgggaaagtttgggcagagggccctggatttctacagcattcatgtgaccaaggagtccacccaccccgtgaagcccctggcccagatcgccggaaacagatacgcctccggacctgtgggaaaggccctgagcgacgcatgtatgggcacaatcgcctccttcctgtctaagtaccaggacatcatcatcgaacaccagaaggtggtgaagggcaaccagaagagactggagagcctgcgggagctggccggcaaggaaaacctggaataccctagcgtgaccctgccacctcagcctcacaccaaggagggcgttgatgcctacaacgaagtgatcgcccgggtgcgaatgtgggtgaacctgaacctgtggcagaagctgaagctaagcagagatgatgccaagcctctgctgagactgaagggattcccttcctttcctctggtcgagagacaggccaacgaagtggactggtgggacatggtgtgtaacgtgaagaagctgatcaacgagaaaaaggaggatggcaaggtgttttggcagaatctggctggctacaagagacaggaagccctgagaccatacctgagcagcgaggaagatcggaagaagggaaagaaattcgctcggtaccagctgggcgacctgctgctgcacctggaaaagaagcacggcgaggactggggaaaggtgtacgacgaggcctgggagcggattgacaagaaagtggaaggcctgagcaagcacatcaagctggaagaggaacggagaagcgaggacgcccagagcaaggccgccctgaccgactggctgcgggctaaggccagcttcgtgatcgagggcctgaaggaggccgacaaggacgagttctgcagatgcgagctgaagctgcagaagtggtacggggacctgcggggaaagcccttcgccatcgaagccgagaacagcatcctggacatcagcggcttcagcaagcagtacaactgtgccttcatctggcagaaggacggcgtgaagaagctgaacctgtacctgatcatcaactacttcaagggcggcaagctgcggttcaagaagatcaaacctgaagccttcgaagccaacagattctacaccgtgatcaacaaaaagagcggcgagatcgtgcccatggaggtgaacttcaacttcgacgaccccaacctgatcatcctgcctctggcctttggcaagagacagggcagagaattcatctggaacgacctgctgtccctggaaaccggcagcctgaagctggccaacggaagagtgatcgagaagacactgtacaacagaagaacccggcaggatgagcctgccctgttcgtggccctgaccttcgagcggcgggaggtcctggactcctccaatatcaaaccaatgaacctgatcggcgtggcaagaggcgaaaacatccccgccgtgatcgccctgaccgaccccgagggctgcccactgagccggtttaaggatagcctgggaaacccaacccacatcctgagaatcggcgagagctataaggagaagcagcggaccatccaggccaagaaggaggtggagcagcggagagccggcggctacagccggaagtacgccagcaaagccaagaatctggcagacgatatggtgagaaacaccgctagagatctgctgtactacgccgtgacccaggatgccatgctgatcttcgccaacctgagccggggcttcggccggcagggcaagcggaccttcatggccgagagacagtacacacggatggaggactggctgaccgccaagctggcctacgagggcctgagcaagacctacctgtccaagacactggcccagtacacctccaagacatgcagcaactgtgggtttaccatcaccagcgccgactacgacagggtgctggagaagctgaagaagacagcaacaggctggatgaccacaattaacggcaaggagctgaaggtggagggccagattacctactacaacagatacaagagacagaacgtagtcaaggacctgtccgtcgagctggatagactgagcgaagaatctgtgaacaacgacatctcctcctggacaaagggcagaagcggagaagctctgagcctcctgaagaaaagattctcccatagacccgtgcaggagaagttcgtgtgcctgaactgcggcttcgagacacacgcagccgagcaagccgccctgaacatcgccagatcctggctgttcctgcggagccaggagtacaagaaataccagacaaacaagacaaccggcaacaccgataagagagccttcgtcgagacctggcagtccttttaccggaagaagcttaaggaggtgtggaaacctgccgtgcggtctggcggatctggcggaggctccacaagcttcaaggagctggtggtgttcagggacgtggccgtggagttctgcaaggaggagtgggagtgcctgggccccgagcagaggagcctgtacagggacgtgatgctggagaactacagcaacttcgtgagcctgggcctggccatcagcaagcccaccatcatcagcctgctggagcagggcaaggagccctggatcgtggagcaggccggctggtaccccgacctgctgagcgagaacgaggccaccagccccaagaaaaagagaaaagtctaagctgccttctgcggggcttgccttctggccatgcccttcttctctcccttgcacctgtacctcttggtctttgaataaagcctgagtaggaaggctagcaaaaaaaaaaaaaaaaaaaaaaaaaaaaaaaaaaaaaaaaaaaaaaaaaaaaaaaaaaaaaaaaaaaaaaaaaaaaaaaa

SEQ ID NO: 6041 - RNA, 5797 nt, synthetic construct
  source 1..5797: mol_type = other RNA
aggaaataagagagaaaagaagagtaagaagaaatataagagccaccatggcccctaagaagaagcgtaaagtgagccggatggaacgcctcgtctacgaggtgcggcagaagtgcagaaacatcgaggacatctgcatctcctgcggatctctgaacgtgaccctggagcacccactgttcatcggcggcatgtgccagaactgtaaaaactgttttctggagtgtgcctatcaatacgacgatgacggctaccagagctactgcaccatctgttgcggcggaagagaggtgctgatgtgtggaaataacaactgctgccggtgcttctgcgtggaatgcgtggacctgctggtgggccccggcgccgcccaggccgctattaaggaagatccttggaactgctacatgtgcggccacaagggcacatacggcctgctgagacggagagaggactggcctagcagactgcagatgttcttcgccaataaccacgaccaggagttcgacccccctaaggtgtaccctcccgtccccgccgagaagagaaagcccatccgggtcctgagcctgttcgatggcatcgccaccggtctgctggtgctgaaggacctgggcatccaggtggataggtacattgcctccgaggtgtgcgaggactccatcaccgtgggaatggtgcgtcatcagggcaagatcatgtacgtgggcgacgtgcggagcgtgacacagaagcatatccaggagtggggccctttcgacctggtgatcggcggcagcccttgcaatgacctgagcatcgtgaacccagcccggaagggcctgtacgagggaaccggcagactgttcttcgagttttacagactgctgcacgacgcccggcctaaggaaggcgacgaccggcccttcttttggctgttcgagaatgtggtggccatgggagtcagcgacaagcgggatattagccggttcctggagagcaaccccgtgatgatcgatgccaaggaagtgagcgccgcccaccgggccagatacttctggggcaatctgcctggcatgaacagacccctggccagcaccgtgaacgacaagctggagctgcaggagtgcctggagcacggccggatcgccaagttcagcaaggtgagaaccatcaccacccgaagcaacagcatcaaacaaggcaaggaccagcactttcctgtgttcatgaacgagaaggaggacatcctgtggtgtaccgagatggagagagtgttcgggttcccagtccactacacagatgtcagcaacatgtctagactggccagacagagactgctgggaagaagctggtccgtccctgtgatcagacacctgttcgcccctctgaaggagtacttcgcctgcgtgagcagcggcaacagcaacgccaacagccggggccccagcttctctagcggcctggtgccactgtccctgagagggagccacatgggccccatggagatctacaaaaccgtgagcgcctggaagcggcagcctgtgcgcgtgctgagcctgtttcggaatatcgataaagtcctgaaaagcctgggattcctggagagcggctctggctccggcggtggcaccctgaagtacgtggaggatgtgacaaacgtggtcagacgggatgtggagaagtggggccccttcgatctggtgtacggcagcacccaacccctgggcagctcttgtgaccggtgccctggctggtacatgtttcagttccaccggatcctgcagtacgccctgccgagacaggagtcccagcggccattcttttggattttcatggacaacttgctgctgaccgaggatgaccaggaaactaccactcggttcctgcagaccgaagccgtgaccctgcaggacgtgagaggccgggactaccagaacgccatgcgggtgtggtccaacatccctggactgaaaagcaagcacgcacctctgacccctaaagaagaggagtacctgcaggcccaggtgcggagcagaagcaagctggacgcccctaaggtggatctgctggtgaagaattgcctcctgcccctgagagagtacttcaagtatttcagccagaatagtctgcccctgggcggcccaagcagcggcgcccctcctcccagcggcggcagcccagccggctccccaacctctaccgaggagggcacctctgagtccgccacccccgagagcggccctggcacctccaccgagcccagcgagggcagcgcacccggcagccctgccggcagccccacctccacagaggagggaaccagcaccgagcccagcgaaggcagcgccccaggcaccagcaccgagcctagtgagggcggctctggcggcggcagcgcccaggagattaaacggatcaacaagatcagaagaagacttgtgaaagacagcaacaccaagaaggccggcaagacaggccccatgaaaaccctgctggttagagtgatgacacccgatctgagagagcggctggaaaacctgagaaagaagcctgaaaatatcccccagcccatcagcaatacatctagagccaacctgaataagctgctgaccgattacaccgaaatgaagaaggcgatcctgcatgtgtactgggaagagttccagaaggaccctgtgggcctgatgagccgggtggcccagcctgccagcaagaagatcgatcagaacaagctgaaacctgagatggacgagaagggcaacctgaccaccgccggctttgcctgctctcagtgtggccagcccctgttcgtgtacaagctggagcaggtgtctgagaagggcaaggcttacaccaactacttcggacggtgcaatgtggccgagcacgaaaagctgatcctgctggcccagctgaagcccgagaaggatagcgacgaagccgtgacatatagcctgggaaagtttgggcagagggccctggatttctacagcattcatgtgaccaaggagtccacccaccccgtgaagcccctggcccagatcgccggaaacagatacgcctccggacctgtgggaaaggccctgagcgacgcatgtatgggcacaatcgcctccttcctgtctaagtaccaggacatcatcatcgaacaccagaaggtggtgaagggcaaccagaagagactggagagcctgcgggagctggccggcaaggaaaacctggaataccctagcgtgaccctgccacctcagcctcacaccaaggagggcgttgatgcctacaacgaagtgatcgcccgggtgcgaatgtgggtgaacctgaacctgtggcagaagctgaagctaagcagagatgatgccaagcctctgctgagactgaagggattcccttcctttcctctggtcgagagacaggccaacgaagtggactggtgggacatggtgtgtaacgtgaagaagctgatcaacgagaaaaaggaggatggcaaggtgttttggcagaatctggctggctacaagagacaggaagccctgagaccatacctgagcagcgaggaagatcggaagaagggaaagaaattcgctcggtaccagctgggcgacctgctgctgcacctggaaaagaagcacggcgaggactggggaaaggtgtacgacgaggcctgggagcggattgacaagaaagtggaaggcctgagcaagcacatcaagctggaagaggaacggagaagcgaggacgcccagagcaaggccgccctgaccgactggctgcgggctaaggccagcttcgtgatcgagggcctgaaggaggccgacaaggacgagttctgcagatgcgagctgaagctgcagaagtggtacggggacctgcggggaaagcccttcgccatcgaagccgagaacagcatcctggacatcagcggcttcagcaagcagtacaactgtgccttcatctggcagaaggacggcgtgaagaagctgaacctgtacctgatcatcaactacttcaagggcggcaagctgcggttcaagaagatcaaacctgaagccttcgaagccaacagattctacaccgtgatcaacaaaaagagcggcgagatcgtgcccatggaggtgaacttcaacttcgacgaccccaacctgatcatcctgcctctggcctttggcaagagacagggcagagaattcatctggaacgacctgctgtccctggaaaccggcagcctgaagctggccaacggaagagtgatcgagaagacactgtacaacagaagaacccggcaggatgagcctgccctgttcgtggccctgaccttcgagcggcgggaggtcctggactcctccaatatcaaaccaatgaacctgatcggcgtggcaagaggcgaaaacatccccgccgtgatcgccctgaccgaccccgagggctgcccactgagccggtttaaggatagcctgggaaacccaacccacatcctgagaatcggcgagagctataaggagaagcagcggaccatccaggccaagaaggaggtggagcagcggagagccggcggctacagccggaagtacgccagcaaagccaagaatctggcagacgatatggtgagaaacaccgctagagatctgctgtactacgccgtgacccaggatgccatgctgatcttcgccaacctgagccggggcttcggccggcagggcaagcggaccttcatggccgagagacagtacacacggatggaggactggctgaccgccaagctggcctacgagggcctgagcaagacctacctgtccaagacactggcccagtacacctccaagacatgcagcaactgtgggtttaccatcaccagcgccgactacgacagggtgctggagaagctgaagaagacagcaacaggctggatgaccacaattaacggcaaggagctgaaggtggagggccagattacctactacaacagatacaagagacagaacgtagtcaaggacctgtccgtcgagctggatagactgagcgaagaatctgtgaacaacgacatctcctcctggacaaagggcagaagcggagaagctctgagcctcctgaagaaaagattctcccatagacccgtgcaggagaagttcgtgtgcctgaactgcggcttcgagacacacgcagccgagcaagccgccctgaacatcgccagatcctggctgttcctgcggagccaggagtacaagaaataccagacaaacaagacaaccggcaacaccgataagagagccttcgtcgagacctggcagtccttttaccggaagaagcttaaggaggtgtggaaacctgccgtgcggtctggcggatctggcggaggctccacaagccccctggagaccgtgaccttcggcgacgtggtgctggacttcacccaggaggagtgggccctgctggacaccagccagaagaagctgttcagggacgtgatgctggagaacatccaccacctggtgagcgtgggctaccagatcagcaagagcgacgtgatcctgcagctggagcagggcaaggagctgtggagggagggcgagggcaggccccagggcaggggccccggcagcgagagccccaccagccccaagaaaaagagaaaagtctaagctgccttctgcggggcttgccttctggccatgcccttcttctctcccttgcacctgtacctcttggtctttgaataaagcctgagtaggaaggctagcaaaaaaaaaaaaaaaaaaaaaaaaaaaaaaaaaaaaaaaaaaaaaaaaaaaaaaaaaaaaaaaaaaaaaaaaaaaaaaaa

SEQ ID NO: 6042 - RNA, 5797 nt, synthetic construct
  source 1..5797: mol_type = other RNA
aggaaataagagagaaaagaagagtaagaagaaatataagagccaccatggcccctaagaagaagcgtaaagtgagccggatggaacgcctcgtctacgaggtgcggcagaagtgcagaaacatcgaggacatctgcatctcctgcggatctctgaacgtgaccctggagcacccactgttcatcggcggcatgtgccagaactgtaaaaactgttttctggagtgtgcctatcaatacgacgatgacggctaccagagctactgcaccatctgttgcggcggaagagaggtgctgatgtgtggaaataacaactgctgccggtgcttctgcgtggaatgcgtggacctgctggtgggccccggcgccgcccaggccgctattaaggaagatccttggaactgctacatgtgcggccacaagggcacatacggcctgctgagacggagagaggactggcctagcagactgcagatgttcttcgccaataaccacgaccaggagttcgacccccctaaggtgtaccctcccgtccccgccgagaagagaaagcccatccgggtcctgagcctgttcgatggcatcgccaccggtctgctggtgctgaaggacctgggcatccaggtggataggtacattgcctccgaggtgtgcgaggactccatcaccgtgggaatggtgcgtcatcagggcaagatcatgtacgtgggcgacgtgcggagcgtgacacagaagcatatccaggagtggggccctttcgacctggtgatcggcggcagcccttgcaatgacctgagcatcgtgaacccagcccggaagggcctgtacgagggaaccggcagactgttcttcgagttttacagactgctgcacgacgcccggcctaaggaaggcgacgaccggcccttcttttggctgttcgagaatgtggtggccatgggagtcagcgacaagcgggatattagccggttcctggagagcaaccccgtgatgatcgatgccaaggaagtgagcgccgcccaccgggccagatacttctggggcaatctgcctggcatgaacagacccctggccagcaccgtgaacgacaagctggagctgcaggagtgcctggagcacggccggatcgccaagttcagcaaggtgagaaccatcaccacccgaagcaacagcatcaaacaaggcaaggaccagcactttcctgtgttcatgaacgagaaggaggacatcctgtggtgtaccgagatggagagagtgttcgggttcccagtccactacacagatgtcagcaacatgtctagactggccagacagagactgctgggaagaagctggtccgtccctgtgatcagacacctgttcgcccctctgaaggagtacttcgcctgcgtgagcagcggcaacagcaacgccaacagccggggccccagcttctctagcggcctggtgccactgtccctgagagggagccacatgggccccatggagatctacaaaaccgtgagcgcctggaagcggcagcctgtgcgcgtgctgagcctgtttcggaatatcgataaagtcctgaaaagcctgggattcctggagagcggctctggctccggcggtggcaccctgaagtacgtggaggatgtgacaaacgtggtcagacgggatgtggagaagtggggccccttcgatctggtgtacggcagcacccaacccctgggcagctcttgtgaccggtgccctggctggtacatgtttcagttccaccggatcctgcagtacgccctgccgagacaggagtcccagcggccattcttttggattttcatggacaacttgctgctgaccgaggatgaccaggaaactaccactcggttcctgcagaccgaagccgtgaccctgcaggacgtgagaggccgggactaccagaacgccatgcgggtgtggtccaacatccctggactgaaaagcaagcacgcacctctgacccctaaagaagaggagtacctgcaggcccaggtgcggagcagaagcaagctggacgcccctaaggtggatctgctggtgaagaattgcctcctgcccctgagagagtacttcaagtatttcagccagaatagtctgcccctgggcggcccaagcagcggcgcccctcctcccagcggcggcagcccagccggctccccaacctctaccgaggagggcacctctgagtccgccacccccgagagcggccctggcacctccaccgagcccagcgagggcagcgcacccggcagccctgccggcagccccacctccacagaggagggaaccagcaccgagcccagcgaaggcagcgccccaggcaccagcaccgagcctagtgagggcggctctggcggcggcagcgcccaggagattaaacggatcaacaagatcagaagaagacttgtgaaagacagcaacaccaagaaggccggcaagacaggccccatgaaaaccctgctggttagagtgatgacacccgatctgagagagcggctggaaaacctgagaaagaagcctgaaaatatcccccagcccatcagcaatacatctagagccaacctgaataagctgctgaccgattacaccgaaatgaagaaggcgatcctgcatgtgtactgggaagagttccagaaggaccctgtgggcctgatgagccgggtggcccagcctgccagcaagaagatcgatcagaacaagctgaaacctgagatggacgagaagggcaacctgaccaccgccggctttgcctgctctcagtgtggccagcccctgttcgtgtacaagctggagcaggtgtctgagaagggcaaggcttacaccaactacttcggacggtgcaatgtggccgagcacgaaaagctgatcctgctggcccagctgaagcccgagaaggatagcgacgaagccgtgacatatagcctgggaaagtttgggcagagggccctggatttctacagcattcatgtgaccaaggagtccacccaccccgtgaagcccctggcccagatcgccggaaacagatacgcctccggacctgtgggaaaggccctgagcgacgcatgtatgggcacaatcgcctccttcctgtctaagtaccaggacatcatcatcgaacaccagaaggtggtgaagggcaaccagaagagactggagagcctgcgggagctggccggcaaggaaaacctggaataccctagcgtgaccctgccacctcagcctcacaccaaggagggcgttgatgcctacaacgaagtgatcgcccgggtgcgaatgtgggtgaacctgaacctgtggcagaagctgaagctaagcagagatgatgccaagcctctgctgagactgaagggattcccttcctttcctctggtcgagagacaggccaacgaagtggactggtgggacatggtgtgtaacgtgaagaagctgatcaacgagaaaaaggaggatggcaaggtgttttggcagaatctggctggctacaagagacaggaagccctgagaccatacctgagcagcgaggaagatcggaagaagggaaagaaattcgctcggtaccagctgggcgacctgctgctgcacctggaaaagaagcacggcgaggactggggaaaggtgtacgacgaggcctgggagcggattgacaagaaagtggaaggcctgagcaagcacatcaagctggaagaggaacggagaagcgaggacgcccagagcaaggccgccctgaccgactggctgcgggctaaggccagcttcgtgatcgagggcctgaaggaggccgacaaggacgagttctgcagatgcgagctgaagctgcagaagtggtacggggacctgcggggaaagcccttcgccatcgaagccgagaacagcatcctggacatcagcggcttcagcaagcagtacaactgtgccttcatctggcagaaggacggcgtgaagaagctgaacctgtacctgatcatcaactacttcaagggcggcaagctgcggttcaagaagatcaaacctgaagccttcgaagccaacagattctacaccgtgatcaacaaaaagagcggcgagatcgtgcccatggaggtgaacttcaacttcgacgaccccaacctgatcatcctgcctctggcctttggcaagagacagggcagagaattcatctggaacgacctgctgtccctggaaaccggcagcctgaagctggccaacggaagagtgatcgagaagacactgtacaacagaagaacccggcaggatgagcctgccctgttcgtggccctgaccttcgagcggcgggaggtcctggactcctccaatatcaaaccaatgaacctgatcggcgtggcaagaggcgaaaacatccccgccgtgatcgccctgaccgaccccgagggctgcccactgagccggtttaaggatagcctgggaaacccaacccacatcctgagaatcggcgagagctataaggagaagcagcggaccatccaggccaagaaggaggtggagcagcggagagccggcggctacagccggaagtacgccagcaaagccaagaatctggcagacgatatggtgagaaacaccgctagagatctgctgtactacgccgtgacccaggatgccatgctgatcttcgccaacctgagccggggcttcggccggcagggcaagcggaccttcatggccgagagacagtacacacggatggaggactggctgaccgccaagctggcctacgagggcctgagcaagacctacctgtccaagacactggcccagtacacctccaagacatgcagcaactgtgggtttaccatcaccagcgccgactacgacagggtgctggagaagctgaagaagacagcaacaggctggatgaccacaattaacggcaaggagctgaaggtggagggccagattacctactacaacagatacaagagacagaacgtagtcaaggacctgtccgtcgagctggatagactgagcgaagaatctgtgaacaacgacatctcctcctggacaaagggcagaagcggagaagctctgagcctcctgaagaaaagattctcccatagacccgtgcaggagaagttcgtgtgcctgaactgcggcttcgagacacacgcagccgagcaagccgccctgaacatcgccagatcctggctgttcctgcggagccaggagtacaagaaataccagacaaacaagacaaccggcaacaccgataagagagccttcgtcgagacctggcagtccttttaccggaagaagcttaaggaggtgtggaaacctgccgtgcggtctggcggatctggcggaggctccacaagcagccagggcctgctgaccttcaaggacgtggccatcgagttcagccccgaggagtgggagtacctggaccccccccagaggatgctgtacaggaccgtgatgctggagaaccacaggaacctggtgttcctgggcctggccgtgagcaagcccgacctgatcatgtgcctggagcagaggagggagccctggaacgtgaagagccacagcaagctggccaagagccccgccgtgaccagccacaccagccccaagaaaaagagaaaagtctaagctgccttctgcggggcttgccttctggccatgcccttcttctctcccttgcacctgtacctcttggtctttgaataaagcctgagtaggaaggctagcaaaaaaaaaaaaaaaaaaaaaaaaaaaaaaaaaaaaaaaaaaaaaaaaaaaaaaaaaaaaaaaaaaaaaaaaaaaaaaaa

SEQ ID NO: 6043 - RNA, 5797 nt, synthetic construct
  source 1..5797: mol_type = other RNA
aggaaataagagagaaaagaagagtaagaagaaatataagagccaccatggcccctaagaagaagcgtaaagtgagccggatggaacgcctcgtctacgaggtgcggcagaagtgcagaaacatcgaggacatctgcatctcctgcggatctctgaacgtgaccctggagcacccactgttcatcggcggcatgtgccagaactgtaaaaactgttttctggagtgtgcctatcaatacgacgatgacggctaccagagctactgcaccatctgttgcggcggaagagaggtgctgatgtgtggaaataacaactgctgccggtgcttctgcgtggaatgcgtggacctgctggtgggccccggcgccgcccaggccgctattaaggaagatccttggaactgctacatgtgcggccacaagggcacatacggcctgctgagacggagagaggactggcctagcagactgcagatgttcttcgccaataaccacgaccaggagttcgacccccctaaggtgtaccctcccgtccccgccgagaagagaaagcccatccgggtcctgagcctgttcgatggcatcgccaccggtctgctggtgctgaaggacctgggcatccaggtggataggtacattgcctccgaggtgtgcgaggactccatcaccgtgggaatggtgcgtcatcagggcaagatcatgtacgtgggcgacgtgcggagcgtgacacagaagcatatccaggagtggggccctttcgacctggtgatcggcggcagcccttgcaatgacctgagcatcgtgaacccagcccggaagggcctgtacgagggaaccggcagactgttcttcgagttttacagactgctgcacgacgcccggcctaaggaaggcgacgaccggcccttcttttggctgttcgagaatgtggtggccatgggagtcagcgacaagcgggatattagccggttcctggagagcaaccccgtgatgatcgatgccaaggaagtgagcgccgcccaccgggccagatacttctggggcaatctgcctggcatgaacagacccctggccagcaccgtgaacgacaagctggagctgcaggagtgcctggagcacggccggatcgccaagttcagcaaggtgagaaccatcaccacccgaagcaacagcatcaaacaaggcaaggaccagcactttcctgtgttcatgaacgagaaggaggacatcctgtggtgtaccgagatggagagagtgttcgggttcccagtccactacacagatgtcagcaacatgtctagactggccagacagagactgctgggaagaagctggtccgtccctgtgatcagacacctgttcgcccctctgaaggagtacttcgcctgcgtgagcagcggcaacagcaacgccaacagccggggccccagcttctctagcggcctggtgccactgtccctgagagggagccacatgggccccatggagatctacaaaaccgtgagcgcctggaagcggcagcctgtgcgcgtgctgagcctgtttcggaatatcgataaagtcctgaaaagcctgggattcctggagagcggctctggctccggcggtggcaccctgaagtacgtggaggatgtgacaaacgtggtcagacgggatgtggagaagtggggccccttcgatctggtgtacggcagcacccaacccctgggcagctcttgtgaccggtgccctggctggtacatgtttcagttccaccggatcctgcagtacgccctgccgagacaggagtcccagcggccattcttttggattttcatggacaacttgctgctgaccgaggatgaccaggaaactaccactcggttcctgcagaccgaagccgtgaccctgcaggacgtgagaggccgggactaccagaacgccatgcgggtgtggtccaacatccctggactgaaaagcaagcacgcacctctgacccctaaagaagaggagtacctgcaggcccaggtgcggagcagaagcaagctggacgcccctaaggtggatctgctggtgaagaattgcctcctgcccctgagagagtacttcaagtatttcagccagaatagtctgcccctgggcggcccaagcagcggcgcccctcctcccagcggcggcagcccagccggctccccaacctctaccgaggagggcacctctgagtccgccacccccgagagcggccctggcacctccaccgagcccagcgagggcagcgcacccggcagccctgccggcagccccacctccacagaggagggaaccagcaccgagcccagcgaaggcagcgccccaggcaccagcaccgagcctagtgagggcggctctggcggcggcagcgcccaggagattaaacggatcaacaagatcagaagaagacttgtgaaagacagcaacaccaagaaggccggcaagacaggccccatgaaaaccctgctggttagagtgatgacacccgatctgagagagcggctggaaaacctgagaaagaagcctgaaaatatcccccagcccatcagcaatacatctagagccaacctgaataagctgctgaccgattacaccgaaatgaagaaggcgatcctgcatgtgtactgggaagagttccagaaggaccctgtgggcctgatgagccgggtggcccagcctgccagcaagaagatcgatcagaacaagctgaaacctgagatggacgagaagggcaacctgaccaccgccggctttgcctgctctcagtgtggccagcccctgttcgtgtacaagctggagcaggtgtctgagaagggcaaggcttacaccaactacttcggacggtgcaatgtggccgagcacgaaaagctgatcctgctggcccagctgaagcccgagaaggatagcgacgaagccgtgacatatagcctgggaaagtttgggcagagggccctggatttctacagcattcatgtgaccaaggagtccacccaccccgtgaagcccctggcccagatcgccggaaacagatacgcctccggacctgtgggaaaggccctgagcgacgcatgtatgggcacaatcgcctccttcctgtctaagtaccaggacatcatcatcgaacaccagaaggtggtgaagggcaaccagaagagactggagagcctgcgggagctggccggcaaggaaaacctggaataccctagcgtgaccctgccacctcagcctcacaccaaggagggcgttgatgcctacaacgaagtgatcgcccgggtgcgaatgtgggtgaacctgaacctgtggcagaagctgaagctaagcagagatgatgccaagcctctgctgagactgaagggattcccttcctttcctctggtcgagagacaggccaacgaagtggactggtgggacatggtgtgtaacgtgaagaagctgatcaacgagaaaaaggaggatggcaaggtgttttggcagaatctggctggctacaagagacaggaagccctgagaccatacctgagcagcgaggaagatcggaagaagggaaagaaattcgctcggtaccagctgggcgacctgctgctgcacctggaaaagaagcacggcgaggactggggaaaggtgtacgacgaggcctgggagcggattgacaagaaagtggaaggcctgagcaagcacatcaagctggaagaggaacggagaagcgaggacgcccagagcaaggccgccctgaccgactggctgcgggctaaggccagcttcgtgatcgagggcctgaaggaggccgacaaggacgagttctgcagatgcgagctgaagctgcagaagtggtacggggacctgcggggaaagcccttcgccatcgaagccgagaacagcatcctggacatcagcggcttcagcaagcagtacaactgtgccttcatctggcagaaggacggcgtgaagaagctgaacctgtacctgatcatcaactacttcaagggcggcaagctgcggttcaagaagatcaaacctgaagccttcgaagccaacagattctacaccgtgatcaacaaaaagagcggcgagatcgtgcccatggaggtgaacttcaacttcgacgaccccaacctgatcatcctgcctctggcctttggcaagagacagggcagagaattcatctggaacgacctgctgtccctggaaaccggcagcctgaagctggccaacggaagagtgatcgagaagacactgtacaacagaagaacccggcaggatgagcctgccctgttcgtggccctgaccttcgagcggcgggaggtcctggactcctccaatatcaaaccaatgaacctgatcggcgtggcaagaggcgaaaacatccccgccgtgatcgccctgaccgaccccgagggctgcccactgagccggtttaaggatagcctgggaaacccaacccacatcctgagaatcggcgagagctataaggagaagcagcggaccatccaggccaagaaggaggtggagcagcggagagccggcggctacagccggaagtacgccagcaaagccaagaatctggcagacgatatggtgagaaacaccgctagagatctgctgtactacgccgtgacccaggatgccatgctgatcttcgccaacctgagccggggcttcggccggcagggcaagcggaccttcatggccgagagacagtacacacggatggaggactggctgaccgccaagctggcctacgagggcctgagcaagacctacctgtccaagacactggcccagtacacctccaagacatgcagcaactgtgggtttaccatcaccagcgccgactacgacagggtgctggagaagctgaagaagacagcaacaggctggatgaccacaattaacggcaaggagctgaaggtggagggccagattacctactacaacagatacaagagacagaacgtagtcaaggacctgtccgtcgagctggatagactgagcgaagaatctgtgaacaacgacatctcctcctggacaaagggcagaagcggagaagctctgagcctcctgaagaaaagattctcccatagacccgtgcaggagaagttcgtgtgcctgaactgcggcttcgagacacacgcagccgagcaagccgccctgaacatcgccagatcctggctgttcctgcggagccaggagtacaagaaataccagacaaacaagacaaccggcaacaccgataagagagccttcgtcgagacctggcagtccttttaccggaagaagcttaaggaggtgtggaaacctgccgtgcggtctggcggatctggcggaggctccacaagcagccaggagcccgtgaccttcgaggacgtggccgtgtacttcacccagaaccagtgggccagcctggaccccatgcagagggccctgtacctggaggtgatgctggagaactacgccaacatcaccagcctggccgccctgcccttccccaagcccgacctgatcctgcagctggagcagggcggcgccccctggggcctggacccctggacccccctggagggcgaggccctgggcggcgtgaccagccccaagaaaaagagaaaagtctaagctgccttctgcggggcttgccttctggccatgcccttcttctctcccttgcacctgtacctcttggtctttgaataaagcctgagtaggaaggctagcaaaaaaaaaaaaaaaaaaaaaaaaaaaaaaaaaaaaaaaaaaaaaaaaaaaaaaaaaaaaaaaaaaaaaaaaaaaaaaaa

SEQ ID NO: 6044 - RNA, 5797 nt, synthetic construct
  source 1..5797: mol_type = other RNA
aggaaataagagagaaaagaagagtaagaagaaatataagagccaccatggcccctaagaagaagcgtaaagtgagccggatggaacgcctcgtctacgaggtgcggcagaagtgcagaaacatcgaggacatctgcatctcctgcggatctctgaacgtgaccctggagcacccactgttcatcggcggcatgtgccagaactgtaaaaactgttttctggagtgtgcctatcaatacgacgatgacggctaccagagctactgcaccatctgttgcggcggaagagaggtgctgatgtgtggaaataacaactgctgccggtgcttctgcgtggaatgcgtggacctgctggtgggccccggcgccgcccaggccgctattaaggaagatccttggaactgctacatgtgcggccacaagggcacatacggcctgctgagacggagagaggactggcctagcagactgcagatgttcttcgccaataaccacgaccaggagttcgacccccctaaggtgtaccctcccgtccccgccgagaagagaaagcccatccgggtcctgagcctgttcgatggcatcgccaccggtctgctggtgctgaaggacctgggcatccaggtggataggtacattgcctccgaggtgtgcgaggactccatcaccgtgggaatggtgcgtcatcagggcaagatcatgtacgtgggcgacgtgcggagcgtgacacagaagcatatccaggagtggggccctttcgacctggtgatcggcggcagcccttgcaatgacctgagcatcgtgaacccagcccggaagggcctgtacgagggaaccggcagactgttcttcgagttttacagactgctgcacgacgcccggcctaaggaaggcgacgaccggcccttcttttggctgttcgagaatgtggtggccatgggagtcagcgacaagcgggatattagccggttcctggagagcaaccccgtgatgatcgatgccaaggaagtgagcgccgcccaccgggccagatacttctggggcaatctgcctggcatgaacagacccctggccagcaccgtgaacgacaagctggagctgcaggagtgcctggagcacggccggatcgccaagttcagcaaggtgagaaccatcaccacccgaagcaacagcatcaaacaaggcaaggaccagcactttcctgtgttcatgaacgagaaggaggacatcctgtggtgtaccgagatggagagagtgttcgggttcccagtccactacacagatgtcagcaacatgtctagactggccagacagagactgctgggaagaagctggtccgtccctgtgatcagacacctgttcgcccctctgaaggagtacttcgcctgcgtgagcagcggcaacagcaacgccaacagccggggccccagcttctctagcggcctggtgccactgtccctgagagggagccacatgggccccatggagatctacaaaaccgtgagcgcctggaagcggcagcctgtgcgcgtgctgagcctgtttcggaatatcgataaagtcctgaaaagcctgggattcctggagagcggctctggctccggcggtggcaccctgaagtacgtggaggatgtgacaaacgtggtcagacgggatgtggagaagtggggccccttcgatctggtgtacggcagcacccaacccctgggcagctcttgtgaccggtgccctggctggtacatgtttcagttccaccggatcctgcagtacgccctgccgagacaggagtcccagcggccattcttttggattttcatggacaacttgctgctgaccgaggatgaccaggaaactaccactcggttcctgcagaccgaagccgtgaccctgcaggacgtgagaggccgggactaccagaacgccatgcgggtgtggtccaacatccctggactgaaaagcaagcacgcacctctgacccctaaagaagaggagtacctgcaggcccaggtgcggagcagaagcaagctggacgcccctaaggtggatctgctggtgaagaattgcctcctgcccctgagagagtacttcaagtatttcagccagaatagtctgcccctgggcggcccaagcagcggcgcccctcctcccagcggcggcagcccagccggctccccaacctctaccgaggagggcacctctgagtccgccacccccgagagcggccctggcacctccaccgagcccagcgagggcagcgcacccggcagccctgccggcagccccacctccacagaggagggaaccagcaccgagcccagcgaaggcagcgccccaggcaccagcaccgagcctagtgagggcggctctggcggcggcagcgcccaggagattaaacggatcaacaagatcagaagaagacttgtgaaagacagcaacaccaagaaggccggcaagacaggccccatgaaaaccctgctggttagagtgatgacacccgatctgagagagcggctggaaaacctgagaaagaagcctgaaaatatcccccagcccatcagcaatacatctagagccaacctgaataagctgctgaccgattacaccgaaatgaagaaggcgatcctgcatgtgtactgggaagagttccagaaggaccctgtgggcctgatgagccgggtggcccagcctgccagcaagaagatcgatcagaacaagctgaaacctgagatggacgagaagggcaacctgaccaccgccggctttgcctgctctcagtgtggccagcccctgttcgtgtacaagctggagcaggtgtctgagaagggcaaggcttacaccaactacttcggacggtgcaatgtggccgagcacgaaaagctgatcctgctggcccagctgaagcccgagaaggatagcgacgaagccgtgacatatagcctgggaaagtttgggcagagggccctggatttctacagcattcatgtgaccaaggagtccacccaccccgtgaagcccctggcccagatcgccggaaacagatacgcctccggacctgtgggaaaggccctgagcgacgcatgtatgggcacaatcgcctccttcctgtctaagtaccaggacatcatcatcgaacaccagaaggtggtgaagggcaaccagaagagactggagagcctgcgggagctggccggcaaggaaaacctggaataccctagcgtgaccctgccacctcagcctcacaccaaggagggcgttgatgcctacaacgaagtgatcgcccgggtgcgaatgtgggtgaacctgaacctgtggcagaagctgaagctaagcagagatgatgccaagcctctgctgagactgaagggattcccttcctttcctctggtcgagagacaggccaacgaagtggactggtgggacatggtgtgtaacgtgaagaagctgatcaacgagaaaaaggaggatggcaaggtgttttggcagaatctggctggctacaagagacaggaagccctgagaccatacctgagcagcgaggaagatcggaagaagggaaagaaattcgctcggtaccagctgggcgacctgctgctgcacctggaaaagaagcacggcgaggactggggaaaggtgtacgacgaggcctgggagcggattgacaagaaagtggaaggcctgagcaagcacatcaagctggaagaggaacggagaagcgaggacgcccagagcaaggccgccctgaccgactggctgcgggctaaggccagcttcgtgatcgagggcctgaaggaggccgacaaggacgagttctgcagatgcgagctgaagctgcagaagtggtacggggacctgcggggaaagcccttcgccatcgaagccgagaacagcatcctggacatcagcggcttcagcaagcagtacaactgtgccttcatctggcagaaggacggcgtgaagaagctgaacctgtacctgatcatcaactacttcaagggcggcaagctgcggttcaagaagatcaaacctgaagccttcgaagccaacagattctacaccgtgatcaacaaaaagagcggcgagatcgtgcccatggaggtgaacttcaacttcgacgaccccaacctgatcatcctgcctctggcctttggcaagagacagggcagagaattcatctggaacgacctgctgtccctggaaaccggcagcctgaagctggccaacggaagagtgatcgagaagacactgtacaacagaagaacccggcaggatgagcctgccctgttcgtggccctgaccttcgagcggcgggaggtcctggactcctccaatatcaaaccaatgaacctgatcggcgtggcaagaggcgaaaacatccccgccgtgatcgccctgaccgaccccgagggctgcccactgagccggtttaaggatagcctgggaaacccaacccacatcctgagaatcggcgagagctataaggagaagcagcggaccatccaggccaagaaggaggtggagcagcggagagccggcggctacagccggaagtacgccagcaaagccaagaatctggcagacgatatggtgagaaacaccgctagagatctgctgtactacgccgtgacccaggatgccatgctgatcttcgccaacctgagccggggcttcggccggcagggcaagcggaccttcatggccgagagacagtacacacggatggaggactggctgaccgccaagctggcctacgagggcctgagcaagacctacctgtccaagacactggcccagtacacctccaagacatgcagcaactgtgggtttaccatcaccagcgccgactacgacagggtgctggagaagctgaagaagacagcaacaggctggatgaccacaattaacggcaaggagctgaaggtggagggccagattacctactacaacagatacaagagacagaacgtagtcaaggacctgtccgtcgagctggatagactgagcgaagaatctgtgaacaacgacatctcctcctggacaaagggcagaagcggagaagctctgagcctcctgaagaaaagattctcccatagacccgtgcaggagaagttcgtgtgcctgaactgcggcttcgagacacacgcagccgagcaagccgccctgaacatcgccagatcctggctgttcctgcggagccaggagtacaagaaataccagacaaacaagacaaccggcaacaccgataagagagccttcgtcgagacctggcagtccttttaccggaagaagcttaaggaggtgtggaaacctgccgtgcggtctggcggatctggcggaggctccacaagcctgcagggcctgctgaccttcagggacgtggccatcgagttcagccaggaggagtggggctgcctgagccacacccagagggagctgtacagggacgtgatgctggagaactacggccacctgctgttcagcggcctgatcgccagcaagcccgacctggtgagctgcctggagcagaagaaggagccctgggacctgaagaggaagaagaccgtggccatccaccccgtgtacgagctgaagaccagccccaagaaaaagagaaaagtctaagctgccttctgcggggcttgccttctggccatgcccttcttctctcccttgcacctgtacctcttggtctttgaataaagcctgagtaggaaggctagcaaaaaaaaaaaaaaaaaaaaaaaaaaaaaaaaaaaaaaaaaaaaaaaaaaaaaaaaaaaaaaaaaaaaaaaaaaaaaaaa

SEQ ID NO: 6045 - RNA, 5797 nt, synthetic construct
  source 1..5797: mol_type = other RNA
aggaaataagagagaaaagaagagtaagaagaaatataagagccaccatggcccctaagaagaagcgtaaagtgagccggatggaacgcctcgtctacgaggtgcggcagaagtgcagaaacatcgaggacatctgcatctcctgcggatctctgaacgtgaccctggagcacccactgttcatcggcggcatgtgccagaactgtaaaaactgttttctggagtgtgcctatcaatacgacgatgacggctaccagagctactgcaccatctgttgcggcggaagagaggtgctgatgtgtggaaataacaactgctgccggtgcttctgcgtggaatgcgtggacctgctggtgggccccggcgccgcccaggccgctattaaggaagatccttggaactgctacatgtgcggccacaagggcacatacggcctgctgagacggagagaggactggcctagcagactgcagatgttcttcgccaataaccacgaccaggagttcgacccccctaaggtgtaccctcccgtccccgccgagaagagaaagcccatccgggtcctgagcctgttcgatggcatcgccaccggtctgctggtgctgaaggacctgggcatccaggtggataggtacattgcctccgaggtgtgcgaggactccatcaccgtgggaatggtgcgtcatcagggcaagatcatgtacgtgggcgacgtgcggagcgtgacacagaagcatatccaggagtggggccctttcgacctggtgatcggcggcagcccttgcaatgacctgagcatcgtgaacccagcccggaagggcctgtacgagggaaccggcagactgttcttcgagttttacagactgctgcacgacgcccggcctaaggaaggcgacgaccggcccttcttttggctgttcgagaatgtggtggccatgggagtcagcgacaagcgggatattagccggttcctggagagcaaccccgtgatgatcgatgccaaggaagtgagcgccgcccaccgggccagatacttctggggcaatctgcctggcatgaacagacccctggccagcaccgtgaacgacaagctggagctgcaggagtgcctggagcacggccggatcgccaagttcagcaaggtgagaaccatcaccacccgaagcaacagcatcaaacaaggcaaggaccagcactttcctgtgttcatgaacgagaaggaggacatcctgtggtgtaccgagatggagagagtgttcgggttcccagtccactacacagatgtcagcaacatgtctagactggccagacagagactgctgggaagaagctggtccgtccctgtgatcagacacctgttcgcccctctgaaggagtacttcgcctgcgtgagcagcggcaacagcaacgccaacagccggggccccagcttctctagcggcctggtgccactgtccctgagagggagccacatgggccccatggagatctacaaaaccgtgagcgcctggaagcggcagcctgtgcgcgtgctgagcctgtttcggaatatcgataaagtcctgaaaagcctgggattcctggagagcggctctggctccggcggtggcaccctgaagtacgtggaggatgtgacaaacgtggtcagacgggatgtggagaagtggggccccttcgatctggtgtacggcagcacccaacccctgggcagctcttgtgaccggtgccctggctggtacatgtttcagttccaccggatcctgcagtacgccctgccgagacaggagtcccagcggccattcttttggattttcatggacaacttgctgctgaccgaggatgaccaggaaactaccactcggttcctgcagaccgaagccgtgaccctgcaggacgtgagaggccgggactaccagaacgccatgcgggtgtggtccaacatccctggactgaaaagcaagcacgcacctctgacccctaaagaagaggagtacctgcaggcccaggtgcggagcagaagcaagctggacgcccctaaggtggatctgctggtgaagaattgcctcctgcccctgagagagtacttcaagtatttcagccagaatagtctgcccctgggcggcccaagcagcggcgcccctcctcccagcggcggcagcccagccggctccccaacctctaccgaggagggcacctctgagtccgccacccccgagagcggccctggcacctccaccgagcccagcgagggcagcgcacccggcagccctgccggcagccccacctccacagaggagggaaccagcaccgagcccagcgaaggcagcgccccaggcaccagcaccgagcctagtgagggcggctctggcggcggcagcgcccaggagattaaacggatcaacaagatcagaagaagacttgtgaaagacagcaacaccaagaaggccggcaagacaggccccatgaaaaccctgctggttagagtgatgacacccgatctgagagagcggctggaaaacctgagaaagaagcctgaaaatatcccccagcccatcagcaatacatctagagccaacctgaataagctgctgaccgattacaccgaaatgaagaaggcgatcctgcatgtgtactgggaagagttccagaaggaccctgtgggcctgatgagccgggtggcccagcctgccagcaagaagatcgatcagaacaagctgaaacctgagatggacgagaagggcaacctgaccaccgccggctttgcctgctctcagtgtggccagcccctgttcgtgtacaagctggagcaggtgtctgagaagggcaaggcttacaccaactacttcggacggtgcaatgtggccgagcacgaaaagctgatcctgctggcccagctgaagcccgagaaggatagcgacgaagccgtgacatatagcctgggaaagtttgggcagagggccctggatttctacagcattcatgtgaccaaggagtccacccaccccgtgaagcccctggcccagatcgccggaaacagatacgcctccggacctgtgggaaaggccctgagcgacgcatgtatgggcacaatcgcctccttcctgtctaagtaccaggacatcatcatcgaacaccagaaggtggtgaagggcaaccagaagagactggagagcctgcgggagctggccggcaaggaaaacctggaataccctagcgtgaccctgccacctcagcctcacaccaaggagggcgttgatgcctacaacgaagtgatcgcccgggtgcgaatgtgggtgaacctgaacctgtggcagaagctgaagctaagcagagatgatgccaagcctctgctgagactgaagggattcccttcctttcctctggtcgagagacaggccaacgaagtggactggtgggacatggtgtgtaacgtgaagaagctgatcaacgagaaaaaggaggatggcaaggtgttttggcagaatctggctggctacaagagacaggaagccctgagaccatacctgagcagcgaggaagatcggaagaagggaaagaaattcgctcggtaccagctgggcgacctgctgctgcacctggaaaagaagcacggcgaggactggggaaaggtgtacgacgaggcctgggagcggattgacaagaaagtggaaggcctgagcaagcacatcaagctggaagaggaacggagaagcgaggacgcccagagcaaggccgccctgaccgactggctgcgggctaaggccagcttcgtgatcgagggcctgaaggaggccgacaaggacgagttctgcagatgcgagctgaagctgcagaagtggtacggggacctgcggggaaagcccttcgccatcgaagccgagaacagcatcctggacatcagcggcttcagcaagcagtacaactgtgccttcatctggcagaaggacggcgtgaagaagctgaacctgtacctgatcatcaactacttcaagggcggcaagctgcggttcaagaagatcaaacctgaagccttcgaagccaacagattctacaccgtgatcaacaaaaagagcggcgagatcgtgcccatggaggtgaacttcaacttcgacgaccccaacctgatcatcctgcctctggcctttggcaagagacagggcagagaattcatctggaacgacctgctgtccctggaaaccggcagcctgaagctggccaacggaagagtgatcgagaagacactgtacaacagaagaacccggcaggatgagcctgccctgttcgtggccctgaccttcgagcggcgggaggtcctggactcctccaatatcaaaccaatgaacctgatcggcgtggcaagaggcgaaaacatccccgccgtgatcgccctgaccgaccccgagggctgcccactgagccggtttaaggatagcctgggaaacccaacccacatcctgagaatcggcgagagctataaggagaagcagcggaccatccaggccaagaaggaggtggagcagcggagagccggcggctacagccggaagtacgccagcaaagccaagaatctggcagacgatatggtgagaaacaccgctagagatctgctgtactacgccgtgacccaggatgccatgctgatcttcgccaacctgagccggggcttcggccggcagggcaagcggaccttcatggccgagagacagtacacacggatggaggactggctgaccgccaagctggcctacgagggcctgagcaagacctacctgtccaagacactggcccagtacacctccaagacatgcagcaactgtgggtttaccatcaccagcgccgactacgacagggtgctggagaagctgaagaagacagcaacaggctggatgaccacaattaacggcaaggagctgaaggtggagggccagattacctactacaacagatacaagagacagaacgtagtcaaggacctgtccgtcgagctggatagactgagcgaagaatctgtgaacaacgacatctcctcctggacaaagggcagaagcggagaagctctgagcctcctgaagaaaagattctcccatagacccgtgcaggagaagttcgtgtgcctgaactgcggcttcgagacacacgcagccgagcaagccgccctgaacatcgccagatcctggctgttcctgcggagccaggagtacaagaaataccagacaaacaagacaaccggcaacaccgataagagagccttcgtcgagacctggcagtccttttaccggaagaagcttaaggaggtgtggaaacctgccgtgcggtctggcggatctggcggaggctccacaagcccccaggagcccgtgaccttcgaggacgtggccgtgctgttcacccccgaggagtggatgttcctggacagcgcccagaggagcctgtacagggacgtgatgctggagaactacaggaacgtggccagcgtgggcgaccagctgggcaagttcagcagcttcagccacctggagcagggcgaggagtggtggcccaccgagaggagggtgttccccggcagctgccccgagcccagcctgcccaccagccccaagaaaaagagaaaagtctaagctgccttctgcggggcttgccttctggccatgcccttcttctctcccttgcacctgtacctcttggtctttgaataaagcctgagtaggaaggctagcaaaaaaaaaaaaaaaaaaaaaaaaaaaaaaaaaaaaaaaaaaaaaaaaaaaaaaaaaaaaaaaaaaaaaaaaaaaaaaaa

SEQ ID NO: 6046 - RNA, 5797 nt, synthetic construct
  source 1..5797: mol_type = other RNA
aggaaataagagagaaaagaagagtaagaagaaatataagagccaccatggcccctaagaagaagcgtaaagtgagccggatggaacgcctcgtctacgaggtgcggcagaagtgcagaaacatcgaggacatctgcatctcctgcggatctctgaacgtgaccctggagcacccactgttcatcggcggcatgtgccagaactgtaaaaactgttttctggagtgtgcctatcaatacgacgatgacggctaccagagctactgcaccatctgttgcggcggaagagaggtgctgatgtgtggaaataacaactgctgccggtgcttctgcgtggaatgcgtggacctgctggtgggccccggcgccgcccaggccgctattaaggaagatccttggaactgctacatgtgcggccacaagggcacatacggcctgctgagacggagagaggactggcctagcagactgcagatgttcttcgccaataaccacgaccaggagttcgacccccctaaggtgtaccctcccgtccccgccgagaagagaaagcccatccgggtcctgagcctgttcgatggcatcgccaccggtctgctggtgctgaaggacctgggcatccaggtggataggtacattgcctccgaggtgtgcgaggactccatcaccgtgggaatggtgcgtcatcagggcaagatcatgtacgtgggcgacgtgcggagcgtgacacagaagcatatccaggagtggggccctttcgacctggtgatcggcggcagcccttgcaatgacctgagcatcgtgaacccagcccggaagggcctgtacgagggaaccggcagactgttcttcgagttttacagactgctgcacgacgcccggcctaaggaaggcgacgaccggcccttcttttggctgttcgagaatgtggtggccatgggagtcagcgacaagcgggatattagccggttcctggagagcaaccccgtgatgatcgatgccaaggaagtgagcgccgcccaccgggccagatacttctggggcaatctgcctggcatgaacagacccctggccagcaccgtgaacgacaagctggagctgcaggagtgcctggagcacggccggatcgccaagttcagcaaggtgagaaccatcaccacccgaagcaacagcatcaaacaaggcaaggaccagcactttcctgtgttcatgaacgagaaggaggacatcctgtggtgtaccgagatggagagagtgttcgggttcccagtccactacacagatgtcagcaacatgtctagactggccagacagagactgctgggaagaagctggtccgtccctgtgatcagacacctgttcgcccctctgaaggagtacttcgcctgcgtgagcagcggcaacagcaacgccaacagccggggccccagcttctctagcggcctggtgccactgtccctgagagggagccacatgggccccatggagatctacaaaaccgtgagcgcctggaagcggcagcctgtgcgcgtgctgagcctgtttcggaatatcgataaagtcctgaaaagcctgggattcctggagagcggctctggctccggcggtggcaccctgaagtacgtggaggatgtgacaaacgtggtcagacgggatgtggagaagtggggccccttcgatctggtgtacggcagcacccaacccctgggcagctcttgtgaccggtgccctggctggtacatgtttcagttccaccggatcctgcagtacgccctgccgagacaggagtcccagcggccattcttttggattttcatggacaacttgctgctgaccgaggatgaccaggaaactaccactcggttcctgcagaccgaagccgtgaccctgcaggacgtgagaggccgggactaccagaacgccatgcgggtgtggtccaacatccctggactgaaaagcaagcacgcacctctgacccctaaagaagaggagtacctgcaggcccaggtgcggagcagaagcaagctggacgcccctaaggtggatctgctggtgaagaattgcctcctgcccctgagagagtacttcaagtatttcagccagaatagtctgcccctgggcggcccaagcagcggcgcccctcctcccagcggcggcagcccagccggctccccaacctctaccgaggagggcacctctgagtccgccacccccgagagcggccctggcacctccaccgagcccagcgagggcagcgcacccggcagccctgccggcagccccacctccacagaggagggaaccagcaccgagcccagcgaaggcagcgccccaggcaccagcaccgagcctagtgagggcggctctggcggcggcagcgcccaggagattaaacggatcaacaagatcagaagaagacttgtgaaagacagcaacaccaagaaggccggcaagacaggccccatgaaaaccctgctggttagagtgatgacacccgatctgagagagcggctggaaaacctgagaaagaagcctgaaaatatcccccagcccatcagcaatacatctagagccaacctgaataagctgctgaccgattacaccgaaatgaagaaggcgatcctgcatgtgtactgggaagagttccagaaggaccctgtgggcctgatgagccgggtggcccagcctgccagcaagaagatcgatcagaacaagctgaaacctgagatggacgagaagggcaacctgaccaccgccggctttgcctgctctcagtgtggccagcccctgttcgtgtacaagctggagcaggtgtctgagaagggcaaggcttacaccaactacttcggacggtgcaatgtggccgagcacgaaaagctgatcctgctggcccagctgaagcccgagaaggatagcgacgaagccgtgacatatagcctgggaaagtttgggcagagggccctggatttctacagcattcatgtgaccaaggagtccacccaccccgtgaagcccctggcccagatcgccggaaacagatacgcctccggacctgtgggaaaggccctgagcgacgcatgtatgggcacaatcgcctccttcctgtctaagtaccaggacatcatcatcgaacaccagaaggtggtgaagggcaaccagaagagactggagagcctgcgggagctggccggcaaggaaaacctggaataccctagcgtgaccctgccacctcagcctcacaccaaggagggcgttgatgcctacaacgaagtgatcgcccgggtgcgaatgtgggtgaacctgaacctgtggcagaagctgaagctaagcagagatgatgccaagcctctgctgagactgaagggattcccttcctttcctctggtcgagagacaggccaacgaagtggactggtgggacatggtgtgtaacgtgaagaagctgatcaacgagaaaaaggaggatggcaaggtgttttggcagaatctggctggctacaagagacaggaagccctgagaccatacctgagcagcgaggaagatcggaagaagggaaagaaattcgctcggtaccagctgggcgacctgctgctgcacctggaaaagaagcacggcgaggactggggaaaggtgtacgacgaggcctgggagcggattgacaagaaagtggaaggcctgagcaagcacatcaagctggaagaggaacggagaagcgaggacgcccagagcaaggccgccctgaccgactggctgcgggctaaggccagcttcgtgatcgagggcctgaaggaggccgacaaggacgagttctgcagatgcgagctgaagctgcagaagtggtacggggacctgcggggaaagcccttcgccatcgaagccgagaacagcatcctggacatcagcggcttcagcaagcagtacaactgtgccttcatctggcagaaggacggcgtgaagaagctgaacctgtacctgatcatcaactacttcaagggcggcaagctgcggttcaagaagatcaaacctgaagccttcgaagccaacagattctacaccgtgatcaacaaaaagagcggcgagatcgtgcccatggaggtgaacttcaacttcgacgaccccaacctgatcatcctgcctctggcctttggcaagagacagggcagagaattcatctggaacgacctgctgtccctggaaaccggcagcctgaagctggccaacggaagagtgatcgagaagacactgtacaacagaagaacccggcaggatgagcctgccctgttcgtggccctgaccttcgagcggcgggaggtcctggactcctccaatatcaaaccaatgaacctgatcggcgtggcaagaggcgaaaacatccccgccgtgatcgccctgaccgaccccgagggctgcccactgagccggtttaaggatagcctgggaaacccaacccacatcctgagaatcggcgagagctataaggagaagcagcggaccatccaggccaagaaggaggtggagcagcggagagccggcggctacagccggaagtacgccagcaaagccaagaatctggcagacgatatggtgagaaacaccgctagagatctgctgtactacgccgtgacccaggatgccatgctgatcttcgccaacctgagccggggcttcggccggcagggcaagcggaccttcatggccgagagacagtacacacggatggaggactggctgaccgccaagctggcctacgagggcctgagcaagacctacctgtccaagacactggcccagtacacctccaagacatgcagcaactgtgggtttaccatcaccagcgccgactacgacagggtgctggagaagctgaagaagacagcaacaggctggatgaccacaattaacggcaaggagctgaaggtggagggccagattacctactacaacagatacaagagacagaacgtagtcaaggacctgtccgtcgagctggatagactgagcgaagaatctgtgaacaacgacatctcctcctggacaaagggcagaagcggagaagctctgagcctcctgaagaaaagattctcccatagacccgtgcaggagaagttcgtgtgcctgaactgcggcttcgagacacacgcagccgagcaagccgccctgaacatcgccagatcctggctgttcctgcggagccaggagtacaagaaataccagacaaacaagacaaccggcaacaccgataagagagccttcgtcgagacctggcagtccttttaccggaagaagcttaaggaggtgtggaaacctgccgtgcggtctggcggatctggcggaggctccacaagcatgctgagcttctgggacgtggccatcgagttcagccccgaggagagggagtgcctggaccccgcccagtggagcctgtacagggacgtgatgctggagaactacagcaacctgctgttcctgggcctggccgtgcccaagccccacctggtgaccttcctggagcagaggcaggagagcagcggcgtgaagaggcaggccgccgccaccgtgcaccccggcaggatccccaacgactacaacaccagccccaagaaaaagagaaaagtctaagctgccttctgcggggcttgccttctggccatgcccttcttctctcccttgcacctgtacctcttggtctttgaataaagcctgagtaggaaggctagcaaaaaaaaaaaaaaaaaaaaaaaaaaaaaaaaaaaaaaaaaaaaaaaaaaaaaaaaaaaaaaaaaaaaaaaaaaaaaaaa

SEQ ID NO: 6047 - RNA, 5797 nt, synthetic construct
  source 1..5797: mol_type = other RNA
aggaaataagagagaaaagaagagtaagaagaaatataagagccaccatggcccctaagaagaagcgtaaagtgagccggatggaacgcctcgtctacgaggtgcggcagaagtgcagaaacatcgaggacatctgcatctcctgcggatctctgaacgtgaccctggagcacccactgttcatcggcggcatgtgccagaactgtaaaaactgttttctggagtgtgcctatcaatacgacgatgacggctaccagagctactgcaccatctgttgcggcggaagagaggtgctgatgtgtggaaataacaactgctgccggtgcttctgcgtggaatgcgtggacctgctggtgggccccggcgccgcccaggccgctattaaggaagatccttggaactgctacatgtgcggccacaagggcacatacggcctgctgagacggagagaggactggcctagcagactgcagatgttcttcgccaataaccacgaccaggagttcgacccccctaaggtgtaccctcccgtccccgccgagaagagaaagcccatccgggtcctgagcctgttcgatggcatcgccaccggtctgctggtgctgaaggacctgggcatccaggtggataggtacattgcctccgaggtgtgcgaggactccatcaccgtgggaatggtgcgtcatcagggcaagatcatgtacgtgggcgacgtgcggagcgtgacacagaagcatatccaggagtggggccctttcgacctggtgatcggcggcagcccttgcaatgacctgagcatcgtgaacccagcccggaagggcctgtacgagggaaccggcagactgttcttcgagttttacagactgctgcacgacgcccggcctaaggaaggcgacgaccggcccttcttttggctgttcgagaatgtggtggccatgggagtcagcgacaagcgggatattagccggttcctggagagcaaccccgtgatgatcgatgccaaggaagtgagcgccgcccaccgggccagatacttctggggcaatctgcctggcatgaacagacccctggccagcaccgtgaacgacaagctggagctgcaggagtgcctggagcacggccggatcgccaagttcagcaaggtgagaaccatcaccacccgaagcaacagcatcaaacaaggcaaggaccagcactttcctgtgttcatgaacgagaaggaggacatcctgtggtgtaccgagatggagagagtgttcgggttcccagtccactacacagatgtcagcaacatgtctagactggccagacagagactgctgggaagaagctggtccgtccctgtgatcagacacctgttcgcccctctgaaggagtacttcgcctgcgtgagcagcggcaacagcaacgccaacagccggggccccagcttctctagcggcctggtgccactgtccctgagagggagccacatgggccccatggagatctacaaaaccgtgagcgcctggaagcggcagcctgtgcgcgtgctgagcctgtttcggaatatcgataaagtcctgaaaagcctgggattcctggagagcggctctggctccggcggtggcaccctgaagtacgtggaggatgtgacaaacgtggtcagacgggatgtggagaagtggggccccttcgatctggtgtacggcagcacccaacccctgggcagctcttgtgaccggtgccctggctggtacatgtttcagttccaccggatcctgcagtacgccctgccgagacaggagtcccagcggccattcttttggattttcatggacaacttgctgctgaccgaggatgaccaggaaactaccactcggttcctgcagaccgaagccgtgaccctgcaggacgtgagaggccgggactaccagaacgccatgcgggtgtggtccaacatccctggactgaaaagcaagcacgcacctctgacccctaaagaagaggagtacctgcaggcccaggtgcggagcagaagcaagctggacgcccctaaggtggatctgctggtgaagaattgcctcctgcccctgagagagtacttcaagtatttcagccagaatagtctgcccctgggcggcccaagcagcggcgcccctcctcccagcggcggcagcccagccggctccccaacctctaccgaggagggcacctctgagtccgccacccccgagagcggccctggcacctccaccgagcccagcgagggcagcgcacccggcagccctgccggcagccccacctccacagaggagggaaccagcaccgagcccagcgaaggcagcgccccaggcaccagcaccgagcctagtgagggcggctctggcggcggcagcgcccaggagattaaacggatcaacaagatcagaagaagacttgtgaaagacagcaacaccaagaaggccggcaagacaggccccatgaaaaccctgctggttagagtgatgacacccgatctgagagagcggctggaaaacctgagaaagaagcctgaaaatatcccccagcccatcagcaatacatctagagccaacctgaataagctgctgaccgattacaccgaaatgaagaaggcgatcctgcatgtgtactgggaagagttccagaaggaccctgtgggcctgatgagccgggtggcccagcctgccagcaagaagatcgatcagaacaagctgaaacctgagatggacgagaagggcaacctgaccaccgccggctttgcctgctctcagtgtggccagcccctgttcgtgtacaagctggagcaggtgtctgagaagggcaaggcttacaccaactacttcggacggtgcaatgtggccgagcacgaaaagctgatcctgctggcccagctgaagcccgagaaggatagcgacgaagccgtgacatatagcctgggaaagtttgggcagagggccctggatttctacagcattcatgtgaccaaggagtccacccaccccgtgaagcccctggcccagatcgccggaaacagatacgcctccggacctgtgggaaaggccctgagcgacgcatgtatgggcacaatcgcctccttcctgtctaagtaccaggacatcatcatcgaacaccagaaggtggtgaagggcaaccagaagagactggagagcctgcgggagctggccggcaaggaaaacctggaataccctagcgtgaccctgccacctcagcctcacaccaaggagggcgttgatgcctacaacgaagtgatcgcccgggtgcgaatgtgggtgaacctgaacctgtggcagaagctgaagctaagcagagatgatgccaagcctctgctgagactgaagggattcccttcctttcctctggtcgagagacaggccaacgaagtggactggtgggacatggtgtgtaacgtgaagaagctgatcaacgagaaaaaggaggatggcaaggtgttttggcagaatctggctggctacaagagacaggaagccctgagaccatacctgagcagcgaggaagatcggaagaagggaaagaaattcgctcggtaccagctgggcgacctgctgctgcacctggaaaagaagcacggcgaggactggggaaaggtgtacgacgaggcctgggagcggattgacaagaaagtggaaggcctgagcaagcacatcaagctggaagaggaacggagaagcgaggacgcccagagcaaggccgccctgaccgactggctgcgggctaaggccagcttcgtgatcgagggcctgaaggaggccgacaaggacgagttctgcagatgcgagctgaagctgcagaagtggtacggggacctgcggggaaagcccttcgccatcgaagccgagaacagcatcctggacatcagcggcttcagcaagcagtacaactgtgccttcatctggcagaaggacggcgtgaagaagctgaacctgtacctgatcatcaactacttcaagggcggcaagctgcggttcaagaagatcaaacctgaagccttcgaagccaacagattctacaccgtgatcaacaaaaagagcggcgagatcgtgcccatggaggtgaacttcaacttcgacgaccccaacctgatcatcctgcctctggcctttggcaagagacagggcagagaattcatctggaacgacctgctgtccctggaaaccggcagcctgaagctggccaacggaagagtgatcgagaagacactgtacaacagaagaacccggcaggatgagcctgccctgttcgtggccctgaccttcgagcggcgggaggtcctggactcctccaatatcaaaccaatgaacctgatcggcgtggcaagaggcgaaaacatccccgccgtgatcgccctgaccgaccccgagggctgcccactgagccggtttaaggatagcctgggaaacccaacccacatcctgagaatcggcgagagctataaggagaagcagcggaccatccaggccaagaaggaggtggagcagcggagagccggcggctacagccggaagtacgccagcaaagccaagaatctggcagacgatatggtgagaaacaccgctagagatctgctgtactacgccgtgacccaggatgccatgctgatcttcgccaacctgagccggggcttcggccggcagggcaagcggaccttcatggccgagagacagtacacacggatggaggactggctgaccgccaagctggcctacgagggcctgagcaagacctacctgtccaagacactggcccagtacacctccaagacatgcagcaactgtgggtttaccatcaccagcgccgactacgacagggtgctggagaagctgaagaagacagcaacaggctggatgaccacaattaacggcaaggagctgaaggtggagggccagattacctactacaacagatacaagagacagaacgtagtcaaggacctgtccgtcgagctggatagactgagcgaagaatctgtgaacaacgacatctcctcctggacaaagggcagaagcggagaagctctgagcctcctgaagaaaagattctcccatagacccgtgcaggagaagttcgtgtgcctgaactgcggcttcgagacacacgcagccgagcaagccgccctgaacatcgccagatcctggctgttcctgcggagccaggagtacaagaaataccagacaaacaagacaaccggcaacaccgataagagagccttcgtcgagacctggcagtccttttaccggaagaagcttaaggaggtgtggaaacctgccgtgcggtctggcggatctggcggaggctccacaagcgccctgggcagcgtgaccttcagggacgtggccgtgttcttcagccaggacgagtggctgcacctggacagcgcccagaagaccctgtaccaggaggtgatgctggagaactacagcaccctggtgagcctgggcatccccttcagcatgcccaaggtgatctgccagctgcagcagggcgaggacccctgcatggtggagggcgaggccctgagggacccctgcctggacttcaagacctggaccagccccaagaaaaagagaaaagtctaagctgccttctgcggggcttgccttctggccatgcccttcttctctcccttgcacctgtacctcttggtctttgaataaagcctgagtaggaaggctagcaaaaaaaaaaaaaaaaaaaaaaaaaaaaaaaaaaaaaaaaaaaaaaaaaaaaaaaaaaaaaaaaaaaaaaaaaaaaaaaa

SEQ ID NO: 6048 - RNA, 5797 nt, synthetic construct
  source 1..5797: mol_type = other RNA
aggaaataagagagaaaagaagagtaagaagaaatataagagccaccatggcccctaagaagaagcgtaaagtgagccggatggaacgcctcgtctacgaggtgcggcagaagtgcagaaacatcgaggacatctgcatctcctgcggatctctgaacgtgaccctggagcacccactgttcatcggcggcatgtgccagaactgtaaaaactgttttctggagtgtgcctatcaatacgacgatgacggctaccagagctactgcaccatctgttgcggcggaagagaggtgctgatgtgtggaaataacaactgctgccggtgcttctgcgtggaatgcgtggacctgctggtgggccccggcgccgcccaggccgctattaaggaagatccttggaactgctacatgtgcggccacaagggcacatacggcctgctgagacggagagaggactggcctagcagactgcagatgttcttcgccaataaccacgaccaggagttcgacccccctaaggtgtaccctcccgtccccgccgagaagagaaagcccatccgggtcctgagcctgttcgatggcatcgccaccggtctgctggtgctgaaggacctgggcatccaggtggataggtacattgcctccgaggtgtgcgaggactccatcaccgtgggaatggtgcgtcatcagggcaagatcatgtacgtgggcgacgtgcggagcgtgacacagaagcatatccaggagtggggccctttcgacctggtgatcggcggcagcccttgcaatgacctgagcatcgtgaacccagcccggaagggcctgtacgagggaaccggcagactgttcttcgagttttacagactgctgcacgacgcccggcctaaggaaggcgacgaccggcccttcttttggctgttcgagaatgtggtggccatgggagtcagcgacaagcgggatattagccggttcctggagagcaaccccgtgatgatcgatgccaaggaagtgagcgccgcccaccgggccagatacttctggggcaatctgcctggcatgaacagacccctggccagcaccgtgaacgacaagctggagctgcaggagtgcctggagcacggccggatcgccaagttcagcaaggtgagaaccatcaccacccgaagcaacagcatcaaacaaggcaaggaccagcactttcctgtgttcatgaacgagaaggaggacatcctgtggtgtaccgagatggagagagtgttcgggttcccagtccactacacagatgtcagcaacatgtctagactggccagacagagactgctgggaagaagctggtccgtccctgtgatcagacacctgttcgcccctctgaaggagtacttcgcctgcgtgagcagcggcaacagcaacgccaacagccggggccccagcttctctagcggcctggtgccactgtccctgagagggagccacatgggccccatggagatctacaaaaccgtgagcgcctggaagcggcagcctgtgcgcgtgctgagcctgtttcggaatatcgataaagtcctgaaaagcctgggattcctggagagcggctctggctccggcggtggcaccctgaagtacgtggaggatgtgacaaacgtggtcagacgggatgtggagaagtggggccccttcgatctggtgtacggcagcacccaacccctgggcagctcttgtgaccggtgccctggctggtacatgtttcagttccaccggatcctgcagtacgccctgccgagacaggagtcccagcggccattcttttggattttcatggacaacttgctgctgaccgaggatgaccaggaaactaccactcggttcctgcagaccgaagccgtgaccctgcaggacgtgagaggccgggactaccagaacgccatgcgggtgtggtccaacatccctggactgaaaagcaagcacgcacctctgacccctaaagaagaggagtacctgcaggcccaggtgcggagcagaagcaagctggacgcccctaaggtggatctgctggtgaagaattgcctcctgcccctgagagagtacttcaagtatttcagccagaatagtctgcccctgggcggcccaagcagcggcgcccctcctcccagcggcggcagcccagccggctccccaacctctaccgaggagggcacctctgagtccgccacccccgagagcggccctggcacctccaccgagcccagcgagggcagcgcacccggcagccctgccggcagccccacctccacagaggagggaaccagcaccgagcccagcgaaggcagcgccccaggcaccagcaccgagcctagtgagggcggctctggcggcggcagcgcccaggagattaaacggatcaacaagatcagaagaagacttgtgaaagacagcaacaccaagaaggccggcaagacaggccccatgaaaaccctgctggttagagtgatgacacccgatctgagagagcggctggaaaacctgagaaagaagcctgaaaatatcccccagcccatcagcaatacatctagagccaacctgaataagctgctgaccgattacaccgaaatgaagaaggcgatcctgcatgtgtactgggaagagttccagaaggaccctgtgggcctgatgagccgggtggcccagcctgccagcaagaagatcgatcagaacaagctgaaacctgagatggacgagaagggcaacctgaccaccgccggctttgcctgctctcagtgtggccagcccctgttcgtgtacaagctggagcaggtgtctgagaagggcaaggcttacaccaactacttcggacggtgcaatgtggccgagcacgaaaagctgatcctgctggcccagctgaagcccgagaaggatagcgacgaagccgtgacatatagcctgggaaagtttgggcagagggccctggatttctacagcattcatgtgaccaaggagtccacccaccccgtgaagcccctggcccagatcgccggaaacagatacgcctccggacctgtgggaaaggccctgagcgacgcatgtatgggcacaatcgcctccttcctgtctaagtaccaggacatcatcatcgaacaccagaaggtggtgaagggcaaccagaagagactggagagcctgcgggagctggccggcaaggaaaacctggaataccctagcgtgaccctgccacctcagcctcacaccaaggagggcgttgatgcctacaacgaagtgatcgcccgggtgcgaatgtgggtgaacctgaacctgtggcagaagctgaagctaagcagagatgatgccaagcctctgctgagactgaagggattcccttcctttcctctggtcgagagacaggccaacgaagtggactggtgggacatggtgtgtaacgtgaagaagctgatcaacgagaaaaaggaggatggcaaggtgttttggcagaatctggctggctacaagagacaggaagccctgagaccatacctgagcagcgaggaagatcggaagaagggaaagaaattcgctcggtaccagctgggcgacctgctgctgcacctggaaaagaagcacggcgaggactggggaaaggtgtacgacgaggcctgggagcggattgacaagaaagtggaaggcctgagcaagcacatcaagctggaagaggaacggagaagcgaggacgcccagagcaaggccgccctgaccgactggctgcgggctaaggccagcttcgtgatcgagggcctgaaggaggccgacaaggacgagttctgcagatgcgagctgaagctgcagaagtggtacggggacctgcggggaaagcccttcgccatcgaagccgagaacagcatcctggacatcagcggcttcagcaagcagtacaactgtgccttcatctggcagaaggacggcgtgaagaagctgaacctgtacctgatcatcaactacttcaagggcggcaagctgcggttcaagaagatcaaacctgaagccttcgaagccaacagattctacaccgtgatcaacaaaaagagcggcgagatcgtgcccatggaggtgaacttcaacttcgacgaccccaacctgatcatcctgcctctggcctttggcaagagacagggcagagaattcatctggaacgacctgctgtccctggaaaccggcagcctgaagctggccaacggaagagtgatcgagaagacactgtacaacagaagaacccggcaggatgagcctgccctgttcgtggccctgaccttcgagcggcgggaggtcctggactcctccaatatcaaaccaatgaacctgatcggcgtggcaagaggcgaaaacatccccgccgtgatcgccctgaccgaccccgagggctgcccactgagccggtttaaggatagcctgggaaacccaacccacatcctgagaatcggcgagagctataaggagaagcagcggaccatccaggccaagaaggaggtggagcagcggagagccggcggctacagccggaagtacgccagcaaagccaagaatctggcagacgatatggtgagaaacaccgctagagatctgctgtactacgccgtgacccaggatgccatgctgatcttcgccaacctgagccggggcttcggccggcagggcaagcggaccttcatggccgagagacagtacacacggatggaggactggctgaccgccaagctggcctacgagggcctgagcaagacctacctgtccaagacactggcccagtacacctccaagacatgcagcaactgtgggtttaccatcaccagcgccgactacgacagggtgctggagaagctgaagaagacagcaacaggctggatgaccacaattaacggcaaggagctgaaggtggagggccagattacctactacaacagatacaagagacagaacgtagtcaaggacctgtccgtcgagctggatagactgagcgaagaatctgtgaacaacgacatctcctcctggacaaagggcagaagcggagaagctctgagcctcctgaagaaaagattctcccatagacccgtgcaggagaagttcgtgtgcctgaactgcggcttcgagacacacgcagccgagcaagccgccctgaacatcgccagatcctggctgttcctgcggagccaggagtacaagaaataccagacaaacaagacaaccggcaacaccgataagagagccttcgtcgagacctggcagtccttttaccggaagaagcttaaggaggtgtggaaacctgccgtgcggtctggcggatctggcggaggctccacaagcagcgagaccggcaacgccgtgacctacgacgacgtgcacatcagcttcaccagcaaggagtgggccctgctggaccccagccagaagagcctgtacaaggacgtgatgctggagatctacagccacctgaccgccatcggctacaagtgggaggcccacgacagcgaggaccacggccagaggttcaggaggcagaggaggcacaagaggagccacaccgaggtgaagacctacaagtgcagcaccagccccaagaaaaagagaaaagtctaagctgccttctgcggggcttgccttctggccatgcccttcttctctcccttgcacctgtacctcttggtctttgaataaagcctgagtaggaaggctagcaaaaaaaaaaaaaaaaaaaaaaaaaaaaaaaaaaaaaaaaaaaaaaaaaaaaaaaaaaaaaaaaaaaaaaaaaaaaaaaa

SEQ ID NO: 6049 - RNA, 5797 nt, synthetic construct
  source 1..5797: mol_type = other RNA
aggaaataagagagaaaagaagagtaagaagaaatataagagccaccatggcccctaagaagaagcgtaaagtgagccggatggaacgcctcgtctacgaggtgcggcagaagtgcagaaacatcgaggacatctgcatctcctgcggatctctgaacgtgaccctggagcacccactgttcatcggcggcatgtgccagaactgtaaaaactgttttctggagtgtgcctatcaatacgacgatgacggctaccagagctactgcaccatctgttgcggcggaagagaggtgctgatgtgtggaaataacaactgctgccggtgcttctgcgtggaatgcgtggacctgctggtgggccccggcgccgcccaggccgctattaaggaagatccttggaactgctacatgtgcggccacaagggcacatacggcctgctgagacggagagaggactggcctagcagactgcagatgttcttcgccaataaccacgaccaggagttcgacccccctaaggtgtaccctcccgtccccgccgagaagagaaagcccatccgggtcctgagcctgttcgatggcatcgccaccggtctgctggtgctgaaggacctgggcatccaggtggataggtacattgcctccgaggtgtgcgaggactccatcaccgtgggaatggtgcgtcatcagggcaagatcatgtacgtgggcgacgtgcggagcgtgacacagaagcatatccaggagtggggccctttcgacctggtgatcggcggcagcccttgcaatgacctgagcatcgtgaacccagcccggaagggcctgtacgagggaaccggcagactgttcttcgagttttacagactgctgcacgacgcccggcctaaggaaggcgacgaccggcccttcttttggctgttcgagaatgtggtggccatgggagtcagcgacaagcgggatattagccggttcctggagagcaaccccgtgatgatcgatgccaaggaagtgagcgccgcccaccgggccagatacttctggggcaatctgcctggcatgaacagacccctggccagcaccgtgaacgacaagctggagctgcaggagtgcctggagcacggccggatcgccaagttcagcaaggtgagaaccatcaccacccgaagcaacagcatcaaacaaggcaaggaccagcactttcctgtgttcatgaacgagaaggaggacatcctgtggtgtaccgagatggagagagtgttcgggttcccagtccactacacagatgtcagcaacatgtctagactggccagacagagactgctgggaagaagctggtccgtccctgtgatcagacacctgttcgcccctctgaaggagtacttcgcctgcgtgagcagcggcaacagcaacgccaacagccggggccccagcttctctagcggcctggtgccactgtccctgagagggagccacatgggccccatggagatctacaaaaccgtgagcgcctggaagcggcagcctgtgcgcgtgctgagcctgtttcggaatatcgataaagtcctgaaaagcctgggattcctggagagcggctctggctccggcggtggcaccctgaagtacgtggaggatgtgacaaacgtggtcagacgggatgtggagaagtggggccccttcgatctggtgtacggcagcacccaacccctgggcagctcttgtgaccggtgccctggctggtacatgtttcagttccaccggatcctgcagtacgccctgccgagacaggagtcccagcggccattcttttggattttcatggacaacttgctgctgaccgaggatgaccaggaaactaccactcggttcctgcagaccgaagccgtgaccctgcaggacgtgagaggccgggactaccagaacgccatgcgggtgtggtccaacatccctggactgaaaagcaagcacgcacctctgacccctaaagaagaggagtacctgcaggcccaggtgcggagcagaagcaagctggacgcccctaaggtggatctgctggtgaagaattgcctcctgcccctgagagagtacttcaagtatttcagccagaatagtctgcccctgggcggcccaagcagcggcgcccctcctcccagcggcggcagcccagccggctccccaacctctaccgaggagggcacctctgagtccgccacccccgagagcggccctggcacctccaccgagcccagcgagggcagcgcacccggcagccctgccggcagccccacctccacagaggagggaaccagcaccgagcccagcgaaggcagcgccccaggcaccagcaccgagcctagtgagggcggctctggcggcggcagcgcccaggagattaaacggatcaacaagatcagaagaagacttgtgaaagacagcaacaccaagaaggccggcaagacaggccccatgaaaaccctgctggttagagtgatgacacccgatctgagagagcggctggaaaacctgagaaagaagcctgaaaatatcccccagcccatcagcaatacatctagagccaacctgaataagctgctgaccgattacaccgaaatgaagaaggcgatcctgcatgtgtactgggaagagttccagaaggaccctgtgggcctgatgagccgggtggcccagcctgccagcaagaagatcgatcagaacaagctgaaacctgagatggacgagaagggcaacctgaccaccgccggctttgcctgctctcagtgtggccagcccctgttcgtgtacaagctggagcaggtgtctgagaagggcaaggcttacaccaactacttcggacggtgcaatgtggccgagcacgaaaagctgatcctgctggcccagctgaagcccgagaaggatagcgacgaagccgtgacatatagcctgggaaagtttgggcagagggccctggatttctacagcattcatgtgaccaaggagtccacccaccccgtgaagcccctggcccagatcgccggaaacagatacgcctccggacctgtgggaaaggccctgagcgacgcatgtatgggcacaatcgcctccttcctgtctaagtaccaggacatcatcatcgaacaccagaaggtggtgaagggcaaccagaagagactggagagcctgcgggagctggccggcaaggaaaacctggaataccctagcgtgaccctgccacctcagcctcacaccaaggagggcgttgatgcctacaacgaagtgatcgcccgggtgcgaatgtgggtgaacctgaacctgtggcagaagctgaagctaagcagagatgatgccaagcctctgctgagactgaagggattcccttcctttcctctggtcgagagacaggccaacgaagtggactggtgggacatggtgtgtaacgtgaagaagctgatcaacgagaaaaaggaggatggcaaggtgttttggcagaatctggctggctacaagagacaggaagccctgagaccatacctgagcagcgaggaagatcggaagaagggaaagaaattcgctcggtaccagctgggcgacctgctgctgcacctggaaaagaagcacggcgaggactggggaaaggtgtacgacgaggcctgggagcggattgacaagaaagtggaaggcctgagcaagcacatcaagctggaagaggaacggagaagcgaggacgcccagagcaaggccgccctgaccgactggctgcgggctaaggccagcttcgtgatcgagggcctgaaggaggccgacaaggacgagttctgcagatgcgagctgaagctgcagaagtggtacggggacctgcggggaaagcccttcgccatcgaagccgagaacagcatcctggacatcagcggcttcagcaagcagtacaactgtgccttcatctggcagaaggacggcgtgaagaagctgaacctgtacctgatcatcaactacttcaagggcggcaagctgcggttcaagaagatcaaacctgaagccttcgaagccaacagattctacaccgtgatcaacaaaaagagcggcgagatcgtgcccatggaggtgaacttcaacttcgacgaccccaacctgatcatcctgcctctggcctttggcaagagacagggcagagaattcatctggaacgacctgctgtccctggaaaccggcagcctgaagctggccaacggaagagtgatcgagaagacactgtacaacagaagaacccggcaggatgagcctgccctgttcgtggccctgaccttcgagcggcgggaggtcctggactcctccaatatcaaaccaatgaacctgatcggcgtggcaagaggcgaaaacatccccgccgtgatcgccctgaccgaccccgagggctgcccactgagccggtttaaggatagcctgggaaacccaacccacatcctgagaatcggcgagagctataaggagaagcagcggaccatccaggccaagaaggaggtggagcagcggagagccggcggctacagccggaagtacgccagcaaagccaagaatctggcagacgatatggtgagaaacaccgctagagatctgctgtactacgccgtgacccaggatgccatgctgatcttcgccaacctgagccggggcttcggccggcagggcaagcggaccttcatggccgagagacagtacacacggatggaggactggctgaccgccaagctggcctacgagggcctgagcaagacctacctgtccaagacactggcccagtacacctccaagacatgcagcaactgtgggtttaccatcaccagcgccgactacgacagggtgctggagaagctgaagaagacagcaacaggctggatgaccacaattaacggcaaggagctgaaggtggagggccagattacctactacaacagatacaagagacagaacgtagtcaaggacctgtccgtcgagctggatagactgagcgaagaatctgtgaacaacgacatctcctcctggacaaagggcagaagcggagaagctctgagcctcctgaagaaaagattctcccatagacccgtgcaggagaagttcgtgtgcctgaactgcggcttcgagacacacgcagccgagcaagccgccctgaacatcgccagatcctggctgttcctgcggagccaggagtacaagaaataccagacaaacaagacaaccggcaacaccgataagagagccttcgtcgagacctggcagtccttttaccggaagaagcttaaggaggtgtggaaacctgccgtgcggtctggcggatctggcggaggctccacaagcgtgtgcggcagcgtgaccttcaaggacgtggccgtggacttcagccaggaggagtgggcctgcctggacgccacccagaaggtgctgtacagggacatgatgctggagacctacagcaacctggtggccgtggtgggccactgcatcagcaagcccgacctgatcgtgctgctggagcaggagaaggagccctggatgaccgtgaaggaggagaccgacaggcccagccccgacctggaggccaccagccccaagaaaaagagaaaagtctaagctgccttctgcggggcttgccttctggccatgcccttcttctctcccttgcacctgtacctcttggtctttgaataaagcctgagtaggaaggctagcaaaaaaaaaaaaaaaaaaaaaaaaaaaaaaaaaaaaaaaaaaaaaaaaaaaaaaaaaaaaaaaaaaaaaaaaaaaaaaaa

SEQ ID NO: 6050 - RNA, 5797 nt, synthetic construct
  source 1..5797: mol_type = other RNA
aggaaataagagagaaaagaagagtaagaagaaatataagagccaccatggcccctaagaagaagcgtaaagtgagccggatggaacgcctcgtctacgaggtgcggcagaagtgcagaaacatcgaggacatctgcatctcctgcggatctctgaacgtgaccctggagcacccactgttcatcggcggcatgtgccagaactgtaaaaactgttttctggagtgtgcctatcaatacgacgatgacggctaccagagctactgcaccatctgttgcggcggaagagaggtgctgatgtgtggaaataacaactgctgccggtgcttctgcgtggaatgcgtggacctgctggtgggccccggcgccgcccaggccgctattaaggaagatccttggaactgctacatgtgcggccacaagggcacatacggcctgctgagacggagagaggactggcctagcagactgcagatgttcttcgccaataaccacgaccaggagttcgacccccctaaggtgtaccctcccgtccccgccgagaagagaaagcccatccgggtcctgagcctgttcgatggcatcgccaccggtctgctggtgctgaaggacctgggcatccaggtggataggtacattgcctccgaggtgtgcgaggactccatcaccgtgggaatggtgcgtcatcagggcaagatcatgtacgtgggcgacgtgcggagcgtgacacagaagcatatccaggagtggggccctttcgacctggtgatcggcggcagcccttgcaatgacctgagcatcgtgaacccagcccggaagggcctgtacgagggaaccggcagactgttcttcgagttttacagactgctgcacgacgcccggcctaaggaaggcgacgaccggcccttcttttggctgttcgagaatgtggtggccatgggagtcagcgacaagcgggatattagccggttcctggagagcaaccccgtgatgatcgatgccaaggaagtgagcgccgcccaccgggccagatacttctggggcaatctgcctggcatgaacagacccctggccagcaccgtgaacgacaagctggagctgcaggagtgcctggagcacggccggatcgccaagttcagcaaggtgagaaccatcaccacccgaagcaacagcatcaaacaaggcaaggaccagcactttcctgtgttcatgaacgagaaggaggacatcctgtggtgtaccgagatggagagagtgttcgggttcccagtccactacacagatgtcagcaacatgtctagactggccagacagagactgctgggaagaagctggtccgtccctgtgatcagacacctgttcgcccctctgaaggagtacttcgcctgcgtgagcagcggcaacagcaacgccaacagccggggccccagcttctctagcggcctggtgccactgtccctgagagggagccacatgggccccatggagatctacaaaaccgtgagcgcctggaagcggcagcctgtgcgcgtgctgagcctgtttcggaatatcgataaagtcctgaaaagcctgggattcctggagagcggctctggctccggcggtggcaccctgaagtacgtggaggatgtgacaaacgtggtcagacgggatgtggagaagtggggccccttcgatctggtgtacggcagcacccaacccctgggcagctcttgtgaccggtgccctggctggtacatgtttcagttccaccggatcctgcagtacgccctgccgagacaggagtcccagcggccattcttttggattttcatggacaacttgctgctgaccgaggatgaccaggaaactaccactcggttcctgcagaccgaagccgtgaccctgcaggacgtgagaggccgggactaccagaacgccatgcgggtgtggtccaacatccctggactgaaaagcaagcacgcacctctgacccctaaagaagaggagtacctgcaggcccaggtgcggagcagaagcaagctggacgcccctaaggtggatctgctggtgaagaattgcctcctgcccctgagagagtacttcaagtatttcagccagaatagtctgcccctgggcggcccaagcagcggcgcccctcctcccagcggcggcagcccagccggctccccaacctctaccgaggagggcacctctgagtccgccacccccgagagcggccctggcacctccaccgagcccagcgagggcagcgcacccggcagccctgccggcagccccacctccacagaggagggaaccagcaccgagcccagcgaaggcagcgccccaggcaccagcaccgagcctagtgagggcggctctggcggcggcagcgcccaggagattaaacggatcaacaagatcagaagaagacttgtgaaagacagcaacaccaagaaggccggcaagacaggccccatgaaaaccctgctggttagagtgatgacacccgatctgagagagcggctggaaaacctgagaaagaagcctgaaaatatcccccagcccatcagcaatacatctagagccaacctgaataagctgctgaccgattacaccgaaatgaagaaggcgatcctgcatgtgtactgggaagagttccagaaggaccctgtgggcctgatgagccgggtggcccagcctgccagcaagaagatcgatcagaacaagctgaaacctgagatggacgagaagggcaacctgaccaccgccggctttgcctgctctcagtgtggccagcccctgttcgtgtacaagctggagcaggtgtctgagaagggcaaggcttacaccaactacttcggacggtgcaatgtggccgagcacgaaaagctgatcctgctggcccagctgaagcccgagaaggatagcgacgaagccgtgacatatagcctgggaaagtttgggcagagggccctggatttctacagcattcatgtgaccaaggagtccacccaccccgtgaagcccctggcccagatcgccggaaacagatacgcctccggacctgtgggaaaggccctgagcgacgcatgtatgggcacaatcgcctccttcctgtctaagtaccaggacatcatcatcgaacaccagaaggtggtgaagggcaaccagaagagactggagagcctgcgggagctggccggcaaggaaaacctggaataccctagcgtgaccctgccacctcagcctcacaccaaggagggcgttgatgcctacaacgaagtgatcgcccgggtgcgaatgtgggtgaacctgaacctgtggcagaagctgaagctaagcagagatgatgccaagcctctgctgagactgaagggattcccttcctttcctctggtcgagagacaggccaacgaagtggactggtgggacatggtgtgtaacgtgaagaagctgatcaacgagaaaaaggaggatggcaaggtgttttggcagaatctggctggctacaagagacaggaagccctgagaccatacctgagcagcgaggaagatcggaagaagggaaagaaattcgctcggtaccagctgggcgacctgctgctgcacctggaaaagaagcacggcgaggactggggaaaggtgtacgacgaggcctgggagcggattgacaagaaagtggaaggcctgagcaagcacatcaagctggaagaggaacggagaagcgaggacgcccagagcaaggccgccctgaccgactggctgcgggctaaggccagcttcgtgatcgagggcctgaaggaggccgacaaggacgagttctgcagatgcgagctgaagctgcagaagtggtacggggacctgcggggaaagcccttcgccatcgaagccgagaacagcatcctggacatcagcggcttcagcaagcagtacaactgtgccttcatctggcagaaggacggcgtgaagaagctgaacctgtacctgatcatcaactacttcaagggcggcaagctgcggttcaagaagatcaaacctgaagccttcgaagccaacagattctacaccgtgatcaacaaaaagagcggcgagatcgtgcccatggaggtgaacttcaacttcgacgaccccaacctgatcatcctgcctctggcctttggcaagagacagggcagagaattcatctggaacgacctgctgtccctggaaaccggcagcctgaagctggccaacggaagagtgatcgagaagacactgtacaacagaagaacccggcaggatgagcctgccctgttcgtggccctgaccttcgagcggcgggaggtcctggactcctccaatatcaaaccaatgaacctgatcggcgtggcaagaggcgaaaacatccccgccgtgatcgccctgaccgaccccgagggctgcccactgagccggtttaaggatagcctgggaaacccaacccacatcctgagaatcggcgagagctataaggagaagcagcggaccatccaggccaagaaggaggtggagcagcggagagccggcggctacagccggaagtacgccagcaaagccaagaatctggcagacgatatggtgagaaacaccgctagagatctgctgtactacgccgtgacccaggatgccatgctgatcttcgccaacctgagccggggcttcggccggcagggcaagcggaccttcatggccgagagacagtacacacggatggaggactggctgaccgccaagctggcctacgagggcctgagcaagacctacctgtccaagacactggcccagtacacctccaagacatgcagcaactgtgggtttaccatcaccagcgccgactacgacagggtgctggagaagctgaagaagacagcaacaggctggatgaccacaattaacggcaaggagctgaaggtggagggccagattacctactacaacagatacaagagacagaacgtagtcaaggacctgtccgtcgagctggatagactgagcgaagaatctgtgaacaacgacatctcctcctggacaaagggcagaagcggagaagctctgagcctcctgaagaaaagattctcccatagacccgtgcaggagaagttcgtgtgcctgaactgcggcttcgagacacacgcagccgagcaagccgccctgaacatcgccagatcctggctgttcctgcggagccaggagtacaagaaataccagacaaacaagacaaccggcaacaccgataagagagccttcgtcgagacctggcagtccttttaccggaagaagcttaaggaggtgtggaaacctgccgtgcggtctggcggatctggcggaggctccacaagcgcccaccacctggtgatgttcagggacgtggccgtggacttcagccaggaggagtgggagtgcctgaacagctaccagaggaacctgtacagggacgtgatcctggagaactacagcaacctggtgagcgtgggctgcagcatcagcaagcccgacgtgatcaccctgctggagcagggcaaggagccctggatggtggtgagggacgagaggaggaggaggagcctggacctggagagcaggaccagccccaagaaaaagagaaaagtctaagctgccttctgcggggcttgccttctggccatgcccttcttctctcccttgcacctgtacctcttggtctttgaataaagcctgagtaggaaggctagcaaaaaaaaaaaaaaaaaaaaaaaaaaaaaaaaaaaaaaaaaaaaaaaaaaaaaaaaaaaaaaaaaaaaaaaaaaaaaaaa

SEQ ID NO: 6051 - RNA, 5797 nt, synthetic construct
  source 1..5797: mol_type = other RNA
aggaaataagagagaaaagaagagtaagaagaaatataagagccaccatggcccctaagaagaagcgtaaagtgagccggatggaacgcctcgtctacgaggtgcggcagaagtgcagaaacatcgaggacatctgcatctcctgcggatctctgaacgtgaccctggagcacccactgttcatcggcggcatgtgccagaactgtaaaaactgttttctggagtgtgcctatcaatacgacgatgacggctaccagagctactgcaccatctgttgcggcggaagagaggtgctgatgtgtggaaataacaactgctgccggtgcttctgcgtggaatgcgtggacctgctggtgggccccggcgccgcccaggccgctattaaggaagatccttggaactgctacatgtgcggccacaagggcacatacggcctgctgagacggagagaggactggcctagcagactgcagatgttcttcgccaataaccacgaccaggagttcgacccccctaaggtgtaccctcccgtccccgccgagaagagaaagcccatccgggtcctgagcctgttcgatggcatcgccaccggtctgctggtgctgaaggacctgggcatccaggtggataggtacattgcctccgaggtgtgcgaggactccatcaccgtgggaatggtgcgtcatcagggcaagatcatgtacgtgggcgacgtgcggagcgtgacacagaagcatatccaggagtggggccctttcgacctggtgatcggcggcagcccttgcaatgacctgagcatcgtgaacccagcccggaagggcctgtacgagggaaccggcagactgttcttcgagttttacagactgctgcacgacgcccggcctaaggaaggcgacgaccggcccttcttttggctgttcgagaatgtggtggccatgggagtcagcgacaagcgggatattagccggttcctggagagcaaccccgtgatgatcgatgccaaggaagtgagcgccgcccaccgggccagatacttctggggcaatctgcctggcatgaacagacccctggccagcaccgtgaacgacaagctggagctgcaggagtgcctggagcacggccggatcgccaagttcagcaaggtgagaaccatcaccacccgaagcaacagcatcaaacaaggcaaggaccagcactttcctgtgttcatgaacgagaaggaggacatcctgtggtgtaccgagatggagagagtgttcgggttcccagtccactacacagatgtcagcaacatgtctagactggccagacagagactgctgggaagaagctggtccgtccctgtgatcagacacctgttcgcccctctgaaggagtacttcgcctgcgtgagcagcggcaacagcaacgccaacagccggggccccagcttctctagcggcctggtgccactgtccctgagagggagccacatgggccccatggagatctacaaaaccgtgagcgcctggaagcggcagcctgtgcgcgtgctgagcctgtttcggaatatcgataaagtcctgaaaagcctgggattcctggagagcggctctggctccggcggtggcaccctgaagtacgtggaggatgtgacaaacgtggtcagacgggatgtggagaagtggggccccttcgatctggtgtacggcagcacccaacccctgggcagctcttgtgaccggtgccctggctggtacatgtttcagttccaccggatcctgcagtacgccctgccgagacaggagtcccagcggccattcttttggattttcatggacaacttgctgctgaccgaggatgaccaggaaactaccactcggttcctgcagaccgaagccgtgaccctgcaggacgtgagaggccgggactaccagaacgccatgcgggtgtggtccaacatccctggactgaaaagcaagcacgcacctctgacccctaaagaagaggagtacctgcaggcccaggtgcggagcagaagcaagctggacgcccctaaggtggatctgctggtgaagaattgcctcctgcccctgagagagtacttcaagtatttcagccagaatagtctgcccctgggcggcccaagcagcggcgcccctcctcccagcggcggcagcccagccggctccccaacctctaccgaggagggcacctctgagtccgccacccccgagagcggccctggcacctccaccgagcccagcgagggcagcgcacccggcagccctgccggcagccccacctccacagaggagggaaccagcaccgagcccagcgaaggcagcgccccaggcaccagcaccgagcctagtgagggcggctctggcggcggcagcgcccaggagattaaacggatcaacaagatcagaagaagacttgtgaaagacagcaacaccaagaaggccggcaagacaggccccatgaaaaccctgctggttagagtgatgacacccgatctgagagagcggctggaaaacctgagaaagaagcctgaaaatatcccccagcccatcagcaatacatctagagccaacctgaataagctgctgaccgattacaccgaaatgaagaaggcgatcctgcatgtgtactgggaagagttccagaaggaccctgtgggcctgatgagccgggtggcccagcctgccagcaagaagatcgatcagaacaagctgaaacctgagatggacgagaagggcaacctgaccaccgccggctttgcctgctctcagtgtggccagcccctgttcgtgtacaagctggagcaggtgtctgagaagggcaaggcttacaccaactacttcggacggtgcaatgtggccgagcacgaaaagctgatcctgctggcccagctgaagcccgagaaggatagcgacgaagccgtgacatatagcctgggaaagtttgggcagagggccctggatttctacagcattcatgtgaccaaggagtccacccaccccgtgaagcccctggcccagatcgccggaaacagatacgcctccggacctgtgggaaaggccctgagcgacgcatgtatgggcacaatcgcctccttcctgtctaagtaccaggacatcatcatcgaacaccagaaggtggtgaagggcaaccagaagagactggagagcctgcgggagctggccggcaaggaaaacctggaataccctagcgtgaccctgccacctcagcctcacaccaaggagggcgttgatgcctacaacgaagtgatcgcccgggtgcgaatgtgggtgaacctgaacctgtggcagaagctgaagctaagcagagatgatgccaagcctctgctgagactgaagggattcccttcctttcctctggtcgagagacaggccaacgaagtggactggtgggacatggtgtgtaacgtgaagaagctgatcaacgagaaaaaggaggatggcaaggtgttttggcagaatctggctggctacaagagacaggaagccctgagaccatacctgagcagcgaggaagatcggaagaagggaaagaaattcgctcggtaccagctgggcgacctgctgctgcacctggaaaagaagcacggcgaggactggggaaaggtgtacgacgaggcctgggagcggattgacaagaaagtggaaggcctgagcaagcacatcaagctggaagaggaacggagaagcgaggacgcccagagcaaggccgccctgaccgactggctgcgggctaaggccagcttcgtgatcgagggcctgaaggaggccgacaaggacgagttctgcagatgcgagctgaagctgcagaagtggtacggggacctgcggggaaagcccttcgccatcgaagccgagaacagcatcctggacatcagcggcttcagcaagcagtacaactgtgccttcatctggcagaaggacggcgtgaagaagctgaacctgtacctgatcatcaactacttcaagggcggcaagctgcggttcaagaagatcaaacctgaagccttcgaagccaacagattctacaccgtgatcaacaaaaagagcggcgagatcgtgcccatggaggtgaacttcaacttcgacgaccccaacctgatcatcctgcctctggcctttggcaagagacagggcagagaattcatctggaacgacctgctgtccctggaaaccggcagcctgaagctggccaacggaagagtgatcgagaagacactgtacaacagaagaacccggcaggatgagcctgccctgttcgtggccctgaccttcgagcggcgggaggtcctggactcctccaatatcaaaccaatgaacctgatcggcgtggcaagaggcgaaaacatccccgccgtgatcgccctgaccgaccccgagggctgcccactgagccggtttaaggatagcctgggaaacccaacccacatcctgagaatcggcgagagctataaggagaagcagcggaccatccaggccaagaaggaggtggagcagcggagagccggcggctacagccggaagtacgccagcaaagccaagaatctggcagacgatatggtgagaaacaccgctagagatctgctgtactacgccgtgacccaggatgccatgctgatcttcgccaacctgagccggggcttcggccggcagggcaagcggaccttcatggccgagagacagtacacacggatggaggactggctgaccgccaagctggcctacgagggcctgagcaagacctacctgtccaagacactggcccagtacacctccaagacatgcagcaactgtgggtttaccatcaccagcgccgactacgacagggtgctggagaagctgaagaagacagcaacaggctggatgaccacaattaacggcaaggagctgaaggtggagggccagattacctactacaacagatacaagagacagaacgtagtcaaggacctgtccgtcgagctggatagactgagcgaagaatctgtgaacaacgacatctcctcctggacaaagggcagaagcggagaagctctgagcctcctgaagaaaagattctcccatagacccgtgcaggagaagttcgtgtgcctgaactgcggcttcgagacacacgcagccgagcaagccgccctgaacatcgccagatcctggctgttcctgcggagccaggagtacaagaaataccagacaaacaagacaaccggcaacaccgataagagagccttcgtcgagacctggcagtccttttaccggaagaagcttaaggaggtgtggaaacctgccgtgcggtctggcggatctggcggaggctccacaagcttccagggcagcctgagcttcgaggacgtgaccgtgggcttcagccaggaggagtggcagcacctggaccccgcccagaggaccctgtacagggacgtgatgctggagaactacagccacctggtggccgtgggctgctgcgtgcccaagcccgacgtgatcttcaggctggagcagggccagcagccctggctggtggaggaggagagcctggaccagatctggcccgaggtgtgcagggtgaccagccccaagaaaaagagaaaagtctaagctgccttctgcggggcttgccttctggccatgcccttcttctctcccttgcacctgtacctcttggtctttgaataaagcctgagtaggaaggctagcaaaaaaaaaaaaaaaaaaaaaaaaaaaaaaaaaaaaaaaaaaaaaaaaaaaaaaaaaaaaaaaaaaaaaaaaaaaaaaaa

SEQ ID NO: 6052 - RNA, 5797 nt, synthetic construct
  source 1..5797: mol_type = other RNA
aggaaataagagagaaaagaagagtaagaagaaatataagagccaccatggcccctaagaagaagcgtaaagtgagccggatggaacgcctcgtctacgaggtgcggcagaagtgcagaaacatcgaggacatctgcatctcctgcggatctctgaacgtgaccctggagcacccactgttcatcggcggcatgtgccagaactgtaaaaactgttttctggagtgtgcctatcaatacgacgatgacggctaccagagctactgcaccatctgttgcggcggaagagaggtgctgatgtgtggaaataacaactgctgccggtgcttctgcgtggaatgcgtggacctgctggtgggccccggcgccgcccaggccgctattaaggaagatccttggaactgctacatgtgcggccacaagggcacatacggcctgctgagacggagagaggactggcctagcagactgcagatgttcttcgccaataaccacgaccaggagttcgacccccctaaggtgtaccctcccgtccccgccgagaagagaaagcccatccgggtcctgagcctgttcgatggcatcgccaccggtctgctggtgctgaaggacctgggcatccaggtggataggtacattgcctccgaggtgtgcgaggactccatcaccgtgggaatggtgcgtcatcagggcaagatcatgtacgtgggcgacgtgcggagcgtgacacagaagcatatccaggagtggggccctttcgacctggtgatcggcggcagcccttgcaatgacctgagcatcgtgaacccagcccggaagggcctgtacgagggaaccggcagactgttcttcgagttttacagactgctgcacgacgcccggcctaaggaaggcgacgaccggcccttcttttggctgttcgagaatgtggtggccatgggagtcagcgacaagcgggatattagccggttcctggagagcaaccccgtgatgatcgatgccaaggaagtgagcgccgcccaccgggccagatacttctggggcaatctgcctggcatgaacagacccctggccagcaccgtgaacgacaagctggagctgcaggagtgcctggagcacggccggatcgccaagttcagcaaggtgagaaccatcaccacccgaagcaacagcatcaaacaaggcaaggaccagcactttcctgtgttcatgaacgagaaggaggacatcctgtggtgtaccgagatggagagagtgttcgggttcccagtccactacacagatgtcagcaacatgtctagactggccagacagagactgctgggaagaagctggtccgtccctgtgatcagacacctgttcgcccctctgaaggagtacttcgcctgcgtgagcagcggcaacagcaacgccaacagccggggccccagcttctctagcggcctggtgccactgtccctgagagggagccacatgggccccatggagatctacaaaaccgtgagcgcctggaagcggcagcctgtgcgcgtgctgagcctgtttcggaatatcgataaagtcctgaaaagcctgggattcctggagagcggctctggctccggcggtggcaccctgaagtacgtggaggatgtgacaaacgtggtcagacgggatgtggagaagtggggccccttcgatctggtgtacggcagcacccaacccctgggcagctcttgtgaccggtgccctggctggtacatgtttcagttccaccggatcctgcagtacgccctgccgagacaggagtcccagcggccattcttttggattttcatggacaacttgctgctgaccgaggatgaccaggaaactaccactcggttcctgcagaccgaagccgtgaccctgcaggacgtgagaggccgggactaccagaacgccatgcgggtgtggtccaacatccctggactgaaaagcaagcacgcacctctgacccctaaagaagaggagtacctgcaggcccaggtgcggagcagaagcaagctggacgcccctaaggtggatctgctggtgaagaattgcctcctgcccctgagagagtacttcaagtatttcagccagaatagtctgcccctgggcggcccaagcagcggcgcccctcctcccagcggcggcagcccagccggctccccaacctctaccgaggagggcacctctgagtccgccacccccgagagcggccctggcacctccaccgagcccagcgagggcagcgcacccggcagccctgccggcagccccacctccacagaggagggaaccagcaccgagcccagcgaaggcagcgccccaggcaccagcaccgagcctagtgagggcggctctggcggcggcagcgcccaggagattaaacggatcaacaagatcagaagaagacttgtgaaagacagcaacaccaagaaggccggcaagacaggccccatgaaaaccctgctggttagagtgatgacacccgatctgagagagcggctggaaaacctgagaaagaagcctgaaaatatcccccagcccatcagcaatacatctagagccaacctgaataagctgctgaccgattacaccgaaatgaagaaggcgatcctgcatgtgtactgggaagagttccagaaggaccctgtgggcctgatgagccgggtggcccagcctgccagcaagaagatcgatcagaacaagctgaaacctgagatggacgagaagggcaacctgaccaccgccggctttgcctgctctcagtgtggccagcccctgttcgtgtacaagctggagcaggtgtctgagaagggcaaggcttacaccaactacttcggacggtgcaatgtggccgagcacgaaaagctgatcctgctggcccagctgaagcccgagaaggatagcgacgaagccgtgacatatagcctgggaaagtttgggcagagggccctggatttctacagcattcatgtgaccaaggagtccacccaccccgtgaagcccctggcccagatcgccggaaacagatacgcctccggacctgtgggaaaggccctgagcgacgcatgtatgggcacaatcgcctccttcctgtctaagtaccaggacatcatcatcgaacaccagaaggtggtgaagggcaaccagaagagactggagagcctgcgggagctggccggcaaggaaaacctggaataccctagcgtgaccctgccacctcagcctcacaccaaggagggcgttgatgcctacaacgaagtgatcgcccgggtgcgaatgtgggtgaacctgaacctgtggcagaagctgaagctaagcagagatgatgccaagcctctgctgagactgaagggattcccttcctttcctctggtcgagagacaggccaacgaagtggactggtgggacatggtgtgtaacgtgaagaagctgatcaacgagaaaaaggaggatggcaaggtgttttggcagaatctggctggctacaagagacaggaagccctgagaccatacctgagcagcgaggaagatcggaagaagggaaagaaattcgctcggtaccagctgggcgacctgctgctgcacctggaaaagaagcacggcgaggactggggaaaggtgtacgacgaggcctgggagcggattgacaagaaagtggaaggcctgagcaagcacatcaagctggaagaggaacggagaagcgaggacgcccagagcaaggccgccctgaccgactggctgcgggctaaggccagcttcgtgatcgagggcctgaaggaggccgacaaggacgagttctgcagatgcgagctgaagctgcagaagtggtacggggacctgcggggaaagcccttcgccatcgaagccgagaacagcatcctggacatcagcggcttcagcaagcagtacaactgtgccttcatctggcagaaggacggcgtgaagaagctgaacctgtacctgatcatcaactacttcaagggcggcaagctgcggttcaagaagatcaaacctgaagccttcgaagccaacagattctacaccgtgatcaacaaaaagagcggcgagatcgtgcccatggaggtgaacttcaacttcgacgaccccaacctgatcatcctgcctctggcctttggcaagagacagggcagagaattcatctggaacgacctgctgtccctggaaaccggcagcctgaagctggccaacggaagagtgatcgagaagacactgtacaacagaagaacccggcaggatgagcctgccctgttcgtggccctgaccttcgagcggcgggaggtcctggactcctccaatatcaaaccaatgaacctgatcggcgtggcaagaggcgaaaacatccccgccgtgatcgccctgaccgaccccgagggctgcccactgagccggtttaaggatagcctgggaaacccaacccacatcctgagaatcggcgagagctataaggagaagcagcggaccatccaggccaagaaggaggtggagcagcggagagccggcggctacagccggaagtacgccagcaaagccaagaatctggcagacgatatggtgagaaacaccgctagagatctgctgtactacgccgtgacccaggatgccatgctgatcttcgccaacctgagccggggcttcggccggcagggcaagcggaccttcatggccgagagacagtacacacggatggaggactggctgaccgccaagctggcctacgagggcctgagcaagacctacctgtccaagacactggcccagtacacctccaagacatgcagcaactgtgggtttaccatcaccagcgccgactacgacagggtgctggagaagctgaagaagacagcaacaggctggatgaccacaattaacggcaaggagctgaaggtggagggccagattacctactacaacagatacaagagacagaacgtagtcaaggacctgtccgtcgagctggatagactgagcgaagaatctgtgaacaacgacatctcctcctggacaaagggcagaagcggagaagctctgagcctcctgaagaaaagattctcccatagacccgtgcaggagaagttcgtgtgcctgaactgcggcttcgagacacacgcagccgagcaagccgccctgaacatcgccagatcctggctgttcctgcggagccaggagtacaagaaataccagacaaacaagacaaccggcaacaccgataagagagccttcgtcgagacctggcagtccttttaccggaagaagcttaaggaggtgtggaaacctgccgtgcggtctggcggatctggcggaggctccacaagcgcccaggagagcgtgaccttcgaggacgtggccgtgaacttcaccaacagggagtggcagagcctgacctacgcccagaggcacctgtacaagcacgtgatgctggagaactacggcaacatggtgagcctgggcttccccttccccaagccccccctgatcagccacctggagaggggcgtggagccctgcgtgcaggacccccaggacagggagagcctgagctgcagctaccccgtgagcaccagccccaagaaaaagagaaaagtctaagctgccttctgcggggcttgccttctggccatgcccttcttctctcccttgcacctgtacctcttggtctttgaataaagcctgagtaggaaggctagcaaaaaaaaaaaaaaaaaaaaaaaaaaaaaaaaaaaaaaaaaaaaaaaaaaaaaaaaaaaaaaaaaaaaaaaaaaaaaaaa

SEQ ID NO: 6053 - RNA, 5797 nt, synthetic construct
  source 1..5797: mol_type = other RNA
aggaaataagagagaaaagaagagtaagaagaaatataagagccaccatggcccctaagaagaagcgtaaagtgagccggatggaacgcctcgtctacgaggtgcggcagaagtgcagaaacatcgaggacatctgcatctcctgcggatctctgaacgtgaccctggagcacccactgttcatcggcggcatgtgccagaactgtaaaaactgttttctggagtgtgcctatcaatacgacgatgacggctaccagagctactgcaccatctgttgcggcggaagagaggtgctgatgtgtggaaataacaactgctgccggtgcttctgcgtggaatgcgtggacctgctggtgggccccggcgccgcccaggccgctattaaggaagatccttggaactgctacatgtgcggccacaagggcacatacggcctgctgagacggagagaggactggcctagcagactgcagatgttcttcgccaataaccacgaccaggagttcgacccccctaaggtgtaccctcccgtccccgccgagaagagaaagcccatccgggtcctgagcctgttcgatggcatcgccaccggtctgctggtgctgaaggacctgggcatccaggtggataggtacattgcctccgaggtgtgcgaggactccatcaccgtgggaatggtgcgtcatcagggcaagatcatgtacgtgggcgacgtgcggagcgtgacacagaagcatatccaggagtggggccctttcgacctggtgatcggcggcagcccttgcaatgacctgagcatcgtgaacccagcccggaagggcctgtacgagggaaccggcagactgttcttcgagttttacagactgctgcacgacgcccggcctaaggaaggcgacgaccggcccttcttttggctgttcgagaatgtggtggccatgggagtcagcgacaagcgggatattagccggttcctggagagcaaccccgtgatgatcgatgccaaggaagtgagcgccgcccaccgggccagatacttctggggcaatctgcctggcatgaacagacccctggccagcaccgtgaacgacaagctggagctgcaggagtgcctggagcacggccggatcgccaagttcagcaaggtgagaaccatcaccacccgaagcaacagcatcaaacaaggcaaggaccagcactttcctgtgttcatgaacgagaaggaggacatcctgtggtgtaccgagatggagagagtgttcgggttcccagtccactacacagatgtcagcaacatgtctagactggccagacagagactgctgggaagaagctggtccgtccctgtgatcagacacctgttcgcccctctgaaggagtacttcgcctgcgtgagcagcggcaacagcaacgccaacagccggggccccagcttctctagcggcctggtgccactgtccctgagagggagccacatgggccccatggagatctacaaaaccgtgagcgcctggaagcggcagcctgtgcgcgtgctgagcctgtttcggaatatcgataaagtcctgaaaagcctgggattcctggagagcggctctggctccggcggtggcaccctgaagtacgtggaggatgtgacaaacgtggtcagacgggatgtggagaagtggggccccttcgatctggtgtacggcagcacccaacccctgggcagctcttgtgaccggtgccctggctggtacatgtttcagttccaccggatcctgcagtacgccctgccgagacaggagtcccagcggccattcttttggattttcatggacaacttgctgctgaccgaggatgaccaggaaactaccactcggttcctgcagaccgaagccgtgaccctgcaggacgtgagaggccgggactaccagaacgccatgcgggtgtggtccaacatccctggactgaaaagcaagcacgcacctctgacccctaaagaagaggagtacctgcaggcccaggtgcggagcagaagcaagctggacgcccctaaggtggatctgctggtgaagaattgcctcctgcccctgagagagtacttcaagtatttcagccagaatagtctgcccctgggcggcccaagcagcggcgcccctcctcccagcggcggcagcccagccggctccccaacctctaccgaggagggcacctctgagtccgccacccccgagagcggccctggcacctccaccgagcccagcgagggcagcgcacccggcagccctgccggcagccccacctccacagaggagggaaccagcaccgagcccagcgaaggcagcgccccaggcaccagcaccgagcctagtgagggcggctctggcggcggcagcgcccaggagattaaacggatcaacaagatcagaagaagacttgtgaaagacagcaacaccaagaaggccggcaagacaggccccatgaaaaccctgctggttagagtgatgacacccgatctgagagagcggctggaaaacctgagaaagaagcctgaaaatatcccccagcccatcagcaatacatctagagccaacctgaataagctgctgaccgattacaccgaaatgaagaaggcgatcctgcatgtgtactgggaagagttccagaaggaccctgtgggcctgatgagccgggtggcccagcctgccagcaagaagatcgatcagaacaagctgaaacctgagatggacgagaagggcaacctgaccaccgccggctttgcctgctctcagtgtggccagcccctgttcgtgtacaagctggagcaggtgtctgagaagggcaaggcttacaccaactacttcggacggtgcaatgtggccgagcacgaaaagctgatcctgctggcccagctgaagcccgagaaggatagcgacgaagccgtgacatatagcctgggaaagtttgggcagagggccctggatttctacagcattcatgtgaccaaggagtccacccaccccgtgaagcccctggcccagatcgccggaaacagatacgcctccggacctgtgggaaaggccctgagcgacgcatgtatgggcacaatcgcctccttcctgtctaagtaccaggacatcatcatcgaacaccagaaggtggtgaagggcaaccagaagagactggagagcctgcgggagctggccggcaaggaaaacctggaataccctagcgtgaccctgccacctcagcctcacaccaaggagggcgttgatgcctacaacgaagtgatcgcccgggtgcgaatgtgggtgaacctgaacctgtggcagaagctgaagctaagcagagatgatgccaagcctctgctgagactgaagggattcccttcctttcctctggtcgagagacaggccaacgaagtggactggtgggacatggtgtgtaacgtgaagaagctgatcaacgagaaaaaggaggatggcaaggtgttttggcagaatctggctggctacaagagacaggaagccctgagaccatacctgagcagcgaggaagatcggaagaagggaaagaaattcgctcggtaccagctgggcgacctgctgctgcacctggaaaagaagcacggcgaggactggggaaaggtgtacgacgaggcctgggagcggattgacaagaaagtggaaggcctgagcaagcacatcaagctggaagaggaacggagaagcgaggacgcccagagcaaggccgccctgaccgactggctgcgggctaaggccagcttcgtgatcgagggcctgaaggaggccgacaaggacgagttctgcagatgcgagctgaagctgcagaagtggtacggggacctgcggggaaagcccttcgccatcgaagccgagaacagcatcctggacatcagcggcttcagcaagcagtacaactgtgccttcatctggcagaaggacggcgtgaagaagctgaacctgtacctgatcatcaactacttcaagggcggcaagctgcggttcaagaagatcaaacctgaagccttcgaagccaacagattctacaccgtgatcaacaaaaagagcggcgagatcgtgcccatggaggtgaacttcaacttcgacgaccccaacctgatcatcctgcctctggcctttggcaagagacagggcagagaattcatctggaacgacctgctgtccctggaaaccggcagcctgaagctggccaacggaagagtgatcgagaagacactgtacaacagaagaacccggcaggatgagcctgccctgttcgtggccctgaccttcgagcggcgggaggtcctggactcctccaatatcaaaccaatgaacctgatcggcgtggcaagaggcgaaaacatccccgccgtgatcgccctgaccgaccccgagggctgcccactgagccggtttaaggatagcctgggaaacccaacccacatcctgagaatcggcgagagctataaggagaagcagcggaccatccaggccaagaaggaggtggagcagcggagagccggcggctacagccggaagtacgccagcaaagccaagaatctggcagacgatatggtgagaaacaccgctagagatctgctgtactacgccgtgacccaggatgccatgctgatcttcgccaacctgagccggggcttcggccggcagggcaagcggaccttcatggccgagagacagtacacacggatggaggactggctgaccgccaagctggcctacgagggcctgagcaagacctacctgtccaagacactggcccagtacacctccaagacatgcagcaactgtgggtttaccatcaccagcgccgactacgacagggtgctggagaagctgaagaagacagcaacaggctggatgaccacaattaacggcaaggagctgaaggtggagggccagattacctactacaacagatacaagagacagaacgtagtcaaggacctgtccgtcgagctggatagactgagcgaagaatctgtgaacaacgacatctcctcctggacaaagggcagaagcggagaagctctgagcctcctgaagaaaagattctcccatagacccgtgcaggagaagttcgtgtgcctgaactgcggcttcgagacacacgcagccgagcaagccgccctgaacatcgccagatcctggctgttcctgcggagccaggagtacaagaaataccagacaaacaagacaaccggcaacaccgataagagagccttcgtcgagacctggcagtccttttaccggaagaagcttaaggaggtgtggaaacctgccgtgcggtctggcggatctggcggaggctccacaagcttccaggagagcgtgaccttcaaggacgtggccgtggacttcacctgggaggagtggggctacctggacaccagccagaaggagctgtactgggaggtgatgctggagaactacaggaacctggtgagcctgggcctggccgacagcaacgtgaacatgatcagccagctggagagcggcgaggcccacggcatcagcgtggacagcgtgctgaggagctgctggcccgacggcgacaccaggaccagccccaagaaaaagagaaaagtctaagctgccttctgcggggcttgccttctggccatgcccttcttctctcccttgcacctgtacctcttggtctttgaataaagcctgagtaggaaggctagcaaaaaaaaaaaaaaaaaaaaaaaaaaaaaaaaaaaaaaaaaaaaaaaaaaaaaaaaaaaaaaaaaaaaaaaaaaaaaaaa

SEQ ID NO: 6054 - RNA, 5797 nt, synthetic construct
  source 1..5797: mol_type = other RNA
aggaaataagagagaaaagaagagtaagaagaaatataagagccaccatggcccctaagaagaagcgtaaagtgagccggatggaacgcctcgtctacgaggtgcggcagaagtgcagaaacatcgaggacatctgcatctcctgcggatctctgaacgtgaccctggagcacccactgttcatcggcggcatgtgccagaactgtaaaaactgttttctggagtgtgcctatcaatacgacgatgacggctaccagagctactgcaccatctgttgcggcggaagagaggtgctgatgtgtggaaataacaactgctgccggtgcttctgcgtggaatgcgtggacctgctggtgggccccggcgccgcccaggccgctattaaggaagatccttggaactgctacatgtgcggccacaagggcacatacggcctgctgagacggagagaggactggcctagcagactgcagatgttcttcgccaataaccacgaccaggagttcgacccccctaaggtgtaccctcccgtccccgccgagaagagaaagcccatccgggtcctgagcctgttcgatggcatcgccaccggtctgctggtgctgaaggacctgggcatccaggtggataggtacattgcctccgaggtgtgcgaggactccatcaccgtgggaatggtgcgtcatcagggcaagatcatgtacgtgggcgacgtgcggagcgtgacacagaagcatatccaggagtggggccctttcgacctggtgatcggcggcagcccttgcaatgacctgagcatcgtgaacccagcccggaagggcctgtacgagggaaccggcagactgttcttcgagttttacagactgctgcacgacgcccggcctaaggaaggcgacgaccggcccttcttttggctgttcgagaatgtggtggccatgggagtcagcgacaagcgggatattagccggttcctggagagcaaccccgtgatgatcgatgccaaggaagtgagcgccgcccaccgggccagatacttctggggcaatctgcctggcatgaacagacccctggccagcaccgtgaacgacaagctggagctgcaggagtgcctggagcacggccggatcgccaagttcagcaaggtgagaaccatcaccacccgaagcaacagcatcaaacaaggcaaggaccagcactttcctgtgttcatgaacgagaaggaggacatcctgtggtgtaccgagatggagagagtgttcgggttcccagtccactacacagatgtcagcaacatgtctagactggccagacagagactgctgggaagaagctggtccgtccctgtgatcagacacctgttcgcccctctgaaggagtacttcgcctgcgtgagcagcggcaacagcaacgccaacagccggggccccagcttctctagcggcctggtgccactgtccctgagagggagccacatgggccccatggagatctacaaaaccgtgagcgcctggaagcggcagcctgtgcgcgtgctgagcctgtttcggaatatcgataaagtcctgaaaagcctgggattcctggagagcggctctggctccggcggtggcaccctgaagtacgtggaggatgtgacaaacgtggtcagacgggatgtggagaagtggggccccttcgatctggtgtacggcagcacccaacccctgggcagctcttgtgaccggtgccctggctggtacatgtttcagttccaccggatcctgcagtacgccctgccgagacaggagtcccagcggccattcttttggattttcatggacaacttgctgctgaccgaggatgaccaggaaactaccactcggttcctgcagaccgaagccgtgaccctgcaggacgtgagaggccgggactaccagaacgccatgcgggtgtggtccaacatccctggactgaaaagcaagcacgcacctctgacccctaaagaagaggagtacctgcaggcccaggtgcggagcagaagcaagctggacgcccctaaggtggatctgctggtgaagaattgcctcctgcccctgagagagtacttcaagtatttcagccagaatagtctgcccctgggcggcccaagcagcggcgcccctcctcccagcggcggcagcccagccggctccccaacctctaccgaggagggcacctctgagtccgccacccccgagagcggccctggcacctccaccgagcccagcgagggcagcgcacccggcagccctgccggcagccccacctccacagaggagggaaccagcaccgagcccagcgaaggcagcgccccaggcaccagcaccgagcctagtgagggcggctctggcggcggcagcgcccaggagattaaacggatcaacaagatcagaagaagacttgtgaaagacagcaacaccaagaaggccggcaagacaggccccatgaaaaccctgctggttagagtgatgacacccgatctgagagagcggctggaaaacctgagaaagaagcctgaaaatatcccccagcccatcagcaatacatctagagccaacctgaataagctgctgaccgattacaccgaaatgaagaaggcgatcctgcatgtgtactgggaagagttccagaaggaccctgtgggcctgatgagccgggtggcccagcctgccagcaagaagatcgatcagaacaagctgaaacctgagatggacgagaagggcaacctgaccaccgccggctttgcctgctctcagtgtggccagcccctgttcgtgtacaagctggagcaggtgtctgagaagggcaaggcttacaccaactacttcggacggtgcaatgtggccgagcacgaaaagctgatcctgctggcccagctgaagcccgagaaggatagcgacgaagccgtgacatatagcctgggaaagtttgggcagagggccctggatttctacagcattcatgtgaccaaggagtccacccaccccgtgaagcccctggcccagatcgccggaaacagatacgcctccggacctgtgggaaaggccctgagcgacgcatgtatgggcacaatcgcctccttcctgtctaagtaccaggacatcatcatcgaacaccagaaggtggtgaagggcaaccagaagagactggagagcctgcgggagctggccggcaaggaaaacctggaataccctagcgtgaccctgccacctcagcctcacaccaaggagggcgttgatgcctacaacgaagtgatcgcccgggtgcgaatgtgggtgaacctgaacctgtggcagaagctgaagctaagcagagatgatgccaagcctctgctgagactgaagggattcccttcctttcctctggtcgagagacaggccaacgaagtggactggtgggacatggtgtgtaacgtgaagaagctgatcaacgagaaaaaggaggatggcaaggtgttttggcagaatctggctggctacaagagacaggaagccctgagaccatacctgagcagcgaggaagatcggaagaagggaaagaaattcgctcggtaccagctgggcgacctgctgctgcacctggaaaagaagcacggcgaggactggggaaaggtgtacgacgaggcctgggagcggattgacaagaaagtggaaggcctgagcaagcacatcaagctggaagaggaacggagaagcgaggacgcccagagcaaggccgccctgaccgactggctgcgggctaaggccagcttcgtgatcgagggcctgaaggaggccgacaaggacgagttctgcagatgcgagctgaagctgcagaagtggtacggggacctgcggggaaagcccttcgccatcgaagccgagaacagcatcctggacatcagcggcttcagcaagcagtacaactgtgccttcatctggcagaaggacggcgtgaagaagctgaacctgtacctgatcatcaactacttcaagggcggcaagctgcggttcaagaagatcaaacctgaagccttcgaagccaacagattctacaccgtgatcaacaaaaagagcggcgagatcgtgcccatggaggtgaacttcaacttcgacgaccccaacctgatcatcctgcctctggcctttggcaagagacagggcagagaattcatctggaacgacctgctgtccctggaaaccggcagcctgaagctggccaacggaagagtgatcgagaagacactgtacaacagaagaacccggcaggatgagcctgccctgttcgtggccctgaccttcgagcggcgggaggtcctggactcctccaatatcaaaccaatgaacctgatcggcgtggcaagaggcgaaaacatccccgccgtgatcgccctgaccgaccccgagggctgcccactgagccggtttaaggatagcctgggaaacccaacccacatcctgagaatcggcgagagctataaggagaagcagcggaccatccaggccaagaaggaggtggagcagcggagagccggcggctacagccggaagtacgccagcaaagccaagaatctggcagacgatatggtgagaaacaccgctagagatctgctgtactacgccgtgacccaggatgccatgctgatcttcgccaacctgagccggggcttcggccggcagggcaagcggaccttcatggccgagagacagtacacacggatggaggactggctgaccgccaagctggcctacgagggcctgagcaagacctacctgtccaagacactggcccagtacacctccaagacatgcagcaactgtgggtttaccatcaccagcgccgactacgacagggtgctggagaagctgaagaagacagcaacaggctggatgaccacaattaacggcaaggagctgaaggtggagggccagattacctactacaacagatacaagagacagaacgtagtcaaggacctgtccgtcgagctggatagactgagcgaagaatctgtgaacaacgacatctcctcctggacaaagggcagaagcggagaagctctgagcctcctgaagaaaagattctcccatagacccgtgcaggagaagttcgtgtgcctgaactgcggcttcgagacacacgcagccgagcaagccgccctgaacatcgccagatcctggctgttcctgcggagccaggagtacaagaaataccagacaaacaagacaaccggcaacaccgataagagagccttcgtcgagacctggcagtccttttaccggaagaagcttaaggaggtgtggaaacctgccgtgcggtctggcggatctggcggaggctccacaagcatggagagcgtgagcttcgaggacgtggccgtgaagttcacccaggaggagtgggccgtgctggaccccagccagaagaagctgtacaaggacgtgatgcaggagaccctgaagaacctggccagcatcggcaacaagagcggcaagcagaaggtgatcaacgagtacggcaagctgtggaggaagctgagcagccacctggccggcaagttcagcgactacaacgagaaccaccagtgcgccaccagccccaagaaaaagagaaaagtctaagctgccttctgcggggcttgccttctggccatgcccttcttctctcccttgcacctgtacctcttggtctttgaataaagcctgagtaggaaggctagcaaaaaaaaaaaaaaaaaaaaaaaaaaaaaaaaaaaaaaaaaaaaaaaaaaaaaaaaaaaaaaaaaaaaaaaaaaaaaaaa

SEQ ID NO: 6055 - RNA, 5797 nt, synthetic construct
  source 1..5797: mol_type = other RNA
aggaaataagagagaaaagaagagtaagaagaaatataagagccaccatggcccctaagaagaagcgtaaagtgagccggatggaacgcctcgtctacgaggtgcggcagaagtgcagaaacatcgaggacatctgcatctcctgcggatctctgaacgtgaccctggagcacccactgttcatcggcggcatgtgccagaactgtaaaaactgttttctggagtgtgcctatcaatacgacgatgacggctaccagagctactgcaccatctgttgcggcggaagagaggtgctgatgtgtggaaataacaactgctgccggtgcttctgcgtggaatgcgtggacctgctggtgggccccggcgccgcccaggccgctattaaggaagatccttggaactgctacatgtgcggccacaagggcacatacggcctgctgagacggagagaggactggcctagcagactgcagatgttcttcgccaataaccacgaccaggagttcgacccccctaaggtgtaccctcccgtccccgccgagaagagaaagcccatccgggtcctgagcctgttcgatggcatcgccaccggtctgctggtgctgaaggacctgggcatccaggtggataggtacattgcctccgaggtgtgcgaggactccatcaccgtgggaatggtgcgtcatcagggcaagatcatgtacgtgggcgacgtgcggagcgtgacacagaagcatatccaggagtggggccctttcgacctggtgatcggcggcagcccttgcaatgacctgagcatcgtgaacccagcccggaagggcctgtacgagggaaccggcagactgttcttcgagttttacagactgctgcacgacgcccggcctaaggaaggcgacgaccggcccttcttttggctgttcgagaatgtggtggccatgggagtcagcgacaagcgggatattagccggttcctggagagcaaccccgtgatgatcgatgccaaggaagtgagcgccgcccaccgggccagatacttctggggcaatctgcctggcatgaacagacccctggccagcaccgtgaacgacaagctggagctgcaggagtgcctggagcacggccggatcgccaagttcagcaaggtgagaaccatcaccacccgaagcaacagcatcaaacaaggcaaggaccagcactttcctgtgttcatgaacgagaaggaggacatcctgtggtgtaccgagatggagagagtgttcgggttcccagtccactacacagatgtcagcaacatgtctagactggccagacagagactgctgggaagaagctggtccgtccctgtgatcagacacctgttcgcccctctgaaggagtacttcgcctgcgtgagcagcggcaacagcaacgccaacagccggggccccagcttctctagcggcctggtgccactgtccctgagagggagccacatgggccccatggagatctacaaaaccgtgagcgcctggaagcggcagcctgtgcgcgtgctgagcctgtttcggaatatcgataaagtcctgaaaagcctgggattcctggagagcggctctggctccggcggtggcaccctgaagtacgtggaggatgtgacaaacgtggtcagacgggatgtggagaagtggggccccttcgatctggtgtacggcagcacccaacccctgggcagctcttgtgaccggtgccctggctggtacatgtttcagttccaccggatcctgcagtacgccctgccgagacaggagtcccagcggccattcttttggattttcatggacaacttgctgctgaccgaggatgaccaggaaactaccactcggttcctgcagaccgaagccgtgaccctgcaggacgtgagaggccgggactaccagaacgccatgcgggtgtggtccaacatccctggactgaaaagcaagcacgcacctctgacccctaaagaagaggagtacctgcaggcccaggtgcggagcagaagcaagctggacgcccctaaggtggatctgctggtgaagaattgcctcctgcccctgagagagtacttcaagtatttcagccagaatagtctgcccctgggcggcccaagcagcggcgcccctcctcccagcggcggcagcccagccggctccccaacctctaccgaggagggcacctctgagtccgccacccccgagagcggccctggcacctccaccgagcccagcgagggcagcgcacccggcagccctgccggcagccccacctccacagaggagggaaccagcaccgagcccagcgaaggcagcgccccaggcaccagcaccgagcctagtgagggcggctctggcggcggcagcgcccaggagattaaacggatcaacaagatcagaagaagacttgtgaaagacagcaacaccaagaaggccggcaagacaggccccatgaaaaccctgctggttagagtgatgacacccgatctgagagagcggctggaaaacctgagaaagaagcctgaaaatatcccccagcccatcagcaatacatctagagccaacctgaataagctgctgaccgattacaccgaaatgaagaaggcgatcctgcatgtgtactgggaagagttccagaaggaccctgtgggcctgatgagccgggtggcccagcctgccagcaagaagatcgatcagaacaagctgaaacctgagatggacgagaagggcaacctgaccaccgccggctttgcctgctctcagtgtggccagcccctgttcgtgtacaagctggagcaggtgtctgagaagggcaaggcttacaccaactacttcggacggtgcaatgtggccgagcacgaaaagctgatcctgctggcccagctgaagcccgagaaggatagcgacgaagccgtgacatatagcctgggaaagtttgggcagagggccctggatttctacagcattcatgtgaccaaggagtccacccaccccgtgaagcccctggcccagatcgccggaaacagatacgcctccggacctgtgggaaaggccctgagcgacgcatgtatgggcacaatcgcctccttcctgtctaagtaccaggacatcatcatcgaacaccagaaggtggtgaagggcaaccagaagagactggagagcctgcgggagctggccggcaaggaaaacctggaataccctagcgtgaccctgccacctcagcctcacaccaaggagggcgttgatgcctacaacgaagtgatcgcccgggtgcgaatgtgggtgaacctgaacctgtggcagaagctgaagctaagcagagatgatgccaagcctctgctgagactgaagggattcccttcctttcctctggtcgagagacaggccaacgaagtggactggtgggacatggtgtgtaacgtgaagaagctgatcaacgagaaaaaggaggatggcaaggtgttttggcagaatctggctggctacaagagacaggaagccctgagaccatacctgagcagcgaggaagatcggaagaagggaaagaaattcgctcggtaccagctgggcgacctgctgctgcacctggaaaagaagcacggcgaggactggggaaaggtgtacgacgaggcctgggagcggattgacaagaaagtggaaggcctgagcaagcacatcaagctggaagaggaacggagaagcgaggacgcccagagcaaggccgccctgaccgactggctgcgggctaaggccagcttcgtgatcgagggcctgaaggaggccgacaaggacgagttctgcagatgcgagctgaagctgcagaagtggtacggggacctgcggggaaagcccttcgccatcgaagccgagaacagcatcctggacatcagcggcttcagcaagcagtacaactgtgccttcatctggcagaaggacggcgtgaagaagctgaacctgtacctgatcatcaactacttcaagggcggcaagctgcggttcaagaagatcaaacctgaagccttcgaagccaacagattctacaccgtgatcaacaaaaagagcggcgagatcgtgcccatggaggtgaacttcaacttcgacgaccccaacctgatcatcctgcctctggcctttggcaagagacagggcagagaattcatctggaacgacctgctgtccctggaaaccggcagcctgaagctggccaacggaagagtgatcgagaagacactgtacaacagaagaacccggcaggatgagcctgccctgttcgtggccctgaccttcgagcggcgggaggtcctggactcctccaatatcaaaccaatgaacctgatcggcgtggcaagaggcgaaaacatccccgccgtgatcgccctgaccgaccccgagggctgcccactgagccggtttaaggatagcctgggaaacccaacccacatcctgagaatcggcgagagctataaggagaagcagcggaccatccaggccaagaaggaggtggagcagcggagagccggcggctacagccggaagtacgccagcaaagccaagaatctggcagacgatatggtgagaaacaccgctagagatctgctgtactacgccgtgacccaggatgccatgctgatcttcgccaacctgagccggggcttcggccggcagggcaagcggaccttcatggccgagagacagtacacacggatggaggactggctgaccgccaagctggcctacgagggcctgagcaagacctacctgtccaagacactggcccagtacacctccaagacatgcagcaactgtgggtttaccatcaccagcgccgactacgacagggtgctggagaagctgaagaagacagcaacaggctggatgaccacaattaacggcaaggagctgaaggtggagggccagattacctactacaacagatacaagagacagaacgtagtcaaggacctgtccgtcgagctggatagactgagcgaagaatctgtgaacaacgacatctcctcctggacaaagggcagaagcggagaagctctgagcctcctgaagaaaagattctcccatagacccgtgcaggagaagttcgtgtgcctgaactgcggcttcgagacacacgcagccgagcaagccgccctgaacatcgccagatcctggctgttcctgcggagccaggagtacaagaaataccagacaaacaagacaaccggcaacaccgataagagagccttcgtcgagacctggcagtccttttaccggaagaagcttaaggaggtgtggaaacctgccgtgcggtctggcggatctggcggaggctccacaagcagccaggagcccgtgaccttcgaggacgtggccgtgtacttcacccagaaccagtgggccagcctggaccccatgcagagggccctgtacctggaggtgatgctggagaactacgccaacatcaccagcctggccgccctgcccttccccaagcccgacctgatcctgcagctggagcagggcgaggccccctggggcctggacccctggacccccctggagagggaggccctgggcggcgtgaccagccccaagaaaaagagaaaagtctaagctgccttctgcggggcttgccttctggccatgcccttcttctctcccttgcacctgtacctcttggtctttgaataaagcctgagtaggaaggctagcaaaaaaaaaaaaaaaaaaaaaaaaaaaaaaaaaaaaaaaaaaaaaaaaaaaaaaaaaaaaaaaaaaaaaaaaaaaaaaaa

SEQ ID NO: 6056 - RNA, 5797 nt, synthetic construct
  source 1..5797: mol_type = other RNA
aggaaataagagagaaaagaagagtaagaagaaatataagagccaccatggcccctaagaagaagcgtaaagtgagccggatggaacgcctcgtctacgaggtgcggcagaagtgcagaaacatcgaggacatctgcatctcctgcggatctctgaacgtgaccctggagcacccactgttcatcggcggcatgtgccagaactgtaaaaactgttttctggagtgtgcctatcaatacgacgatgacggctaccagagctactgcaccatctgttgcggcggaagagaggtgctgatgtgtggaaataacaactgctgccggtgcttctgcgtggaatgcgtggacctgctggtgggccccggcgccgcccaggccgctattaaggaagatccttggaactgctacatgtgcggccacaagggcacatacggcctgctgagacggagagaggactggcctagcagactgcagatgttcttcgccaataaccacgaccaggagttcgacccccctaaggtgtaccctcccgtccccgccgagaagagaaagcccatccgggtcctgagcctgttcgatggcatcgccaccggtctgctggtgctgaaggacctgggcatccaggtggataggtacattgcctccgaggtgtgcgaggactccatcaccgtgggaatggtgcgtcatcagggcaagatcatgtacgtgggcgacgtgcggagcgtgacacagaagcatatccaggagtggggccctttcgacctggtgatcggcggcagcccttgcaatgacctgagcatcgtgaacccagcccggaagggcctgtacgagggaaccggcagactgttcttcgagttttacagactgctgcacgacgcccggcctaaggaaggcgacgaccggcccttcttttggctgttcgagaatgtggtggccatgggagtcagcgacaagcgggatattagccggttcctggagagcaaccccgtgatgatcgatgccaaggaagtgagcgccgcccaccgggccagatacttctggggcaatctgcctggcatgaacagacccctggccagcaccgtgaacgacaagctggagctgcaggagtgcctggagcacggccggatcgccaagttcagcaaggtgagaaccatcaccacccgaagcaacagcatcaaacaaggcaaggaccagcactttcctgtgttcatgaacgagaaggaggacatcctgtggtgtaccgagatggagagagtgttcgggttcccagtccactacacagatgtcagcaacatgtctagactggccagacagagactgctgggaagaagctggtccgtccctgtgatcagacacctgttcgcccctctgaaggagtacttcgcctgcgtgagcagcggcaacagcaacgccaacagccggggccccagcttctctagcggcctggtgccactgtccctgagagggagccacatgggccccatggagatctacaaaaccgtgagcgcctggaagcggcagcctgtgcgcgtgctgagcctgtttcggaatatcgataaagtcctgaaaagcctgggattcctggagagcggctctggctccggcggtggcaccctgaagtacgtggaggatgtgacaaacgtggtcagacgggatgtggagaagtggggccccttcgatctggtgtacggcagcacccaacccctgggcagctcttgtgaccggtgccctggctggtacatgtttcagttccaccggatcctgcagtacgccctgccgagacaggagtcccagcggccattcttttggattttcatggacaacttgctgctgaccgaggatgaccaggaaactaccactcggttcctgcagaccgaagccgtgaccctgcaggacgtgagaggccgggactaccagaacgccatgcgggtgtggtccaacatccctggactgaaaagcaagcacgcacctctgacccctaaagaagaggagtacctgcaggcccaggtgcggagcagaagcaagctggacgcccctaaggtggatctgctggtgaagaattgcctcctgcccctgagagagtacttcaagtatttcagccagaatagtctgcccctgggcggcccaagcagcggcgcccctcctcccagcggcggcagcccagccggctccccaacctctaccgaggagggcacctctgagtccgccacccccgagagcggccctggcacctccaccgagcccagcgagggcagcgcacccggcagccctgccggcagccccacctccacagaggagggaaccagcaccgagcccagcgaaggcagcgccccaggcaccagcaccgagcctagtgagggcggctctggcggcggcagcgcccaggagattaaacggatcaacaagatcagaagaagacttgtgaaagacagcaacaccaagaaggccggcaagacaggccccatgaaaaccctgctggttagagtgatgacacccgatctgagagagcggctggaaaacctgagaaagaagcctgaaaatatcccccagcccatcagcaatacatctagagccaacctgaataagctgctgaccgattacaccgaaatgaagaaggcgatcctgcatgtgtactgggaagagttccagaaggaccctgtgggcctgatgagccgggtggcccagcctgccagcaagaagatcgatcagaacaagctgaaacctgagatggacgagaagggcaacctgaccaccgccggctttgcctgctctcagtgtggccagcccctgttcgtgtacaagctggagcaggtgtctgagaagggcaaggcttacaccaactacttcggacggtgcaatgtggccgagcacgaaaagctgatcctgctggcccagctgaagcccgagaaggatagcgacgaagccgtgacatatagcctgggaaagtttgggcagagggccctggatttctacagcattcatgtgaccaaggagtccacccaccccgtgaagcccctggcccagatcgccggaaacagatacgcctccggacctgtgggaaaggccctgagcgacgcatgtatgggcacaatcgcctccttcctgtctaagtaccaggacatcatcatcgaacaccagaaggtggtgaagggcaaccagaagagactggagagcctgcgggagctggccggcaaggaaaacctggaataccctagcgtgaccctgccacctcagcctcacaccaaggagggcgttgatgcctacaacgaagtgatcgcccgggtgcgaatgtgggtgaacctgaacctgtggcagaagctgaagctaagcagagatgatgccaagcctctgctgagactgaagggattcccttcctttcctctggtcgagagacaggccaacgaagtggactggtgggacatggtgtgtaacgtgaagaagctgatcaacgagaaaaaggaggatggcaaggtgttttggcagaatctggctggctacaagagacaggaagccctgagaccatacctgagcagcgaggaagatcggaagaagggaaagaaattcgctcggtaccagctgggcgacctgctgctgcacctggaaaagaagcacggcgaggactggggaaaggtgtacgacgaggcctgggagcggattgacaagaaagtggaaggcctgagcaagcacatcaagctggaagaggaacggagaagcgaggacgcccagagcaaggccgccctgaccgactggctgcgggctaaggccagcttcgtgatcgagggcctgaaggaggccgacaaggacgagttctgcagatgcgagctgaagctgcagaagtggtacggggacctgcggggaaagcccttcgccatcgaagccgagaacagcatcctggacatcagcggcttcagcaagcagtacaactgtgccttcatctggcagaaggacggcgtgaagaagctgaacctgtacctgatcatcaactacttcaagggcggcaagctgcggttcaagaagatcaaacctgaagccttcgaagccaacagattctacaccgtgatcaacaaaaagagcggcgagatcgtgcccatggaggtgaacttcaacttcgacgaccccaacctgatcatcctgcctctggcctttggcaagagacagggcagagaattcatctggaacgacctgctgtccctggaaaccggcagcctgaagctggccaacggaagagtgatcgagaagacactgtacaacagaagaacccggcaggatgagcctgccctgttcgtggccctgaccttcgagcggcgggaggtcctggactcctccaatatcaaaccaatgaacctgatcggcgtggcaagaggcgaaaacatccccgccgtgatcgccctgaccgaccccgagggctgcccactgagccggtttaaggatagcctgggaaacccaacccacatcctgagaatcggcgagagctataaggagaagcagcggaccatccaggccaagaaggaggtggagcagcggagagccggcggctacagccggaagtacgccagcaaagccaagaatctggcagacgatatggtgagaaacaccgctagagatctgctgtactacgccgtgacccaggatgccatgctgatcttcgccaacctgagccggggcttcggccggcagggcaagcggaccttcatggccgagagacagtacacacggatggaggactggctgaccgccaagctggcctacgagggcctgagcaagacctacctgtccaagacactggcccagtacacctccaagacatgcagcaactgtgggtttaccatcaccagcgccgactacgacagggtgctggagaagctgaagaagacagcaacaggctggatgaccacaattaacggcaaggagctgaaggtggagggccagattacctactacaacagatacaagagacagaacgtagtcaaggacctgtccgtcgagctggatagactgagcgaagaatctgtgaacaacgacatctcctcctggacaaagggcagaagcggagaagctctgagcctcctgaagaaaagattctcccatagacccgtgcaggagaagttcgtgtgcctgaactgcggcttcgagacacacgcagccgagcaagccgccctgaacatcgccagatcctggctgttcctgcggagccaggagtacaagaaataccagacaaacaagacaaccggcaacaccgataagagagccttcgtcgagacctggcagtccttttaccggaagaagcttaaggaggtgtggaaacctgccgtgcggtctggcggatctggcggaggctccacaagcgaggagctgcccgtggtgttcgaggacgtggccgtgtacttcaccagggaggagtgggccatgctggacaagaggcagaaggagctgtacagggacgtgatgaggatgaactacgagctgctggccagcctgggccccgccgccgccaagcccgagctgatcagcaagctggagaggagggccgccccctggatcaaggaccccaacggccccaagtggggcaagggcaggccccccggcaagaccagccccaagaaaaagagaaaagtctaagctgccttctgcggggcttgccttctggccatgcccttcttctctcccttgcacctgtacctcttggtctttgaataaagcctgagtaggaaggctagcaaaaaaaaaaaaaaaaaaaaaaaaaaaaaaaaaaaaaaaaaaaaaaaaaaaaaaaaaaaaaaaaaaaaaaaaaaaaaaaa

SEQ ID NO: 6057 - RNA, 5797 nt, synthetic construct
  source 1..5797: mol_type = other RNA
aggaaataagagagaaaagaagagtaagaagaaatataagagccaccatggcccctaagaagaagcgtaaagtgagccggatggaacgcctcgtctacgaggtgcggcagaagtgcagaaacatcgaggacatctgcatctcctgcggatctctgaacgtgaccctggagcacccactgttcatcggcggcatgtgccagaactgtaaaaactgttttctggagtgtgcctatcaatacgacgatgacggctaccagagctactgcaccatctgttgcggcggaagagaggtgctgatgtgtggaaataacaactgctgccggtgcttctgcgtggaatgcgtggacctgctggtgggccccggcgccgcccaggccgctattaaggaagatccttggaactgctacatgtgcggccacaagggcacatacggcctgctgagacggagagaggactggcctagcagactgcagatgttcttcgccaataaccacgaccaggagttcgacccccctaaggtgtaccctcccgtccccgccgagaagagaaagcccatccgggtcctgagcctgttcgatggcatcgccaccggtctgctggtgctgaaggacctgggcatccaggtggataggtacattgcctccgaggtgtgcgaggactccatcaccgtgggaatggtgcgtcatcagggcaagatcatgtacgtgggcgacgtgcggagcgtgacacagaagcatatccaggagtggggccctttcgacctggtgatcggcggcagcccttgcaatgacctgagcatcgtgaacccagcccggaagggcctgtacgagggaaccggcagactgttcttcgagttttacagactgctgcacgacgcccggcctaaggaaggcgacgaccggcccttcttttggctgttcgagaatgtggtggccatgggagtcagcgacaagcgggatattagccggttcctggagagcaaccccgtgatgatcgatgccaaggaagtgagcgccgcccaccgggccagatacttctggggcaatctgcctggcatgaacagacccctggccagcaccgtgaacgacaagctggagctgcaggagtgcctggagcacggccggatcgccaagttcagcaaggtgagaaccatcaccacccgaagcaacagcatcaaacaaggcaaggaccagcactttcctgtgttcatgaacgagaaggaggacatcctgtggtgtaccgagatggagagagtgttcgggttcccagtccactacacagatgtcagcaacatgtctagactggccagacagagactgctgggaagaagctggtccgtccctgtgatcagacacctgttcgcccctctgaaggagtacttcgcctgcgtgagcagcggcaacagcaacgccaacagccggggccccagcttctctagcggcctggtgccactgtccctgagagggagccacatgggccccatggagatctacaaaaccgtgagcgcctggaagcggcagcctgtgcgcgtgctgagcctgtttcggaatatcgataaagtcctgaaaagcctgggattcctggagagcggctctggctccggcggtggcaccctgaagtacgtggaggatgtgacaaacgtggtcagacgggatgtggagaagtggggccccttcgatctggtgtacggcagcacccaacccctgggcagctcttgtgaccggtgccctggctggtacatgtttcagttccaccggatcctgcagtacgccctgccgagacaggagtcccagcggccattcttttggattttcatggacaacttgctgctgaccgaggatgaccaggaaactaccactcggttcctgcagaccgaagccgtgaccctgcaggacgtgagaggccgggactaccagaacgccatgcgggtgtggtccaacatccctggactgaaaagcaagcacgcacctctgacccctaaagaagaggagtacctgcaggcccaggtgcggagcagaagcaagctggacgcccctaaggtggatctgctggtgaagaattgcctcctgcccctgagagagtacttcaagtatttcagccagaatagtctgcccctgggcggcccaagcagcggcgcccctcctcccagcggcggcagcccagccggctccccaacctctaccgaggagggcacctctgagtccgccacccccgagagcggccctggcacctccaccgagcccagcgagggcagcgcacccggcagccctgccggcagccccacctccacagaggagggaaccagcaccgagcccagcgaaggcagcgccccaggcaccagcaccgagcctagtgagggcggctctggcggcggcagcgcccaggagattaaacggatcaacaagatcagaagaagacttgtgaaagacagcaacaccaagaaggccggcaagacaggccccatgaaaaccctgctggttagagtgatgacacccgatctgagagagcggctggaaaacctgagaaagaagcctgaaaatatcccccagcccatcagcaatacatctagagccaacctgaataagctgctgaccgattacaccgaaatgaagaaggcgatcctgcatgtgtactgggaagagttccagaaggaccctgtgggcctgatgagccgggtggcccagcctgccagcaagaagatcgatcagaacaagctgaaacctgagatggacgagaagggcaacctgaccaccgccggctttgcctgctctcagtgtggccagcccctgttcgtgtacaagctggagcaggtgtctgagaagggcaaggcttacaccaactacttcggacggtgcaatgtggccgagcacgaaaagctgatcctgctggcccagctgaagcccgagaaggatagcgacgaagccgtgacatatagcctgggaaagtttgggcagagggccctggatttctacagcattcatgtgaccaaggagtccacccaccccgtgaagcccctggcccagatcgccggaaacagatacgcctccggacctgtgggaaaggccctgagcgacgcatgtatgggcacaatcgcctccttcctgtctaagtaccaggacatcatcatcgaacaccagaaggtggtgaagggcaaccagaagagactggagagcctgcgggagctggccggcaaggaaaacctggaataccctagcgtgaccctgccacctcagcctcacaccaaggagggcgttgatgcctacaacgaagtgatcgcccgggtgcgaatgtgggtgaacctgaacctgtggcagaagctgaagctaagcagagatgatgccaagcctctgctgagactgaagggattcccttcctttcctctggtcgagagacaggccaacgaagtggactggtgggacatggtgtgtaacgtgaagaagctgatcaacgagaaaaaggaggatggcaaggtgttttggcagaatctggctggctacaagagacaggaagccctgagaccatacctgagcagcgaggaagatcggaagaagggaaagaaattcgctcggtaccagctgggcgacctgctgctgcacctggaaaagaagcacggcgaggactggggaaaggtgtacgacgaggcctgggagcggattgacaagaaagtggaaggcctgagcaagcacatcaagctggaagaggaacggagaagcgaggacgcccagagcaaggccgccctgaccgactggctgcgggctaaggccagcttcgtgatcgagggcctgaaggaggccgacaaggacgagttctgcagatgcgagctgaagctgcagaagtggtacggggacctgcggggaaagcccttcgccatcgaagccgagaacagcatcctggacatcagcggcttcagcaagcagtacaactgtgccttcatctggcagaaggacggcgtgaagaagctgaacctgtacctgatcatcaactacttcaagggcggcaagctgcggttcaagaagatcaaacctgaagccttcgaagccaacagattctacaccgtgatcaacaaaaagagcggcgagatcgtgcccatggaggtgaacttcaacttcgacgaccccaacctgatcatcctgcctctggcctttggcaagagacagggcagagaattcatctggaacgacctgctgtccctggaaaccggcagcctgaagctggccaacggaagagtgatcgagaagacactgtacaacagaagaacccggcaggatgagcctgccctgttcgtggccctgaccttcgagcggcgggaggtcctggactcctccaatatcaaaccaatgaacctgatcggcgtggcaagaggcgaaaacatccccgccgtgatcgccctgaccgaccccgagggctgcccactgagccggtttaaggatagcctgggaaacccaacccacatcctgagaatcggcgagagctataaggagaagcagcggaccatccaggccaagaaggaggtggagcagcggagagccggcggctacagccggaagtacgccagcaaagccaagaatctggcagacgatatggtgagaaacaccgctagagatctgctgtactacgccgtgacccaggatgccatgctgatcttcgccaacctgagccggggcttcggccggcagggcaagcggaccttcatggccgagagacagtacacacggatggaggactggctgaccgccaagctggcctacgagggcctgagcaagacctacctgtccaagacactggcccagtacacctccaagacatgcagcaactgtgggtttaccatcaccagcgccgactacgacagggtgctggagaagctgaagaagacagcaacaggctggatgaccacaattaacggcaaggagctgaaggtggagggccagattacctactacaacagatacaagagacagaacgtagtcaaggacctgtccgtcgagctggatagactgagcgaagaatctgtgaacaacgacatctcctcctggacaaagggcagaagcggagaagctctgagcctcctgaagaaaagattctcccatagacccgtgcaggagaagttcgtgtgcctgaactgcggcttcgagacacacgcagccgagcaagccgccctgaacatcgccagatcctggctgttcctgcggagccaggagtacaagaaataccagacaaacaagacaaccggcaacaccgataagagagccttcgtcgagacctggcagtccttttaccggaagaagcttaaggaggtgtggaaacctgccgtgcggtctggcggatctggcggaggctccacaagcgcccagggccccgtgaccttcgaggacgtggccgtgtacttcagcgccgaggagtggcaggagctggccggctggcagagggagctgtacagggacgtgatgatggacacctacgagctggtggccagcctgggccccgccggcctgaagcccgaggtggtgagcaagctggagaggggcgaggagccccaccagcccgccaggagcagggagagccccagggcccccctgcccgtgctgctgaccagccccaagaaaaagagaaaagtctaagctgccttctgcggggcttgccttctggccatgcccttcttctctcccttgcacctgtacctcttggtctttgaataaagcctgagtaggaaggctagcaaaaaaaaaaaaaaaaaaaaaaaaaaaaaaaaaaaaaaaaaaaaaaaaaaaaaaaaaaaaaaaaaaaaaaaaaaaaaaaa

SEQ ID NO: 6058 - RNA, 5797 nt, synthetic construct
  source 1..5797: mol_type = other RNA
aggaaataagagagaaaagaagagtaagaagaaatataagagccaccatggcccctaagaagaagcgtaaagtgagccggatggaacgcctcgtctacgaggtgcggcagaagtgcagaaacatcgaggacatctgcatctcctgcggatctctgaacgtgaccctggagcacccactgttcatcggcggcatgtgccagaactgtaaaaactgttttctggagtgtgcctatcaatacgacgatgacggctaccagagctactgcaccatctgttgcggcggaagagaggtgctgatgtgtggaaataacaactgctgccggtgcttctgcgtggaatgcgtggacctgctggtgggccccggcgccgcccaggccgctattaaggaagatccttggaactgctacatgtgcggccacaagggcacatacggcctgctgagacggagagaggactggcctagcagactgcagatgttcttcgccaataaccacgaccaggagttcgacccccctaaggtgtaccctcccgtccccgccgagaagagaaagcccatccgggtcctgagcctgttcgatggcatcgccaccggtctgctggtgctgaaggacctgggcatccaggtggataggtacattgcctccgaggtgtgcgaggactccatcaccgtgggaatggtgcgtcatcagggcaagatcatgtacgtgggcgacgtgcggagcgtgacacagaagcatatccaggagtggggccctttcgacctggtgatcggcggcagcccttgcaatgacctgagcatcgtgaacccagcccggaagggcctgtacgagggaaccggcagactgttcttcgagttttacagactgctgcacgacgcccggcctaaggaaggcgacgaccggcccttcttttggctgttcgagaatgtggtggccatgggagtcagcgacaagcgggatattagccggttcctggagagcaaccccgtgatgatcgatgccaaggaagtgagcgccgcccaccgggccagatacttctggggcaatctgcctggcatgaacagacccctggccagcaccgtgaacgacaagctggagctgcaggagtgcctggagcacggccggatcgccaagttcagcaaggtgagaaccatcaccacccgaagcaacagcatcaaacaaggcaaggaccagcactttcctgtgttcatgaacgagaaggaggacatcctgtggtgtaccgagatggagagagtgttcgggttcccagtccactacacagatgtcagcaacatgtctagactggccagacagagactgctgggaagaagctggtccgtccctgtgatcagacacctgttcgcccctctgaaggagtacttcgcctgcgtgagcagcggcaacagcaacgccaacagccggggccccagcttctctagcggcctggtgccactgtccctgagagggagccacatgggccccatggagatctacaaaaccgtgagcgcctggaagcggcagcctgtgcgcgtgctgagcctgtttcggaatatcgataaagtcctgaaaagcctgggattcctggagagcggctctggctccggcggtggcaccctgaagtacgtggaggatgtgacaaacgtggtcagacgggatgtggagaagtggggccccttcgatctggtgtacggcagcacccaacccctgggcagctcttgtgaccggtgccctggctggtacatgtttcagttccaccggatcctgcagtacgccctgccgagacaggagtcccagcggccattcttttggattttcatggacaacttgctgctgaccgaggatgaccaggaaactaccactcggttcctgcagaccgaagccgtgaccctgcaggacgtgagaggccgggactaccagaacgccatgcgggtgtggtccaacatccctggactgaaaagcaagcacgcacctctgacccctaaagaagaggagtacctgcaggcccaggtgcggagcagaagcaagctggacgcccctaaggtggatctgctggtgaagaattgcctcctgcccctgagagagtacttcaagtatttcagccagaatagtctgcccctgggcggcccaagcagcggcgcccctcctcccagcggcggcagcccagccggctccccaacctctaccgaggagggcacctctgagtccgccacccccgagagcggccctggcacctccaccgagcccagcgagggcagcgcacccggcagccctgccggcagccccacctccacagaggagggaaccagcaccgagcccagcgaaggcagcgccccaggcaccagcaccgagcctagtgagggcggctctggcggcggcagcgcccaggagattaaacggatcaacaagatcagaagaagacttgtgaaagacagcaacaccaagaaggccggcaagacaggccccatgaaaaccctgctggttagagtgatgacacccgatctgagagagcggctggaaaacctgagaaagaagcctgaaaatatcccccagcccatcagcaatacatctagagccaacctgaataagctgctgaccgattacaccgaaatgaagaaggcgatcctgcatgtgtactgggaagagttccagaaggaccctgtgggcctgatgagccgggtggcccagcctgccagcaagaagatcgatcagaacaagctgaaacctgagatggacgagaagggcaacctgaccaccgccggctttgcctgctctcagtgtggccagcccctgttcgtgtacaagctggagcaggtgtctgagaagggcaaggcttacaccaactacttcggacggtgcaatgtggccgagcacgaaaagctgatcctgctggcccagctgaagcccgagaaggatagcgacgaagccgtgacatatagcctgggaaagtttgggcagagggccctggatttctacagcattcatgtgaccaaggagtccacccaccccgtgaagcccctggcccagatcgccggaaacagatacgcctccggacctgtgggaaaggccctgagcgacgcatgtatgggcacaatcgcctccttcctgtctaagtaccaggacatcatcatcgaacaccagaaggtggtgaagggcaaccagaagagactggagagcctgcgggagctggccggcaaggaaaacctggaataccctagcgtgaccctgccacctcagcctcacaccaaggagggcgttgatgcctacaacgaagtgatcgcccgggtgcgaatgtgggtgaacctgaacctgtggcagaagctgaagctaagcagagatgatgccaagcctctgctgagactgaagggattcccttcctttcctctggtcgagagacaggccaacgaagtggactggtgggacatggtgtgtaacgtgaagaagctgatcaacgagaaaaaggaggatggcaaggtgttttggcagaatctggctggctacaagagacaggaagccctgagaccatacctgagcagcgaggaagatcggaagaagggaaagaaattcgctcggtaccagctgggcgacctgctgctgcacctggaaaagaagcacggcgaggactggggaaaggtgtacgacgaggcctgggagcggattgacaagaaagtggaaggcctgagcaagcacatcaagctggaagaggaacggagaagcgaggacgcccagagcaaggccgccctgaccgactggctgcgggctaaggccagcttcgtgatcgagggcctgaaggaggccgacaaggacgagttctgcagatgcgagctgaagctgcagaagtggtacggggacctgcggggaaagcccttcgccatcgaagccgagaacagcatcctggacatcagcggcttcagcaagcagtacaactgtgccttcatctggcagaaggacggcgtgaagaagctgaacctgtacctgatcatcaactacttcaagggcggcaagctgcggttcaagaagatcaaacctgaagccttcgaagccaacagattctacaccgtgatcaacaaaaagagcggcgagatcgtgcccatggaggtgaacttcaacttcgacgaccccaacctgatcatcctgcctctggcctttggcaagagacagggcagagaattcatctggaacgacctgctgtccctggaaaccggcagcctgaagctggccaacggaagagtgatcgagaagacactgtacaacagaagaacccggcaggatgagcctgccctgttcgtggccctgaccttcgagcggcgggaggtcctggactcctccaatatcaaaccaatgaacctgatcggcgtggcaagaggcgaaaacatccccgccgtgatcgccctgaccgaccccgagggctgcccactgagccggtttaaggatagcctgggaaacccaacccacatcctgagaatcggcgagagctataaggagaagcagcggaccatccaggccaagaaggaggtggagcagcggagagccggcggctacagccggaagtacgccagcaaagccaagaatctggcagacgatatggtgagaaacaccgctagagatctgctgtactacgccgtgacccaggatgccatgctgatcttcgccaacctgagccggggcttcggccggcagggcaagcggaccttcatggccgagagacagtacacacggatggaggactggctgaccgccaagctggcctacgagggcctgagcaagacctacctgtccaagacactggcccagtacacctccaagacatgcagcaactgtgggtttaccatcaccagcgccgactacgacagggtgctggagaagctgaagaagacagcaacaggctggatgaccacaattaacggcaaggagctgaaggtggagggccagattacctactacaacagatacaagagacagaacgtagtcaaggacctgtccgtcgagctggatagactgagcgaagaatctgtgaacaacgacatctcctcctggacaaagggcagaagcggagaagctctgagcctcctgaagaaaagattctcccatagacccgtgcaggagaagttcgtgtgcctgaactgcggcttcgagacacacgcagccgagcaagccgccctgaacatcgccagatcctggctgttcctgcggagccaggagtacaagaaataccagacaaacaagacaaccggcaacaccgataagagagccttcgtcgagacctggcagtccttttaccggaagaagcttaaggaggtgtggaaacctgccgtgcggtctggcggatctggcggaggctccacaagcaagaccgcccccgtgaccttcgacgacgtggccgtgtacttcagcgccgaggagtgggaggagctggccgagtggcagaaggagctgtacaaggacgtgatgagggacaactacgaggccctgatcagcctgggccacgccgccgccaagcccgacatcatccagctgctggagcacggcgaggagccctgcgtgaagggccacaaggacagcggcaacggcaaggccttcaacttcatcagcaccagccccaagaaaaagagaaaagtctaagctgccttctgcggggcttgccttctggccatgcccttcttctctcccttgcacctgtacctcttggtctttgaataaagcctgagtaggaaggctagcaaaaaaaaaaaaaaaaaaaaaaaaaaaaaaaaaaaaaaaaaaaaaaaaaaaaaaaaaaaaaaaaaaaaaaaaaaaaaaaa

SEQ ID NO: 6059 - RNA, 5797 nt, synthetic construct
  source 1..5797: mol_type = other RNA
aggaaataagagagaaaagaagagtaagaagaaatataagagccaccatggcccctaagaagaagcgtaaagtgagccggatggaacgcctcgtctacgaggtgcggcagaagtgcagaaacatcgaggacatctgcatctcctgcggatctctgaacgtgaccctggagcacccactgttcatcggcggcatgtgccagaactgtaaaaactgttttctggagtgtgcctatcaatacgacgatgacggctaccagagctactgcaccatctgttgcggcggaagagaggtgctgatgtgtggaaataacaactgctgccggtgcttctgcgtggaatgcgtggacctgctggtgggccccggcgccgcccaggccgctattaaggaagatccttggaactgctacatgtgcggccacaagggcacatacggcctgctgagacggagagaggactggcctagcagactgcagatgttcttcgccaataaccacgaccaggagttcgacccccctaaggtgtaccctcccgtccccgccgagaagagaaagcccatccgggtcctgagcctgttcgatggcatcgccaccggtctgctggtgctgaaggacctgggcatccaggtggataggtacattgcctccgaggtgtgcgaggactccatcaccgtgggaatggtgcgtcatcagggcaagatcatgtacgtgggcgacgtgcggagcgtgacacagaagcatatccaggagtggggccctttcgacctggtgatcggcggcagcccttgcaatgacctgagcatcgtgaacccagcccggaagggcctgtacgagggaaccggcagactgttcttcgagttttacagactgctgcacgacgcccggcctaaggaaggcgacgaccggcccttcttttggctgttcgagaatgtggtggccatgggagtcagcgacaagcgggatattagccggttcctggagagcaaccccgtgatgatcgatgccaaggaagtgagcgccgcccaccgggccagatacttctggggcaatctgcctggcatgaacagacccctggccagcaccgtgaacgacaagctggagctgcaggagtgcctggagcacggccggatcgccaagttcagcaaggtgagaaccatcaccacccgaagcaacagcatcaaacaaggcaaggaccagcactttcctgtgttcatgaacgagaaggaggacatcctgtggtgtaccgagatggagagagtgttcgggttcccagtccactacacagatgtcagcaacatgtctagactggccagacagagactgctgggaagaagctggtccgtccctgtgatcagacacctgttcgcccctctgaaggagtacttcgcctgcgtgagcagcggcaacagcaacgccaacagccggggccccagcttctctagcggcctggtgccactgtccctgagagggagccacatgggccccatggagatctacaaaaccgtgagcgcctggaagcggcagcctgtgcgcgtgctgagcctgtttcggaatatcgataaagtcctgaaaagcctgggattcctggagagcggctctggctccggcggtggcaccctgaagtacgtggaggatgtgacaaacgtggtcagacgggatgtggagaagtggggccccttcgatctggtgtacggcagcacccaacccctgggcagctcttgtgaccggtgccctggctggtacatgtttcagttccaccggatcctgcagtacgccctgccgagacaggagtcccagcggccattcttttggattttcatggacaacttgctgctgaccgaggatgaccaggaaactaccactcggttcctgcagaccgaagccgtgaccctgcaggacgtgagaggccgggactaccagaacgccatgcgggtgtggtccaacatccctggactgaaaagcaagcacgcacctctgacccctaaagaagaggagtacctgcaggcccaggtgcggagcagaagcaagctggacgcccctaaggtggatctgctggtgaagaattgcctcctgcccctgagagagtacttcaagtatttcagccagaatagtctgcccctgggcggcccaagcagcggcgcccctcctcccagcggcggcagcccagccggctccccaacctctaccgaggagggcacctctgagtccgccacccccgagagcggccctggcacctccaccgagcccagcgagggcagcgcacccggcagccctgccggcagccccacctccacagaggagggaaccagcaccgagcccagcgaaggcagcgccccaggcaccagcaccgagcctagtgagggcggctctggcggcggcagcgcccaggagattaaacggatcaacaagatcagaagaagacttgtgaaagacagcaacaccaagaaggccggcaagacaggccccatgaaaaccctgctggttagagtgatgacacccgatctgagagagcggctggaaaacctgagaaagaagcctgaaaatatcccccagcccatcagcaatacatctagagccaacctgaataagctgctgaccgattacaccgaaatgaagaaggcgatcctgcatgtgtactgggaagagttccagaaggaccctgtgggcctgatgagccgggtggcccagcctgccagcaagaagatcgatcagaacaagctgaaacctgagatggacgagaagggcaacctgaccaccgccggctttgcctgctctcagtgtggccagcccctgttcgtgtacaagctggagcaggtgtctgagaagggcaaggcttacaccaactacttcggacggtgcaatgtggccgagcacgaaaagctgatcctgctggcccagctgaagcccgagaaggatagcgacgaagccgtgacatatagcctgggaaagtttgggcagagggccctggatttctacagcattcatgtgaccaaggagtccacccaccccgtgaagcccctggcccagatcgccggaaacagatacgcctccggacctgtgggaaaggccctgagcgacgcatgtatgggcacaatcgcctccttcctgtctaagtaccaggacatcatcatcgaacaccagaaggtggtgaagggcaaccagaagagactggagagcctgcgggagctggccggcaaggaaaacctggaataccctagcgtgaccctgccacctcagcctcacaccaaggagggcgttgatgcctacaacgaagtgatcgcccgggtgcgaatgtgggtgaacctgaacctgtggcagaagctgaagctaagcagagatgatgccaagcctctgctgagactgaagggattcccttcctttcctctggtcgagagacaggccaacgaagtggactggtgggacatggtgtgtaacgtgaagaagctgatcaacgagaaaaaggaggatggcaaggtgttttggcagaatctggctggctacaagagacaggaagccctgagaccatacctgagcagcgaggaagatcggaagaagggaaagaaattcgctcggtaccagctgggcgacctgctgctgcacctggaaaagaagcacggcgaggactggggaaaggtgtacgacgaggcctgggagcggattgacaagaaagtggaaggcctgagcaagcacatcaagctggaagaggaacggagaagcgaggacgcccagagcaaggccgccctgaccgactggctgcgggctaaggccagcttcgtgatcgagggcctgaaggaggccgacaaggacgagttctgcagatgcgagctgaagctgcagaagtggtacggggacctgcggggaaagcccttcgccatcgaagccgagaacagcatcctggacatcagcggcttcagcaagcagtacaactgtgccttcatctggcagaaggacggcgtgaagaagctgaacctgtacctgatcatcaactacttcaagggcggcaagctgcggttcaagaagatcaaacctgaagccttcgaagccaacagattctacaccgtgatcaacaaaaagagcggcgagatcgtgcccatggaggtgaacttcaacttcgacgaccccaacctgatcatcctgcctctggcctttggcaagagacagggcagagaattcatctggaacgacctgctgtccctggaaaccggcagcctgaagctggccaacggaagagtgatcgagaagacactgtacaacagaagaacccggcaggatgagcctgccctgttcgtggccctgaccttcgagcggcgggaggtcctggactcctccaatatcaaaccaatgaacctgatcggcgtggcaagaggcgaaaacatccccgccgtgatcgccctgaccgaccccgagggctgcccactgagccggtttaaggatagcctgggaaacccaacccacatcctgagaatcggcgagagctataaggagaagcagcggaccatccaggccaagaaggaggtggagcagcggagagccggcggctacagccggaagtacgccagcaaagccaagaatctggcagacgatatggtgagaaacaccgctagagatctgctgtactacgccgtgacccaggatgccatgctgatcttcgccaacctgagccggggcttcggccggcagggcaagcggaccttcatggccgagagacagtacacacggatggaggactggctgaccgccaagctggcctacgagggcctgagcaagacctacctgtccaagacactggcccagtacacctccaagacatgcagcaactgtgggtttaccatcaccagcgccgactacgacagggtgctggagaagctgaagaagacagcaacaggctggatgaccacaattaacggcaaggagctgaaggtggagggccagattacctactacaacagatacaagagacagaacgtagtcaaggacctgtccgtcgagctggatagactgagcgaagaatctgtgaacaacgacatctcctcctggacaaagggcagaagcggagaagctctgagcctcctgaagaaaagattctcccatagacccgtgcaggagaagttcgtgtgcctgaactgcggcttcgagacacacgcagccgagcaagccgccctgaacatcgccagatcctggctgttcctgcggagccaggagtacaagaaataccagacaaacaagacaaccggcaacaccgataagagagccttcgtcgagacctggcagtccttttaccggaagaagcttaaggaggtgtggaaacctgccgtgcggtctggcggatctggcggaggctccacaagcatggccgtggacctgctgagcgcccaggagagggtgaccttcagggacgtggccgtgttcttcagccaggacgagtggctgcacctggacagcgcccagagggccctgtacagggaggtgatgctggagaactacagcatcctggtgagcctgggcatccccttcagcatgcccaagctgatccaccagctgcagcagggcgaggacccctgcatggtggagagggaggtgcccagcgacaccaccagccccaagaaaaagagaaaagtctaagctgccttctgcggggcttgccttctggccatgcccttcttctctcccttgcacctgtacctcttggtctttgaataaagcctgagtaggaaggctagcaaaaaaaaaaaaaaaaaaaaaaaaaaaaaaaaaaaaaaaaaaaaaaaaaaaaaaaaaaaaaaaaaaaaaaaaaaaaaaaa

SEQ ID NO: 6060 - RNA, 5797 nt, synthetic construct
  source 1..5797: mol_type = other RNA
aggaaataagagagaaaagaagagtaagaagaaatataagagccaccatggcccctaagaagaagcgtaaagtgagccggatggaacgcctcgtctacgaggtgcggcagaagtgcagaaacatcgaggacatctgcatctcctgcggatctctgaacgtgaccctggagcacccactgttcatcggcggcatgtgccagaactgtaaaaactgttttctggagtgtgcctatcaatacgacgatgacggctaccagagctactgcaccatctgttgcggcggaagagaggtgctgatgtgtggaaataacaactgctgccggtgcttctgcgtggaatgcgtggacctgctggtgggccccggcgccgcccaggccgctattaaggaagatccttggaactgctacatgtgcggccacaagggcacatacggcctgctgagacggagagaggactggcctagcagactgcagatgttcttcgccaataaccacgaccaggagttcgacccccctaaggtgtaccctcccgtccccgccgagaagagaaagcccatccgggtcctgagcctgttcgatggcatcgccaccggtctgctggtgctgaaggacctgggcatccaggtggataggtacattgcctccgaggtgtgcgaggactccatcaccgtgggaatggtgcgtcatcagggcaagatcatgtacgtgggcgacgtgcggagcgtgacacagaagcatatccaggagtggggccctttcgacctggtgatcggcggcagcccttgcaatgacctgagcatcgtgaacccagcccggaagggcctgtacgagggaaccggcagactgttcttcgagttttacagactgctgcacgacgcccggcctaaggaaggcgacgaccggcccttcttttggctgttcgagaatgtggtggccatgggagtcagcgacaagcgggatattagccggttcctggagagcaaccccgtgatgatcgatgccaaggaagtgagcgccgcccaccgggccagatacttctggggcaatctgcctggcatgaacagacccctggccagcaccgtgaacgacaagctggagctgcaggagtgcctggagcacggccggatcgccaagttcagcaaggtgagaaccatcaccacccgaagcaacagcatcaaacaaggcaaggaccagcactttcctgtgttcatgaacgagaaggaggacatcctgtggtgtaccgagatggagagagtgttcgggttcccagtccactacacagatgtcagcaacatgtctagactggccagacagagactgctgggaagaagctggtccgtccctgtgatcagacacctgttcgcccctctgaaggagtacttcgcctgcgtgagcagcggcaacagcaacgccaacagccggggccccagcttctctagcggcctggtgccactgtccctgagagggagccacatgggccccatggagatctacaaaaccgtgagcgcctggaagcggcagcctgtgcgcgtgctgagcctgtttcggaatatcgataaagtcctgaaaagcctgggattcctggagagcggctctggctccggcggtggcaccctgaagtacgtggaggatgtgacaaacgtggtcagacgggatgtggagaagtggggccccttcgatctggtgtacggcagcacccaacccctgggcagctcttgtgaccggtgccctggctggtacatgtttcagttccaccggatcctgcagtacgccctgccgagacaggagtcccagcggccattcttttggattttcatggacaacttgctgctgaccgaggatgaccaggaaactaccactcggttcctgcagaccgaagccgtgaccctgcaggacgtgagaggccgggactaccagaacgccatgcgggtgtggtccaacatccctggactgaaaagcaagcacgcacctctgacccctaaagaagaggagtacctgcaggcccaggtgcggagcagaagcaagctggacgcccctaaggtggatctgctggtgaagaattgcctcctgcccctgagagagtacttcaagtatttcagccagaatagtctgcccctgggcggcccaagcagcggcgcccctcctcccagcggcggcagcccagccggctccccaacctctaccgaggagggcacctctgagtccgccacccccgagagcggccctggcacctccaccgagcccagcgagggcagcgcacccggcagccctgccggcagccccacctccacagaggagggaaccagcaccgagcccagcgaaggcagcgccccaggcaccagcaccgagcctagtgagggcggctctggcggcggcagcgcccaggagattaaacggatcaacaagatcagaagaagacttgtgaaagacagcaacaccaagaaggccggcaagacaggccccatgaaaaccctgctggttagagtgatgacacccgatctgagagagcggctggaaaacctgagaaagaagcctgaaaatatcccccagcccatcagcaatacatctagagccaacctgaataagctgctgaccgattacaccgaaatgaagaaggcgatcctgcatgtgtactgggaagagttccagaaggaccctgtgggcctgatgagccgggtggcccagcctgccagcaagaagatcgatcagaacaagctgaaacctgagatggacgagaagggcaacctgaccaccgccggctttgcctgctctcagtgtggccagcccctgttcgtgtacaagctggagcaggtgtctgagaagggcaaggcttacaccaactacttcggacggtgcaatgtggccgagcacgaaaagctgatcctgctggcccagctgaagcccgagaaggatagcgacgaagccgtgacatatagcctgggaaagtttgggcagagggccctggatttctacagcattcatgtgaccaaggagtccacccaccccgtgaagcccctggcccagatcgccggaaacagatacgcctccggacctgtgggaaaggccctgagcgacgcatgtatgggcacaatcgcctccttcctgtctaagtaccaggacatcatcatcgaacaccagaaggtggtgaagggcaaccagaagagactggagagcctgcgggagctggccggcaaggaaaacctggaataccctagcgtgaccctgccacctcagcctcacaccaaggagggcgttgatgcctacaacgaagtgatcgcccgggtgcgaatgtgggtgaacctgaacctgtggcagaagctgaagctaagcagagatgatgccaagcctctgctgagactgaagggattcccttcctttcctctggtcgagagacaggccaacgaagtggactggtgggacatggtgtgtaacgtgaagaagctgatcaacgagaaaaaggaggatggcaaggtgttttggcagaatctggctggctacaagagacaggaagccctgagaccatacctgagcagcgaggaagatcggaagaagggaaagaaattcgctcggtaccagctgggcgacctgctgctgcacctggaaaagaagcacggcgaggactggggaaaggtgtacgacgaggcctgggagcggattgacaagaaagtggaaggcctgagcaagcacatcaagctggaagaggaacggagaagcgaggacgcccagagcaaggccgccctgaccgactggctgcgggctaaggccagcttcgtgatcgagggcctgaaggaggccgacaaggacgagttctgcagatgcgagctgaagctgcagaagtggtacggggacctgcggggaaagcccttcgccatcgaagccgagaacagcatcctggacatcagcggcttcagcaagcagtacaactgtgccttcatctggcagaaggacggcgtgaagaagctgaacctgtacctgatcatcaactacttcaagggcggcaagctgcggttcaagaagatcaaacctgaagccttcgaagccaacagattctacaccgtgatcaacaaaaagagcggcgagatcgtgcccatggaggtgaacttcaacttcgacgaccccaacctgatcatcctgcctctggcctttggcaagagacagggcagagaattcatctggaacgacctgctgtccctggaaaccggcagcctgaagctggccaacggaagagtgatcgagaagacactgtacaacagaagaacccggcaggatgagcctgccctgttcgtggccctgaccttcgagcggcgggaggtcctggactcctccaatatcaaaccaatgaacctgatcggcgtggcaagaggcgaaaacatccccgccgtgatcgccctgaccgaccccgagggctgcccactgagccggtttaaggatagcctgggaaacccaacccacatcctgagaatcggcgagagctataaggagaagcagcggaccatccaggccaagaaggaggtggagcagcggagagccggcggctacagccggaagtacgccagcaaagccaagaatctggcagacgatatggtgagaaacaccgctagagatctgctgtactacgccgtgacccaggatgccatgctgatcttcgccaacctgagccggggcttcggccggcagggcaagcggaccttcatggccgagagacagtacacacggatggaggactggctgaccgccaagctggcctacgagggcctgagcaagacctacctgtccaagacactggcccagtacacctccaagacatgcagcaactgtgggtttaccatcaccagcgccgactacgacagggtgctggagaagctgaagaagacagcaacaggctggatgaccacaattaacggcaaggagctgaaggtggagggccagattacctactacaacagatacaagagacagaacgtagtcaaggacctgtccgtcgagctggatagactgagcgaagaatctgtgaacaacgacatctcctcctggacaaagggcagaagcggagaagctctgagcctcctgaagaaaagattctcccatagacccgtgcaggagaagttcgtgtgcctgaactgcggcttcgagacacacgcagccgagcaagccgccctgaacatcgccagatcctggctgttcctgcggagccaggagtacaagaaataccagacaaacaagacaaccggcaacaccgataagagagccttcgtcgagacctggcagtccttttaccggaagaagcttaaggaggtgtggaaacctgccgtgcggtctggcggatctggcggaggctccacaagcccccaggagctggtgaccttcgaggacgtggccgtgtacctgaccaaggaggagtgggagcacctgggccccgcccagaggaggctgtacagggacgtgatgctggagaactacgagaacgtggtgagcctgggcttccccgtgagcaagcccgacctgatcagccagctggagcagggcgaggtgccctgcctgcccgacctgcccaggaccgaggtgcccgagatccacggcggccccctgaccagccccaagaaaaagagaaaagtctaagctgccttctgcggggcttgccttctggccatgcccttcttctctcccttgcacctgtacctcttggtctttgaataaagcctgagtaggaaggctagcaaaaaaaaaaaaaaaaaaaaaaaaaaaaaaaaaaaaaaaaaaaaaaaaaaaaaaaaaaaaaaaaaaaaaaaaaaaaaaaa

SEQ ID NO: 6061 - RNA, 5797 nt, synthetic construct
  source 1..5797: mol_type = other RNA
aggaaataagagagaaaagaagagtaagaagaaatataagagccaccatggcccctaagaagaagcgtaaagtgagccggatggaacgcctcgtctacgaggtgcggcagaagtgcagaaacatcgaggacatctgcatctcctgcggatctctgaacgtgaccctggagcacccactgttcatcggcggcatgtgccagaactgtaaaaactgttttctggagtgtgcctatcaatacgacgatgacggctaccagagctactgcaccatctgttgcggcggaagagaggtgctgatgtgtggaaataacaactgctgccggtgcttctgcgtggaatgcgtggacctgctggtgggccccggcgccgcccaggccgctattaaggaagatccttggaactgctacatgtgcggccacaagggcacatacggcctgctgagacggagagaggactggcctagcagactgcagatgttcttcgccaataaccacgaccaggagttcgacccccctaaggtgtaccctcccgtccccgccgagaagagaaagcccatccgggtcctgagcctgttcgatggcatcgccaccggtctgctggtgctgaaggacctgggcatccaggtggataggtacattgcctccgaggtgtgcgaggactccatcaccgtgggaatggtgcgtcatcagggcaagatcatgtacgtgggcgacgtgcggagcgtgacacagaagcatatccaggagtggggccctttcgacctggtgatcggcggcagcccttgcaatgacctgagcatcgtgaacccagcccggaagggcctgtacgagggaaccggcagactgttcttcgagttttacagactgctgcacgacgcccggcctaaggaaggcgacgaccggcccttcttttggctgttcgagaatgtggtggccatgggagtcagcgacaagcgggatattagccggttcctggagagcaaccccgtgatgatcgatgccaaggaagtgagcgccgcccaccgggccagatacttctggggcaatctgcctggcatgaacagacccctggccagcaccgtgaacgacaagctggagctgcaggagtgcctggagcacggccggatcgccaagttcagcaaggtgagaaccatcaccacccgaagcaacagcatcaaacaaggcaaggaccagcactttcctgtgttcatgaacgagaaggaggacatcctgtggtgtaccgagatggagagagtgttcgggttcccagtccactacacagatgtcagcaacatgtctagactggccagacagagactgctgggaagaagctggtccgtccctgtgatcagacacctgttcgcccctctgaaggagtacttcgcctgcgtgagcagcggcaacagcaacgccaacagccggggccccagcttctctagcggcctggtgccactgtccctgagagggagccacatgggccccatggagatctacaaaaccgtgagcgcctggaagcggcagcctgtgcgcgtgctgagcctgtttcggaatatcgataaagtcctgaaaagcctgggattcctggagagcggctctggctccggcggtggcaccctgaagtacgtggaggatgtgacaaacgtggtcagacgggatgtggagaagtggggccccttcgatctggtgtacggcagcacccaacccctgggcagctcttgtgaccggtgccctggctggtacatgtttcagttccaccggatcctgcagtacgccctgccgagacaggagtcccagcggccattcttttggattttcatggacaacttgctgctgaccgaggatgaccaggaaactaccactcggttcctgcagaccgaagccgtgaccctgcaggacgtgagaggccgggactaccagaacgccatgcgggtgtggtccaacatccctggactgaaaagcaagcacgcacctctgacccctaaagaagaggagtacctgcaggcccaggtgcggagcagaagcaagctggacgcccctaaggtggatctgctggtgaagaattgcctcctgcccctgagagagtacttcaagtatttcagccagaatagtctgcccctgggcggcccaagcagcggcgcccctcctcccagcggcggcagcccagccggctccccaacctctaccgaggagggcacctctgagtccgccacccccgagagcggccctggcacctccaccgagcccagcgagggcagcgcacccggcagccctgccggcagccccacctccacagaggagggaaccagcaccgagcccagcgaaggcagcgccccaggcaccagcaccgagcctagtgagggcggctctggcggcggcagcgcccaggagattaaacggatcaacaagatcagaagaagacttgtgaaagacagcaacaccaagaaggccggcaagacaggccccatgaaaaccctgctggttagagtgatgacacccgatctgagagagcggctggaaaacctgagaaagaagcctgaaaatatcccccagcccatcagcaatacatctagagccaacctgaataagctgctgaccgattacaccgaaatgaagaaggcgatcctgcatgtgtactgggaagagttccagaaggaccctgtgggcctgatgagccgggtggcccagcctgccagcaagaagatcgatcagaacaagctgaaacctgagatggacgagaagggcaacctgaccaccgccggctttgcctgctctcagtgtggccagcccctgttcgtgtacaagctggagcaggtgtctgagaagggcaaggcttacaccaactacttcggacggtgcaatgtggccgagcacgaaaagctgatcctgctggcccagctgaagcccgagaaggatagcgacgaagccgtgacatatagcctgggaaagtttgggcagagggccctggatttctacagcattcatgtgaccaaggagtccacccaccccgtgaagcccctggcccagatcgccggaaacagatacgcctccggacctgtgggaaaggccctgagcgacgcatgtatgggcacaatcgcctccttcctgtctaagtaccaggacatcatcatcgaacaccagaaggtggtgaagggcaaccagaagagactggagagcctgcgggagctggccggcaaggaaaacctggaataccctagcgtgaccctgccacctcagcctcacaccaaggagggcgttgatgcctacaacgaagtgatcgcccgggtgcgaatgtgggtgaacctgaacctgtggcagaagctgaagctaagcagagatgatgccaagcctctgctgagactgaagggattcccttcctttcctctggtcgagagacaggccaacgaagtggactggtgggacatggtgtgtaacgtgaagaagctgatcaacgagaaaaaggaggatggcaaggtgttttggcagaatctggctggctacaagagacaggaagccctgagaccatacctgagcagcgaggaagatcggaagaagggaaagaaattcgctcggtaccagctgggcgacctgctgctgcacctggaaaagaagcacggcgaggactggggaaaggtgtacgacgaggcctgggagcggattgacaagaaagtggaaggcctgagcaagcacatcaagctggaagaggaacggagaagcgaggacgcccagagcaaggccgccctgaccgactggctgcgggctaaggccagcttcgtgatcgagggcctgaaggaggccgacaaggacgagttctgcagatgcgagctgaagctgcagaagtggtacggggacctgcggggaaagcccttcgccatcgaagccgagaacagcatcctggacatcagcggcttcagcaagcagtacaactgtgccttcatctggcagaaggacggcgtgaagaagctgaacctgtacctgatcatcaactacttcaagggcggcaagctgcggttcaagaagatcaaacctgaagccttcgaagccaacagattctacaccgtgatcaacaaaaagagcggcgagatcgtgcccatggaggtgaacttcaacttcgacgaccccaacctgatcatcctgcctctggcctttggcaagagacagggcagagaattcatctggaacgacctgctgtccctggaaaccggcagcctgaagctggccaacggaagagtgatcgagaagacactgtacaacagaagaacccggcaggatgagcctgccctgttcgtggccctgaccttcgagcggcgggaggtcctggactcctccaatatcaaaccaatgaacctgatcggcgtggcaagaggcgaaaacatccccgccgtgatcgccctgaccgaccccgagggctgcccactgagccggtttaaggatagcctgggaaacccaacccacatcctgagaatcggcgagagctataaggagaagcagcggaccatccaggccaagaaggaggtggagcagcggagagccggcggctacagccggaagtacgccagcaaagccaagaatctggcagacgatatggtgagaaacaccgctagagatctgctgtactacgccgtgacccaggatgccatgctgatcttcgccaacctgagccggggcttcggccggcagggcaagcggaccttcatggccgagagacagtacacacggatggaggactggctgaccgccaagctggcctacgagggcctgagcaagacctacctgtccaagacactggcccagtacacctccaagacatgcagcaactgtgggtttaccatcaccagcgccgactacgacagggtgctggagaagctgaagaagacagcaacaggctggatgaccacaattaacggcaaggagctgaaggtggagggccagattacctactacaacagatacaagagacagaacgtagtcaaggacctgtccgtcgagctggatagactgagcgaagaatctgtgaacaacgacatctcctcctggacaaagggcagaagcggagaagctctgagcctcctgaagaaaagattctcccatagacccgtgcaggagaagttcgtgtgcctgaactgcggcttcgagacacacgcagccgagcaagccgccctgaacatcgccagatcctggctgttcctgcggagccaggagtacaagaaataccagacaaacaagacaaccggcaacaccgataagagagccttcgtcgagacctggcagtccttttaccggaagaagcttaaggaggtgtggaaacctgccgtgcggtctggcggatctggcggaggctccacaagcttccaggaggccgtgaccttcaaggacgtggccgtggtgttcagcgaggaggagctgggcctgctggacagcacccagaggaagctgtacagggacgtgatgctggagaacttcaggaacctggtgagcgtgggccacagcagcagcaagcccgacatgatcagccagctggagagggaggaggagaagctgtacgtgaaggagatctgcaccgagaggggcaggcacagcgacaagaactgcaccagccccaagaaaaagagaaaagtctaagctgccttctgcggggcttgccttctggccatgcccttcttctctcccttgcacctgtacctcttggtctttgaataaagcctgagtaggaaggctagcaaaaaaaaaaaaaaaaaaaaaaaaaaaaaaaaaaaaaaaaaaaaaaaaaaaaaaaaaaaaaaaaaaaaaaaaaaaaaaaa

SEQ ID NO: 6062 - RNA, 5797 nt, synthetic construct
  source 1..5797: mol_type = other RNA
aggaaataagagagaaaagaagagtaagaagaaatataagagccaccatggcccctaagaagaagcgtaaagtgagccggatggaacgcctcgtctacgaggtgcggcagaagtgcagaaacatcgaggacatctgcatctcctgcggatctctgaacgtgaccctggagcacccactgttcatcggcggcatgtgccagaactgtaaaaactgttttctggagtgtgcctatcaatacgacgatgacggctaccagagctactgcaccatctgttgcggcggaagagaggtgctgatgtgtggaaataacaactgctgccggtgcttctgcgtggaatgcgtggacctgctggtgggccccggcgccgcccaggccgctattaaggaagatccttggaactgctacatgtgcggccacaagggcacatacggcctgctgagacggagagaggactggcctagcagactgcagatgttcttcgccaataaccacgaccaggagttcgacccccctaaggtgtaccctcccgtccccgccgagaagagaaagcccatccgggtcctgagcctgttcgatggcatcgccaccggtctgctggtgctgaaggacctgggcatccaggtggataggtacattgcctccgaggtgtgcgaggactccatcaccgtgggaatggtgcgtcatcagggcaagatcatgtacgtgggcgacgtgcggagcgtgacacagaagcatatccaggagtggggccctttcgacctggtgatcggcggcagcccttgcaatgacctgagcatcgtgaacccagcccggaagggcctgtacgagggaaccggcagactgttcttcgagttttacagactgctgcacgacgcccggcctaaggaaggcgacgaccggcccttcttttggctgttcgagaatgtggtggccatgggagtcagcgacaagcgggatattagccggttcctggagagcaaccccgtgatgatcgatgccaaggaagtgagcgccgcccaccgggccagatacttctggggcaatctgcctggcatgaacagacccctggccagcaccgtgaacgacaagctggagctgcaggagtgcctggagcacggccggatcgccaagttcagcaaggtgagaaccatcaccacccgaagcaacagcatcaaacaaggcaaggaccagcactttcctgtgttcatgaacgagaaggaggacatcctgtggtgtaccgagatggagagagtgttcgggttcccagtccactacacagatgtcagcaacatgtctagactggccagacagagactgctgggaagaagctggtccgtccctgtgatcagacacctgttcgcccctctgaaggagtacttcgcctgcgtgagcagcggcaacagcaacgccaacagccggggccccagcttctctagcggcctggtgccactgtccctgagagggagccacatgggccccatggagatctacaaaaccgtgagcgcctggaagcggcagcctgtgcgcgtgctgagcctgtttcggaatatcgataaagtcctgaaaagcctgggattcctggagagcggctctggctccggcggtggcaccctgaagtacgtggaggatgtgacaaacgtggtcagacgggatgtggagaagtggggccccttcgatctggtgtacggcagcacccaacccctgggcagctcttgtgaccggtgccctggctggtacatgtttcagttccaccggatcctgcagtacgccctgccgagacaggagtcccagcggccattcttttggattttcatggacaacttgctgctgaccgaggatgaccaggaaactaccactcggttcctgcagaccgaagccgtgaccctgcaggacgtgagaggccgggactaccagaacgccatgcgggtgtggtccaacatccctggactgaaaagcaagcacgcacctctgacccctaaagaagaggagtacctgcaggcccaggtgcggagcagaagcaagctggacgcccctaaggtggatctgctggtgaagaattgcctcctgcccctgagagagtacttcaagtatttcagccagaatagtctgcccctgggcggcccaagcagcggcgcccctcctcccagcggcggcagcccagccggctccccaacctctaccgaggagggcacctctgagtccgccacccccgagagcggccctggcacctccaccgagcccagcgagggcagcgcacccggcagccctgccggcagccccacctccacagaggagggaaccagcaccgagcccagcgaaggcagcgccccaggcaccagcaccgagcctagtgagggcggctctggcggcggcagcgcccaggagattaaacggatcaacaagatcagaagaagacttgtgaaagacagcaacaccaagaaggccggcaagacaggccccatgaaaaccctgctggttagagtgatgacacccgatctgagagagcggctggaaaacctgagaaagaagcctgaaaatatcccccagcccatcagcaatacatctagagccaacctgaataagctgctgaccgattacaccgaaatgaagaaggcgatcctgcatgtgtactgggaagagttccagaaggaccctgtgggcctgatgagccgggtggcccagcctgccagcaagaagatcgatcagaacaagctgaaacctgagatggacgagaagggcaacctgaccaccgccggctttgcctgctctcagtgtggccagcccctgttcgtgtacaagctggagcaggtgtctgagaagggcaaggcttacaccaactacttcggacggtgcaatgtggccgagcacgaaaagctgatcctgctggcccagctgaagcccgagaaggatagcgacgaagccgtgacatatagcctgggaaagtttgggcagagggccctggatttctacagcattcatgtgaccaaggagtccacccaccccgtgaagcccctggcccagatcgccggaaacagatacgcctccggacctgtgggaaaggccctgagcgacgcatgtatgggcacaatcgcctccttcctgtctaagtaccaggacatcatcatcgaacaccagaaggtggtgaagggcaaccagaagagactggagagcctgcgggagctggccggcaaggaaaacctggaataccctagcgtgaccctgccacctcagcctcacaccaaggagggcgttgatgcctacaacgaagtgatcgcccgggtgcgaatgtgggtgaacctgaacctgtggcagaagctgaagctaagcagagatgatgccaagcctctgctgagactgaagggattcccttcctttcctctggtcgagagacaggccaacgaagtggactggtgggacatggtgtgtaacgtgaagaagctgatcaacgagaaaaaggaggatggcaaggtgttttggcagaatctggctggctacaagagacaggaagccctgagaccatacctgagcagcgaggaagatcggaagaagggaaagaaattcgctcggtaccagctgggcgacctgctgctgcacctggaaaagaagcacggcgaggactggggaaaggtgtacgacgaggcctgggagcggattgacaagaaagtggaaggcctgagcaagcacatcaagctggaagaggaacggagaagcgaggacgcccagagcaaggccgccctgaccgactggctgcgggctaaggccagcttcgtgatcgagggcctgaaggaggccgacaaggacgagttctgcagatgcgagctgaagctgcagaagtggtacggggacctgcggggaaagcccttcgccatcgaagccgagaacagcatcctggacatcagcggcttcagcaagcagtacaactgtgccttcatctggcagaaggacggcgtgaagaagctgaacctgtacctgatcatcaactacttcaagggcggcaagctgcggttcaagaagatcaaacctgaagccttcgaagccaacagattctacaccgtgatcaacaaaaagagcggcgagatcgtgcccatggaggtgaacttcaacttcgacgaccccaacctgatcatcctgcctctggcctttggcaagagacagggcagagaattcatctggaacgacctgctgtccctggaaaccggcagcctgaagctggccaacggaagagtgatcgagaagacactgtacaacagaagaacccggcaggatgagcctgccctgttcgtggccctgaccttcgagcggcgggaggtcctggactcctccaatatcaaaccaatgaacctgatcggcgtggcaagaggcgaaaacatccccgccgtgatcgccctgaccgaccccgagggctgcccactgagccggtttaaggatagcctgggaaacccaacccacatcctgagaatcggcgagagctataaggagaagcagcggaccatccaggccaagaaggaggtggagcagcggagagccggcggctacagccggaagtacgccagcaaagccaagaatctggcagacgatatggtgagaaacaccgctagagatctgctgtactacgccgtgacccaggatgccatgctgatcttcgccaacctgagccggggcttcggccggcagggcaagcggaccttcatggccgagagacagtacacacggatggaggactggctgaccgccaagctggcctacgagggcctgagcaagacctacctgtccaagacactggcccagtacacctccaagacatgcagcaactgtgggtttaccatcaccagcgccgactacgacagggtgctggagaagctgaagaagacagcaacaggctggatgaccacaattaacggcaaggagctgaaggtggagggccagattacctactacaacagatacaagagacagaacgtagtcaaggacctgtccgtcgagctggatagactgagcgaagaatctgtgaacaacgacatctcctcctggacaaagggcagaagcggagaagctctgagcctcctgaagaaaagattctcccatagacccgtgcaggagaagttcgtgtgcctgaactgcggcttcgagacacacgcagccgagcaagccgccctgaacatcgccagatcctggctgttcctgcggagccaggagtacaagaaataccagacaaacaagacaaccggcaacaccgataagagagccttcgtcgagacctggcagtccttttaccggaagaagcttaaggaggtgtggaaacctgccgtgcggtctggcggatctggcggaggctccacaagcgcccaggcccccctgagcttcgaggacgtggccgtgagcttcagcagggaggagtggaggctgctggtgcccgcccagaaggacctgtacagggacgtgatgctggagaactacaggaacctggtgagcgtgggctaccaggccagcgagcccgacagcctgttccagctggagcacggcggccccctgtgggccgtggagggcgccgcccccaggcccccctgccccggcttcgtgctgcagaccagccccaagaaaaagagaaaagtctaagctgccttctgcggggcttgccttctggccatgcccttcttctctcccttgcacctgtacctcttggtctttgaataaagcctgagtaggaaggctagcaaaaaaaaaaaaaaaaaaaaaaaaaaaaaaaaaaaaaaaaaaaaaaaaaaaaaaaaaaaaaaaaaaaaaaaaaaaaaaaa

SEQ ID NO: 6063 - RNA, 5797 nt, synthetic construct
  source 1..5797: mol_type = other RNA
aggaaataagagagaaaagaagagtaagaagaaatataagagccaccatggcccctaagaagaagcgtaaagtgagccggatggaacgcctcgtctacgaggtgcggcagaagtgcagaaacatcgaggacatctgcatctcctgcggatctctgaacgtgaccctggagcacccactgttcatcggcggcatgtgccagaactgtaaaaactgttttctggagtgtgcctatcaatacgacgatgacggctaccagagctactgcaccatctgttgcggcggaagagaggtgctgatgtgtggaaataacaactgctgccggtgcttctgcgtggaatgcgtggacctgctggtgggccccggcgccgcccaggccgctattaaggaagatccttggaactgctacatgtgcggccacaagggcacatacggcctgctgagacggagagaggactggcctagcagactgcagatgttcttcgccaataaccacgaccaggagttcgacccccctaaggtgtaccctcccgtccccgccgagaagagaaagcccatccgggtcctgagcctgttcgatggcatcgccaccggtctgctggtgctgaaggacctgggcatccaggtggataggtacattgcctccgaggtgtgcgaggactccatcaccgtgggaatggtgcgtcatcagggcaagatcatgtacgtgggcgacgtgcggagcgtgacacagaagcatatccaggagtggggccctttcgacctggtgatcggcggcagcccttgcaatgacctgagcatcgtgaacccagcccggaagggcctgtacgagggaaccggcagactgttcttcgagttttacagactgctgcacgacgcccggcctaaggaaggcgacgaccggcccttcttttggctgttcgagaatgtggtggccatgggagtcagcgacaagcgggatattagccggttcctggagagcaaccccgtgatgatcgatgccaaggaagtgagcgccgcccaccgggccagatacttctggggcaatctgcctggcatgaacagacccctggccagcaccgtgaacgacaagctggagctgcaggagtgcctggagcacggccggatcgccaagttcagcaaggtgagaaccatcaccacccgaagcaacagcatcaaacaaggcaaggaccagcactttcctgtgttcatgaacgagaaggaggacatcctgtggtgtaccgagatggagagagtgttcgggttcccagtccactacacagatgtcagcaacatgtctagactggccagacagagactgctgggaagaagctggtccgtccctgtgatcagacacctgttcgcccctctgaaggagtacttcgcctgcgtgagcagcggcaacagcaacgccaacagccggggccccagcttctctagcggcctggtgccactgtccctgagagggagccacatgggccccatggagatctacaaaaccgtgagcgcctggaagcggcagcctgtgcgcgtgctgagcctgtttcggaatatcgataaagtcctgaaaagcctgggattcctggagagcggctctggctccggcggtggcaccctgaagtacgtggaggatgtgacaaacgtggtcagacgggatgtggagaagtggggccccttcgatctggtgtacggcagcacccaacccctgggcagctcttgtgaccggtgccctggctggtacatgtttcagttccaccggatcctgcagtacgccctgccgagacaggagtcccagcggccattcttttggattttcatggacaacttgctgctgaccgaggatgaccaggaaactaccactcggttcctgcagaccgaagccgtgaccctgcaggacgtgagaggccgggactaccagaacgccatgcgggtgtggtccaacatccctggactgaaaagcaagcacgcacctctgacccctaaagaagaggagtacctgcaggcccaggtgcggagcagaagcaagctggacgcccctaaggtggatctgctggtgaagaattgcctcctgcccctgagagagtacttcaagtatttcagccagaatagtctgcccctgggcggcccaagcagcggcgcccctcctcccagcggcggcagcccagccggctccccaacctctaccgaggagggcacctctgagtccgccacccccgagagcggccctggcacctccaccgagcccagcgagggcagcgcacccggcagccctgccggcagccccacctccacagaggagggaaccagcaccgagcccagcgaaggcagcgccccaggcaccagcaccgagcctagtgagggcggctctggcggcggcagcgcccaggagattaaacggatcaacaagatcagaagaagacttgtgaaagacagcaacaccaagaaggccggcaagacaggccccatgaaaaccctgctggttagagtgatgacacccgatctgagagagcggctggaaaacctgagaaagaagcctgaaaatatcccccagcccatcagcaatacatctagagccaacctgaataagctgctgaccgattacaccgaaatgaagaaggcgatcctgcatgtgtactgggaagagttccagaaggaccctgtgggcctgatgagccgggtggcccagcctgccagcaagaagatcgatcagaacaagctgaaacctgagatggacgagaagggcaacctgaccaccgccggctttgcctgctctcagtgtggccagcccctgttcgtgtacaagctggagcaggtgtctgagaagggcaaggcttacaccaactacttcggacggtgcaatgtggccgagcacgaaaagctgatcctgctggcccagctgaagcccgagaaggatagcgacgaagccgtgacatatagcctgggaaagtttgggcagagggccctggatttctacagcattcatgtgaccaaggagtccacccaccccgtgaagcccctggcccagatcgccggaaacagatacgcctccggacctgtgggaaaggccctgagcgacgcatgtatgggcacaatcgcctccttcctgtctaagtaccaggacatcatcatcgaacaccagaaggtggtgaagggcaaccagaagagactggagagcctgcgggagctggccggcaaggaaaacctggaataccctagcgtgaccctgccacctcagcctcacaccaaggagggcgttgatgcctacaacgaagtgatcgcccgggtgcgaatgtgggtgaacctgaacctgtggcagaagctgaagctaagcagagatgatgccaagcctctgctgagactgaagggattcccttcctttcctctggtcgagagacaggccaacgaagtggactggtgggacatggtgtgtaacgtgaagaagctgatcaacgagaaaaaggaggatggcaaggtgttttggcagaatctggctggctacaagagacaggaagccctgagaccatacctgagcagcgaggaagatcggaagaagggaaagaaattcgctcggtaccagctgggcgacctgctgctgcacctggaaaagaagcacggcgaggactggggaaaggtgtacgacgaggcctgggagcggattgacaagaaagtggaaggcctgagcaagcacatcaagctggaagaggaacggagaagcgaggacgcccagagcaaggccgccctgaccgactggctgcgggctaaggccagcttcgtgatcgagggcctgaaggaggccgacaaggacgagttctgcagatgcgagctgaagctgcagaagtggtacggggacctgcggggaaagcccttcgccatcgaagccgagaacagcatcctggacatcagcggcttcagcaagcagtacaactgtgccttcatctggcagaaggacggcgtgaagaagctgaacctgtacctgatcatcaactacttcaagggcggcaagctgcggttcaagaagatcaaacctgaagccttcgaagccaacagattctacaccgtgatcaacaaaaagagcggcgagatcgtgcccatggaggtgaacttcaacttcgacgaccccaacctgatcatcctgcctctggcctttggcaagagacagggcagagaattcatctggaacgacctgctgtccctggaaaccggcagcctgaagctggccaacggaagagtgatcgagaagacactgtacaacagaagaacccggcaggatgagcctgccctgttcgtggccctgaccttcgagcggcgggaggtcctggactcctccaatatcaaaccaatgaacctgatcggcgtggcaagaggcgaaaacatccccgccgtgatcgccctgaccgaccccgagggctgcccactgagccggtttaaggatagcctgggaaacccaacccacatcctgagaatcggcgagagctataaggagaagcagcggaccatccaggccaagaaggaggtggagcagcggagagccggcggctacagccggaagtacgccagcaaagccaagaatctggcagacgatatggtgagaaacaccgctagagatctgctgtactacgccgtgacccaggatgccatgctgatcttcgccaacctgagccggggcttcggccggcagggcaagcggaccttcatggccgagagacagtacacacggatggaggactggctgaccgccaagctggcctacgagggcctgagcaagacctacctgtccaagacactggcccagtacacctccaagacatgcagcaactgtgggtttaccatcaccagcgccgactacgacagggtgctggagaagctgaagaagacagcaacaggctggatgaccacaattaacggcaaggagctgaaggtggagggccagattacctactacaacagatacaagagacagaacgtagtcaaggacctgtccgtcgagctggatagactgagcgaagaatctgtgaacaacgacatctcctcctggacaaagggcagaagcggagaagctctgagcctcctgaagaaaagattctcccatagacccgtgcaggagaagttcgtgtgcctgaactgcggcttcgagacacacgcagccgagcaagccgccctgaacatcgccagatcctggctgttcctgcggagccaggagtacaagaaataccagacaaacaagacaaccggcaacaccgataagagagccttcgtcgagacctggcagtccttttaccggaagaagcttaaggaggtgtggaaacctgccgtgcggtctggcggatctggcggaggctccacaagcttccagggcagcctgaccttcagcgacgtggccatcggcttcagccagcaggagtgggagtgcctggaccccgtgcagaagagcctgtacagggacgtgatgatggagaactacggcaacctggtgagcctgggctacagcatcagcaagcccgacgtgatcaccctgctggagcagggcaaggagccctggatggtgctgagggaggagaccaagaggtgggacaccgacagcttcctgagcaccagccccaagaaaaagagaaaagtctaagctgccttctgcggggcttgccttctggccatgcccttcttctctcccttgcacctgtacctcttggtctttgaataaagcctgagtaggaaggctagcaaaaaaaaaaaaaaaaaaaaaaaaaaaaaaaaaaaaaaaaaaaaaaaaaaaaaaaaaaaaaaaaaaaaaaaaaaaaaaaa

SEQ ID NO: 6064 - RNA, 5797 nt, synthetic construct
  source 1..5797: mol_type = other RNA
aggaaataagagagaaaagaagagtaagaagaaatataagagccaccatggcccctaagaagaagcgtaaagtgagccggatggaacgcctcgtctacgaggtgcggcagaagtgcagaaacatcgaggacatctgcatctcctgcggatctctgaacgtgaccctggagcacccactgttcatcggcggcatgtgccagaactgtaaaaactgttttctggagtgtgcctatcaatacgacgatgacggctaccagagctactgcaccatctgttgcggcggaagagaggtgctgatgtgtggaaataacaactgctgccggtgcttctgcgtggaatgcgtggacctgctggtgggccccggcgccgcccaggccgctattaaggaagatccttggaactgctacatgtgcggccacaagggcacatacggcctgctgagacggagagaggactggcctagcagactgcagatgttcttcgccaataaccacgaccaggagttcgacccccctaaggtgtaccctcccgtccccgccgagaagagaaagcccatccgggtcctgagcctgttcgatggcatcgccaccggtctgctggtgctgaaggacctgggcatccaggtggataggtacattgcctccgaggtgtgcgaggactccatcaccgtgggaatggtgcgtcatcagggcaagatcatgtacgtgggcgacgtgcggagcgtgacacagaagcatatccaggagtggggccctttcgacctggtgatcggcggcagcccttgcaatgacctgagcatcgtgaacccagcccggaagggcctgtacgagggaaccggcagactgttcttcgagttttacagactgctgcacgacgcccggcctaaggaaggcgacgaccggcccttcttttggctgttcgagaatgtggtggccatgggagtcagcgacaagcgggatattagccggttcctggagagcaaccccgtgatgatcgatgccaaggaagtgagcgccgcccaccgggccagatacttctggggcaatctgcctggcatgaacagacccctggccagcaccgtgaacgacaagctggagctgcaggagtgcctggagcacggccggatcgccaagttcagcaaggtgagaaccatcaccacccgaagcaacagcatcaaacaaggcaaggaccagcactttcctgtgttcatgaacgagaaggaggacatcctgtggtgtaccgagatggagagagtgttcgggttcccagtccactacacagatgtcagcaacatgtctagactggccagacagagactgctgggaagaagctggtccgtccctgtgatcagacacctgttcgcccctctgaaggagtacttcgcctgcgtgagcagcggcaacagcaacgccaacagccggggccccagcttctctagcggcctggtgccactgtccctgagagggagccacatgggccccatggagatctacaaaaccgtgagcgcctggaagcggcagcctgtgcgcgtgctgagcctgtttcggaatatcgataaagtcctgaaaagcctgggattcctggagagcggctctggctccggcggtggcaccctgaagtacgtggaggatgtgacaaacgtggtcagacgggatgtggagaagtggggccccttcgatctggtgtacggcagcacccaacccctgggcagctcttgtgaccggtgccctggctggtacatgtttcagttccaccggatcctgcagtacgccctgccgagacaggagtcccagcggccattcttttggattttcatggacaacttgctgctgaccgaggatgaccaggaaactaccactcggttcctgcagaccgaagccgtgaccctgcaggacgtgagaggccgggactaccagaacgccatgcgggtgtggtccaacatccctggactgaaaagcaagcacgcacctctgacccctaaagaagaggagtacctgcaggcccaggtgcggagcagaagcaagctggacgcccctaaggtggatctgctggtgaagaattgcctcctgcccctgagagagtacttcaagtatttcagccagaatagtctgcccctgggcggcccaagcagcggcgcccctcctcccagcggcggcagcccagccggctccccaacctctaccgaggagggcacctctgagtccgccacccccgagagcggccctggcacctccaccgagcccagcgagggcagcgcacccggcagccctgccggcagccccacctccacagaggagggaaccagcaccgagcccagcgaaggcagcgccccaggcaccagcaccgagcctagtgagggcggctctggcggcggcagcgcccaggagattaaacggatcaacaagatcagaagaagacttgtgaaagacagcaacaccaagaaggccggcaagacaggccccatgaaaaccctgctggttagagtgatgacacccgatctgagagagcggctggaaaacctgagaaagaagcctgaaaatatcccccagcccatcagcaatacatctagagccaacctgaataagctgctgaccgattacaccgaaatgaagaaggcgatcctgcatgtgtactgggaagagttccagaaggaccctgtgggcctgatgagccgggtggcccagcctgccagcaagaagatcgatcagaacaagctgaaacctgagatggacgagaagggcaacctgaccaccgccggctttgcctgctctcagtgtggccagcccctgttcgtgtacaagctggagcaggtgtctgagaagggcaaggcttacaccaactacttcggacggtgcaatgtggccgagcacgaaaagctgatcctgctggcccagctgaagcccgagaaggatagcgacgaagccgtgacatatagcctgggaaagtttgggcagagggccctggatttctacagcattcatgtgaccaaggagtccacccaccccgtgaagcccctggcccagatcgccggaaacagatacgcctccggacctgtgggaaaggccctgagcgacgcatgtatgggcacaatcgcctccttcctgtctaagtaccaggacatcatcatcgaacaccagaaggtggtgaagggcaaccagaagagactggagagcctgcgggagctggccggcaaggaaaacctggaataccctagcgtgaccctgccacctcagcctcacaccaaggagggcgttgatgcctacaacgaagtgatcgcccgggtgcgaatgtgggtgaacctgaacctgtggcagaagctgaagctaagcagagatgatgccaagcctctgctgagactgaagggattcccttcctttcctctggtcgagagacaggccaacgaagtggactggtgggacatggtgtgtaacgtgaagaagctgatcaacgagaaaaaggaggatggcaaggtgttttggcagaatctggctggctacaagagacaggaagccctgagaccatacctgagcagcgaggaagatcggaagaagggaaagaaattcgctcggtaccagctgggcgacctgctgctgcacctggaaaagaagcacggcgaggactggggaaaggtgtacgacgaggcctgggagcggattgacaagaaagtggaaggcctgagcaagcacatcaagctggaagaggaacggagaagcgaggacgcccagagcaaggccgccctgaccgactggctgcgggctaaggccagcttcgtgatcgagggcctgaaggaggccgacaaggacgagttctgcagatgcgagctgaagctgcagaagtggtacggggacctgcggggaaagcccttcgccatcgaagccgagaacagcatcctggacatcagcggcttcagcaagcagtacaactgtgccttcatctggcagaaggacggcgtgaagaagctgaacctgtacctgatcatcaactacttcaagggcggcaagctgcggttcaagaagatcaaacctgaagccttcgaagccaacagattctacaccgtgatcaacaaaaagagcggcgagatcgtgcccatggaggtgaacttcaacttcgacgaccccaacctgatcatcctgcctctggcctttggcaagagacagggcagagaattcatctggaacgacctgctgtccctggaaaccggcagcctgaagctggccaacggaagagtgatcgagaagacactgtacaacagaagaacccggcaggatgagcctgccctgttcgtggccctgaccttcgagcggcgggaggtcctggactcctccaatatcaaaccaatgaacctgatcggcgtggcaagaggcgaaaacatccccgccgtgatcgccctgaccgaccccgagggctgcccactgagccggtttaaggatagcctgggaaacccaacccacatcctgagaatcggcgagagctataaggagaagcagcggaccatccaggccaagaaggaggtggagcagcggagagccggcggctacagccggaagtacgccagcaaagccaagaatctggcagacgatatggtgagaaacaccgctagagatctgctgtactacgccgtgacccaggatgccatgctgatcttcgccaacctgagccggggcttcggccggcagggcaagcggaccttcatggccgagagacagtacacacggatggaggactggctgaccgccaagctggcctacgagggcctgagcaagacctacctgtccaagacactggcccagtacacctccaagacatgcagcaactgtgggtttaccatcaccagcgccgactacgacagggtgctggagaagctgaagaagacagcaacaggctggatgaccacaattaacggcaaggagctgaaggtggagggccagattacctactacaacagatacaagagacagaacgtagtcaaggacctgtccgtcgagctggatagactgagcgaagaatctgtgaacaacgacatctcctcctggacaaagggcagaagcggagaagctctgagcctcctgaagaaaagattctcccatagacccgtgcaggagaagttcgtgtgcctgaactgcggcttcgagacacacgcagccgagcaagccgccctgaacatcgccagatcctggctgttcctgcggagccaggagtacaagaaataccagacaaacaagacaaccggcaacaccgataagagagccttcgtcgagacctggcagtccttttaccggaagaagcttaaggaggtgtggaaacctgccgtgcggtctggcggatctggcggaggctccacaagccaggacgtggtgaccttcaaggacgtggccatctacttcagccccgaggagtgggtgaggctgagcgccggccagagggagctgtaccaggaggtgatgctggacaactacgagctggtgaccagcctggacagggagagcaagctgctgtacaagatggaccccgaggaggagagctgcgagggcgtgccctacagcagcgccgacagcggcgcccccgacagcagcagcaccagcgcctgcaccagccccaagaaaaagagaaaagtctaagctgccttctgcggggcttgccttctggccatgcccttcttctctcccttgcacctgtacctcttggtctttgaataaagcctgagtaggaaggctagcaaaaaaaaaaaaaaaaaaaaaaaaaaaaaaaaaaaaaaaaaaaaaaaaaaaaaaaaaaaaaaaaaaaaaaaaaaaaaaaa

SEQ ID NO: 6065 - RNA, 5797 nt, synthetic construct
  source 1..5797: mol_type = other RNA
aggaaataagagagaaaagaagagtaagaagaaatataagagccaccatggcccctaagaagaagcgtaaagtgagccggatggaacgcctcgtctacgaggtgcggcagaagtgcagaaacatcgaggacatctgcatctcctgcggatctctgaacgtgaccctggagcacccactgttcatcggcggcatgtgccagaactgtaaaaactgttttctggagtgtgcctatcaatacgacgatgacggctaccagagctactgcaccatctgttgcggcggaagagaggtgctgatgtgtggaaataacaactgctgccggtgcttctgcgtggaatgcgtggacctgctggtgggccccggcgccgcccaggccgctattaaggaagatccttggaactgctacatgtgcggccacaagggcacatacggcctgctgagacggagagaggactggcctagcagactgcagatgttcttcgccaataaccacgaccaggagttcgacccccctaaggtgtaccctcccgtccccgccgagaagagaaagcccatccgggtcctgagcctgttcgatggcatcgccaccggtctgctggtgctgaaggacctgggcatccaggtggataggtacattgcctccgaggtgtgcgaggactccatcaccgtgggaatggtgcgtcatcagggcaagatcatgtacgtgggcgacgtgcggagcgtgacacagaagcatatccaggagtggggccctttcgacctggtgatcggcggcagcccttgcaatgacctgagcatcgtgaacccagcccggaagggcctgtacgagggaaccggcagactgttcttcgagttttacagactgctgcacgacgcccggcctaaggaaggcgacgaccggcccttcttttggctgttcgagaatgtggtggccatgggagtcagcgacaagcgggatattagccggttcctggagagcaaccccgtgatgatcgatgccaaggaagtgagcgccgcccaccgggccagatacttctggggcaatctgcctggcatgaacagacccctggccagcaccgtgaacgacaagctggagctgcaggagtgcctggagcacggccggatcgccaagttcagcaaggtgagaaccatcaccacccgaagcaacagcatcaaacaaggcaaggaccagcactttcctgtgttcatgaacgagaaggaggacatcctgtggtgtaccgagatggagagagtgttcgggttcccagtccactacacagatgtcagcaacatgtctagactggccagacagagactgctgggaagaagctggtccgtccctgtgatcagacacctgttcgcccctctgaaggagtacttcgcctgcgtgagcagcggcaacagcaacgccaacagccggggccccagcttctctagcggcctggtgccactgtccctgagagggagccacatgggccccatggagatctacaaaaccgtgagcgcctggaagcggcagcctgtgcgcgtgctgagcctgtttcggaatatcgataaagtcctgaaaagcctgggattcctggagagcggctctggctccggcggtggcaccctgaagtacgtggaggatgtgacaaacgtggtcagacgggatgtggagaagtggggccccttcgatctggtgtacggcagcacccaacccctgggcagctcttgtgaccggtgccctggctggtacatgtttcagttccaccggatcctgcagtacgccctgccgagacaggagtcccagcggccattcttttggattttcatggacaacttgctgctgaccgaggatgaccaggaaactaccactcggttcctgcagaccgaagccgtgaccctgcaggacgtgagaggccgggactaccagaacgccatgcgggtgtggtccaacatccctggactgaaaagcaagcacgcacctctgacccctaaagaagaggagtacctgcaggcccaggtgcggagcagaagcaagctggacgcccctaaggtggatctgctggtgaagaattgcctcctgcccctgagagagtacttcaagtatttcagccagaatagtctgcccctgggcggcccaagcagcggcgcccctcctcccagcggcggcagcccagccggctccccaacctctaccgaggagggcacctctgagtccgccacccccgagagcggccctggcacctccaccgagcccagcgagggcagcgcacccggcagccctgccggcagccccacctccacagaggagggaaccagcaccgagcccagcgaaggcagcgccccaggcaccagcaccgagcctagtgagggcggctctggcggcggcagcgcccaggagattaaacggatcaacaagatcagaagaagacttgtgaaagacagcaacaccaagaaggccggcaagacaggccccatgaaaaccctgctggttagagtgatgacacccgatctgagagagcggctggaaaacctgagaaagaagcctgaaaatatcccccagcccatcagcaatacatctagagccaacctgaataagctgctgaccgattacaccgaaatgaagaaggcgatcctgcatgtgtactgggaagagttccagaaggaccctgtgggcctgatgagccgggtggcccagcctgccagcaagaagatcgatcagaacaagctgaaacctgagatggacgagaagggcaacctgaccaccgccggctttgcctgctctcagtgtggccagcccctgttcgtgtacaagctggagcaggtgtctgagaagggcaaggcttacaccaactacttcggacggtgcaatgtggccgagcacgaaaagctgatcctgctggcccagctgaagcccgagaaggatagcgacgaagccgtgacatatagcctgggaaagtttgggcagagggccctggatttctacagcattcatgtgaccaaggagtccacccaccccgtgaagcccctggcccagatcgccggaaacagatacgcctccggacctgtgggaaaggccctgagcgacgcatgtatgggcacaatcgcctccttcctgtctaagtaccaggacatcatcatcgaacaccagaaggtggtgaagggcaaccagaagagactggagagcctgcgggagctggccggcaaggaaaacctggaataccctagcgtgaccctgccacctcagcctcacaccaaggagggcgttgatgcctacaacgaagtgatcgcccgggtgcgaatgtgggtgaacctgaacctgtggcagaagctgaagctaagcagagatgatgccaagcctctgctgagactgaagggattcccttcctttcctctggtcgagagacaggccaacgaagtggactggtgggacatggtgtgtaacgtgaagaagctgatcaacgagaaaaaggaggatggcaaggtgttttggcagaatctggctggctacaagagacaggaagccctgagaccatacctgagcagcgaggaagatcggaagaagggaaagaaattcgctcggtaccagctgggcgacctgctgctgcacctggaaaagaagcacggcgaggactggggaaaggtgtacgacgaggcctgggagcggattgacaagaaagtggaaggcctgagcaagcacatcaagctggaagaggaacggagaagcgaggacgcccagagcaaggccgccctgaccgactggctgcgggctaaggccagcttcgtgatcgagggcctgaaggaggccgacaaggacgagttctgcagatgcgagctgaagctgcagaagtggtacggggacctgcggggaaagcccttcgccatcgaagccgagaacagcatcctggacatcagcggcttcagcaagcagtacaactgtgccttcatctggcagaaggacggcgtgaagaagctgaacctgtacctgatcatcaactacttcaagggcggcaagctgcggttcaagaagatcaaacctgaagccttcgaagccaacagattctacaccgtgatcaacaaaaagagcggcgagatcgtgcccatggaggtgaacttcaacttcgacgaccccaacctgatcatcctgcctctggcctttggcaagagacagggcagagaattcatctggaacgacctgctgtccctggaaaccggcagcctgaagctggccaacggaagagtgatcgagaagacactgtacaacagaagaacccggcaggatgagcctgccctgttcgtggccctgaccttcgagcggcgggaggtcctggactcctccaatatcaaaccaatgaacctgatcggcgtggcaagaggcgaaaacatccccgccgtgatcgccctgaccgaccccgagggctgcccactgagccggtttaaggatagcctgggaaacccaacccacatcctgagaatcggcgagagctataaggagaagcagcggaccatccaggccaagaaggaggtggagcagcggagagccggcggctacagccggaagtacgccagcaaagccaagaatctggcagacgatatggtgagaaacaccgctagagatctgctgtactacgccgtgacccaggatgccatgctgatcttcgccaacctgagccggggcttcggccggcagggcaagcggaccttcatggccgagagacagtacacacggatggaggactggctgaccgccaagctggcctacgagggcctgagcaagacctacctgtccaagacactggcccagtacacctccaagacatgcagcaactgtgggtttaccatcaccagcgccgactacgacagggtgctggagaagctgaagaagacagcaacaggctggatgaccacaattaacggcaaggagctgaaggtggagggccagattacctactacaacagatacaagagacagaacgtagtcaaggacctgtccgtcgagctggatagactgagcgaagaatctgtgaacaacgacatctcctcctggacaaagggcagaagcggagaagctctgagcctcctgaagaaaagattctcccatagacccgtgcaggagaagttcgtgtgcctgaactgcggcttcgagacacacgcagccgagcaagccgccctgaacatcgccagatcctggctgttcctgcggagccaggagtacaagaaataccagacaaacaagacaaccggcaacaccgataagagagccttcgtcgagacctggcagtccttttaccggaagaagcttaaggaggtgtggaaacctgccgtgcggtctggcggatctggcggaggctccacaagcgtggagcccgtgagcttcgaggaggtggccgtgtacttcagcgaggaggagtgggccctgctggaccccggccagagggccctgtactgggacgtgatgcaggagaactacgaggccgtgagctggctggtgaggggcaggggcgtgagcaaggcccacgtgatcagctgggtggagaggggcgaggagctgtggatccccgacaggcagggctgcgaggagggcgagagcatcagcgacatcaccagccccaagaaaaagagaaaagtctaagctgccttctgcggggcttgccttctggccatgcccttcttctctcccttgcacctgtacctcttggtctttgaataaagcctgagtaggaaggctagcaaaaaaaaaaaaaaaaaaaaaaaaaaaaaaaaaaaaaaaaaaaaaaaaaaaaaaaaaaaaaaaaaaaaaaaaaaaaaaaa

SEQ ID NO: 6066 - RNA, 5797 nt, synthetic construct
  source 1..5797: mol_type = other RNA
aggaaataagagagaaaagaagagtaagaagaaatataagagccaccatggcccctaagaagaagcgtaaagtgagccggatggaacgcctcgtctacgaggtgcggcagaagtgcagaaacatcgaggacatctgcatctcctgcggatctctgaacgtgaccctggagcacccactgttcatcggcggcatgtgccagaactgtaaaaactgttttctggagtgtgcctatcaatacgacgatgacggctaccagagctactgcaccatctgttgcggcggaagagaggtgctgatgtgtggaaataacaactgctgccggtgcttctgcgtggaatgcgtggacctgctggtgggccccggcgccgcccaggccgctattaaggaagatccttggaactgctacatgtgcggccacaagggcacatacggcctgctgagacggagagaggactggcctagcagactgcagatgttcttcgccaataaccacgaccaggagttcgacccccctaaggtgtaccctcccgtccccgccgagaagagaaagcccatccgggtcctgagcctgttcgatggcatcgccaccggtctgctggtgctgaaggacctgggcatccaggtggataggtacattgcctccgaggtgtgcgaggactccatcaccgtgggaatggtgcgtcatcagggcaagatcatgtacgtgggcgacgtgcggagcgtgacacagaagcatatccaggagtggggccctttcgacctggtgatcggcggcagcccttgcaatgacctgagcatcgtgaacccagcccggaagggcctgtacgagggaaccggcagactgttcttcgagttttacagactgctgcacgacgcccggcctaaggaaggcgacgaccggcccttcttttggctgttcgagaatgtggtggccatgggagtcagcgacaagcgggatattagccggttcctggagagcaaccccgtgatgatcgatgccaaggaagtgagcgccgcccaccgggccagatacttctggggcaatctgcctggcatgaacagacccctggccagcaccgtgaacgacaagctggagctgcaggagtgcctggagcacggccggatcgccaagttcagcaaggtgagaaccatcaccacccgaagcaacagcatcaaacaaggcaaggaccagcactttcctgtgttcatgaacgagaaggaggacatcctgtggtgtaccgagatggagagagtgttcgggttcccagtccactacacagatgtcagcaacatgtctagactggccagacagagactgctgggaagaagctggtccgtccctgtgatcagacacctgttcgcccctctgaaggagtacttcgcctgcgtgagcagcggcaacagcaacgccaacagccggggccccagcttctctagcggcctggtgccactgtccctgagagggagccacatgggccccatggagatctacaaaaccgtgagcgcctggaagcggcagcctgtgcgcgtgctgagcctgtttcggaatatcgataaagtcctgaaaagcctgggattcctggagagcggctctggctccggcggtggcaccctgaagtacgtggaggatgtgacaaacgtggtcagacgggatgtggagaagtggggccccttcgatctggtgtacggcagcacccaacccctgggcagctcttgtgaccggtgccctggctggtacatgtttcagttccaccggatcctgcagtacgccctgccgagacaggagtcccagcggccattcttttggattttcatggacaacttgctgctgaccgaggatgaccaggaaactaccactcggttcctgcagaccgaagccgtgaccctgcaggacgtgagaggccgggactaccagaacgccatgcgggtgtggtccaacatccctggactgaaaagcaagcacgcacctctgacccctaaagaagaggagtacctgcaggcccaggtgcggagcagaagcaagctggacgcccctaaggtggatctgctggtgaagaattgcctcctgcccctgagagagtacttcaagtatttcagccagaatagtctgcccctgggcggcccaagcagcggcgcccctcctcccagcggcggcagcccagccggctccccaacctctaccgaggagggcacctctgagtccgccacccccgagagcggccctggcacctccaccgagcccagcgagggcagcgcacccggcagccctgccggcagccccacctccacagaggagggaaccagcaccgagcccagcgaaggcagcgccccaggcaccagcaccgagcctagtgagggcggctctggcggcggcagcgcccaggagattaaacggatcaacaagatcagaagaagacttgtgaaagacagcaacaccaagaaggccggcaagacaggccccatgaaaaccctgctggttagagtgatgacacccgatctgagagagcggctggaaaacctgagaaagaagcctgaaaatatcccccagcccatcagcaatacatctagagccaacctgaataagctgctgaccgattacaccgaaatgaagaaggcgatcctgcatgtgtactgggaagagttccagaaggaccctgtgggcctgatgagccgggtggcccagcctgccagcaagaagatcgatcagaacaagctgaaacctgagatggacgagaagggcaacctgaccaccgccggctttgcctgctctcagtgtggccagcccctgttcgtgtacaagctggagcaggtgtctgagaagggcaaggcttacaccaactacttcggacggtgcaatgtggccgagcacgaaaagctgatcctgctggcccagctgaagcccgagaaggatagcgacgaagccgtgacatatagcctgggaaagtttgggcagagggccctggatttctacagcattcatgtgaccaaggagtccacccaccccgtgaagcccctggcccagatcgccggaaacagatacgcctccggacctgtgggaaaggccctgagcgacgcatgtatgggcacaatcgcctccttcctgtctaagtaccaggacatcatcatcgaacaccagaaggtggtgaagggcaaccagaagagactggagagcctgcgggagctggccggcaaggaaaacctggaataccctagcgtgaccctgccacctcagcctcacaccaaggagggcgttgatgcctacaacgaagtgatcgcccgggtgcgaatgtgggtgaacctgaacctgtggcagaagctgaagctaagcagagatgatgccaagcctctgctgagactgaagggattcccttcctttcctctggtcgagagacaggccaacgaagtggactggtgggacatggtgtgtaacgtgaagaagctgatcaacgagaaaaaggaggatggcaaggtgttttggcagaatctggctggctacaagagacaggaagccctgagaccatacctgagcagcgaggaagatcggaagaagggaaagaaattcgctcggtaccagctgggcgacctgctgctgcacctggaaaagaagcacggcgaggactggggaaaggtgtacgacgaggcctgggagcggattgacaagaaagtggaaggcctgagcaagcacatcaagctggaagaggaacggagaagcgaggacgcccagagcaaggccgccctgaccgactggctgcgggctaaggccagcttcgtgatcgagggcctgaaggaggccgacaaggacgagttctgcagatgcgagctgaagctgcagaagtggtacggggacctgcggggaaagcccttcgccatcgaagccgagaacagcatcctggacatcagcggcttcagcaagcagtacaactgtgccttcatctggcagaaggacggcgtgaagaagctgaacctgtacctgatcatcaactacttcaagggcggcaagctgcggttcaagaagatcaaacctgaagccttcgaagccaacagattctacaccgtgatcaacaaaaagagcggcgagatcgtgcccatggaggtgaacttcaacttcgacgaccccaacctgatcatcctgcctctggcctttggcaagagacagggcagagaattcatctggaacgacctgctgtccctggaaaccggcagcctgaagctggccaacggaagagtgatcgagaagacactgtacaacagaagaacccggcaggatgagcctgccctgttcgtggccctgaccttcgagcggcgggaggtcctggactcctccaatatcaaaccaatgaacctgatcggcgtggcaagaggcgaaaacatccccgccgtgatcgccctgaccgaccccgagggctgcccactgagccggtttaaggatagcctgggaaacccaacccacatcctgagaatcggcgagagctataaggagaagcagcggaccatccaggccaagaaggaggtggagcagcggagagccggcggctacagccggaagtacgccagcaaagccaagaatctggcagacgatatggtgagaaacaccgctagagatctgctgtactacgccgtgacccaggatgccatgctgatcttcgccaacctgagccggggcttcggccggcagggcaagcggaccttcatggccgagagacagtacacacggatggaggactggctgaccgccaagctggcctacgagggcctgagcaagacctacctgtccaagacactggcccagtacacctccaagacatgcagcaactgtgggtttaccatcaccagcgccgactacgacagggtgctggagaagctgaagaagacagcaacaggctggatgaccacaattaacggcaaggagctgaaggtggagggccagattacctactacaacagatacaagagacagaacgtagtcaaggacctgtccgtcgagctggatagactgagcgaagaatctgtgaacaacgacatctcctcctggacaaagggcagaagcggagaagctctgagcctcctgaagaaaagattctcccatagacccgtgcaggagaagttcgtgtgcctgaactgcggcttcgagacacacgcagccgagcaagccgccctgaacatcgccagatcctggctgttcctgcggagccaggagtacaagaaataccagacaaacaagacaaccggcaacaccgataagagagccttcgtcgagacctggcagtccttttaccggaagaagcttaaggaggtgtggaaacctgccgtgcggtctggcggatctggcggaggctccacaagcggcagcgtgagcttcgacgaggtgagcgtgaggttcagcaacgaggagtgggccctgctggaccccggccagagggccctgtacgaggaggtgatggaggagatcagggagatgatgaccagcgtgggcgacgtgagcgagttcctgaccgagggcgagcagagcgagctgagcagggagggcgccgaggagcagaaggagcagaggaagcagagggtgcaggtgggcacctacaggaacgagaccagccccaagaaaaagagaaaagtctaagctgccttctgcggggcttgccttctggccatgcccttcttctctcccttgcacctgtacctcttggtctttgaataaagcctgagtaggaaggctagcaaaaaaaaaaaaaaaaaaaaaaaaaaaaaaaaaaaaaaaaaaaaaaaaaaaaaaaaaaaaaaaaaaaaaaaaaaaaaaaa

SEQ ID NO: 6067 - RNA, 5833 nt, synthetic construct
  source 1..5833: mol_type = other RNA
aggaaataagagagaaaagaagagtaagaagaaatataagagccaccatggcccctaagaagaagcgtaaagtgagccggatggaacgcctcgtctacgaggtgcggcagaagtgcagaaacatcgaggacatctgcatctcctgcggatctctgaacgtgaccctggagcacccactgttcatcggcggcatgtgccagaactgtaaaaactgttttctggagtgtgcctatcaatacgacgatgacggctaccagagctactgcaccatctgttgcggcggaagagaggtgctgatgtgtggaaataacaactgctgccggtgcttctgcgtggaatgcgtggacctgctggtgggccccggcgccgcccaggccgctattaaggaagatccttggaactgctacatgtgcggccacaagggcacatacggcctgctgagacggagagaggactggcctagcagactgcagatgttcttcgccaataaccacgaccaggagttcgacccccctaaggtgtaccctcccgtccccgccgagaagagaaagcccatccgggtcctgagcctgttcgatggcatcgccaccggtctgctggtgctgaaggacctgggcatccaggtggataggtacattgcctccgaggtgtgcgaggactccatcaccgtgggaatggtgcgtcatcagggcaagatcatgtacgtgggcgacgtgcggagcgtgacacagaagcatatccaggagtggggccctttcgacctggtgatcggcggcagcccttgcaatgacctgagcatcgtgaacccagcccggaagggcctgtacgagggaaccggcagactgttcttcgagttttacagactgctgcacgacgcccggcctaaggaaggcgacgaccggcccttcttttggctgttcgagaatgtggtggccatgggagtcagcgacaagcgggatattagccggttcctggagagcaaccccgtgatgatcgatgccaaggaagtgagcgccgcccaccgggccagatacttctggggcaatctgcctggcatgaacagacccctggccagcaccgtgaacgacaagctggagctgcaggagtgcctggagcacggccggatcgccaagttcagcaaggtgagaaccatcaccacccgaagcaacagcatcaaacaaggcaaggaccagcactttcctgtgttcatgaacgagaaggaggacatcctgtggtgtaccgagatggagagagtgttcgggttcccagtccactacacagatgtcagcaacatgtctagactggccagacagagactgctgggaagaagctggtccgtccctgtgatcagacacctgttcgcccctctgaaggagtacttcgcctgcgtgagcagcggcaacagcaacgccaacagccggggccccagcttctctagcggcctggtgccactgtccctgagagggagccacatgggccccatggagatctacaaaaccgtgagcgcctggaagcggcagcctgtgcgcgtgctgagcctgtttcggaatatcgataaagtcctgaaaagcctgggattcctggagagcggctctggctccggcggtggcaccctgaagtacgtggaggatgtgacaaacgtggtcagacgggatgtggagaagtggggccccttcgatctggtgtacggcagcacccaacccctgggcagctcttgtgaccggtgccctggctggtacatgtttcagttccaccggatcctgcagtacgccctgccgagacaggagtcccagcggccattcttttggattttcatggacaacttgctgctgaccgaggatgaccaggaaactaccactcggttcctgcagaccgaagccgtgaccctgcaggacgtgagaggccgggactaccagaacgccatgcgggtgtggtccaacatccctggactgaaaagcaagcacgcacctctgacccctaaagaagaggagtacctgcaggcccaggtgcggagcagaagcaagctggacgcccctaaggtggatctgctggtgaagaattgcctcctgcccctgagagagtacttcaagtatttcagccagaatagtctgcccctgggcggcccaagcagcggcgcccctcctcccagcggcggcagcccagccggctccccaacctctaccgaggagggcacctctgagtccgccacccccgagagcggccctggcacctccaccgagcccagcgagggcagcgcacccggcagccctgccggcagccccacctccacagaggagggaaccagcaccgagcccagcgaaggcagcgccccaggcaccagcaccgagcctagtgagggcggctctggcggcggcagcgcccaggagattaaacggatcaacaagatcagaagaagacttgtgaaagacagcaacaccaagaaggccggcaagacaggccccatgaaaaccctgctggttagagtgatgacacccgatctgagagagcggctggaaaacctgagaaagaagcctgaaaatatcccccagcccatcagcaatacatctagagccaacctgaataagctgctgaccgattacaccgaaatgaagaaggcgatcctgcatgtgtactgggaagagttccagaaggaccctgtgggcctgatgagccgggtggcccagcctgccagcaagaagatcgatcagaacaagctgaaacctgagatggacgagaagggcaacctgaccaccgccggctttgcctgctctcagtgtggccagcccctgttcgtgtacaagctggagcaggtgtctgagaagggcaaggcttacaccaactacttcggacggtgcaatgtggccgagcacgaaaagctgatcctgctggcccagctgaagcccgagaaggatagcgacgaagccgtgacatatagcctgggaaagtttgggcagagggccctggatttctacagcattcatgtgaccaaggagtccacccaccccgtgaagcccctggcccagatcgccggaaacagatacgcctccggacctgtgggaaaggccctgagcgacgcatgtatgggcacaatcgcctccttcctgtctaagtaccaggacatcatcatcgaacaccagaaggtggtgaagggcaaccagaagagactggagagcctgcgggagctggccggcaaggaaaacctggaataccctagcgtgaccctgccacctcagcctcacaccaaggagggcgttgatgcctacaacgaagtgatcgcccgggtgcgaatgtgggtgaacctgaacctgtggcagaagctgaagctaagcagagatgatgccaagcctctgctgagactgaagggattcccttcctttcctctggtcgagagacaggccaacgaagtggactggtgggacatggtgtgtaacgtgaagaagctgatcaacgagaaaaaggaggatggcaaggtgttttggcagaatctggctggctacaagagacaggaagccctgagaccatacctgagcagcgaggaagatcggaagaagggaaagaaattcgctcggtaccagctgggcgacctgctgctgcacctggaaaagaagcacggcgaggactggggaaaggtgtacgacgaggcctgggagcggattgacaagaaagtggaaggcctgagcaagcacatcaagctggaagaggaacggagaagcgaggacgcccagagcaaggccgccctgaccgactggctgcgggctaaggccagcttcgtgatcgagggcctgaaggaggccgacaaggacgagttctgcagatgcgagctgaagctgcagaagtggtacggggacctgcggggaaagcccttcgccatcgaagccgagaacagcatcctggacatcagcggcttcagcaagcagtacaactgtgccttcatctggcagaaggacggcgtgaagaagctgaacctgtacctgatcatcaactacttcaagggcggcaagctgcggttcaagaagatcaaacctgaagccttcgaagccaacagattctacaccgtgatcaacaaaaagagcggcgagatcgtgcccatggaggtgaacttcaacttcgacgaccccaacctgatcatcctgcctctggcctttggcaagagacagggcagagaattcatctggaacgacctgctgtccctggaaaccggcagcctgaagctggccaacggaagagtgatcgagaagacactgtacaacagaagaacccggcaggatgagcctgccctgttcgtggccctgaccttcgagcggcgggaggtcctggactcctccaatatcaaaccaatgaacctgatcggcgtggcaagaggcgaaaacatccccgccgtgatcgccctgaccgaccccgagggctgcccactgagccggtttaaggatagcctgggaaacccaacccacatcctgagaatcggcgagagctataaggagaagcagcggaccatccaggccaagaaggaggtggagcagcggagagccggcggctacagccggaagtacgccagcaaagccaagaatctggcagacgatatggtgagaaacaccgctagagatctgctgtactacgccgtgacccaggatgccatgctgatcttcgccaacctgagccggggcttcggccggcagggcaagcggaccttcatggccgagagacagtacacacggatggaggactggctgaccgccaagctggcctacgagggcctgagcaagacctacctgtccaagacactggcccagtacacctccaagacatgcagcaactgtgggtttaccatcaccagcgccgactacgacagggtgctggagaagctgaagaagacagcaacaggctggatgaccacaattaacggcaaggagctgaaggtggagggccagattacctactacaacagatacaagagacagaacgtagtcaaggacctgtccgtcgagctggatagactgagcgaagaatctgtgaacaacgacatctcctcctggacaaagggcagaagcggagaagctctgagcctcctgaagaaaagattctcccatagacccgtgcaggagaagttcgtgtgcctgaactgcggcttcgagacacacgcagccgagcaagccgccctgaacatcgccagatcctggctgttcctgcggagccaggagtacaagaaataccagacaaacaagacaaccggcaacaccgataagagagccttcgtcgagacctggcagtccttttaccggaagaagcttaaggaggtgtggaaacctgccgtgcggtctggcggatctggcggaggctccacaagcgtgacctacgaggacgtgcacgtgaacttcacccaggaggagtgggccctgctggaccccagccagaagaagctgtacaaggacgtgatgctggagacctacaggaacctgaacgccatcggcttcagctgggaggcccagaacatcgaggagcactgccagagcttcggcaggcacaggaggtgcgagaggagccagagggccgagaagcccagcgagtacacccagcccgacaagggcttcgccctgagggcccacagccacgcccagaggcacgagaccagccccaagaaaaagagaaaagtctaagctgccttctgcggggcttgccttctggccatgcccttcttctctcccttgcacctgtacctcttggtctttgaataaagcctgagtaggaaggctagcaaaaaaaaaaaaaaaaaaaaaaaaaaaaaaaaaaaaaaaaaaaaaaaaaaaaaaaaaaaaaaaaaaaaaaaaaaaaaaaa

SEQ ID NO: 6068 - RNA, 5797 nt, synthetic construct
  source 1..5797: mol_type = other RNA
aggaaataagagagaaaagaagagtaagaagaaatataagagccaccatggcccctaagaagaagcgtaaagtgagccggatggaacgcctcgtctacgaggtgcggcagaagtgcagaaacatcgaggacatctgcatctcctgcggatctctgaacgtgaccctggagcacccactgttcatcggcggcatgtgccagaactgtaaaaactgttttctggagtgtgcctatcaatacgacgatgacggctaccagagctactgcaccatctgttgcggcggaagagaggtgctgatgtgtggaaataacaactgctgccggtgcttctgcgtggaatgcgtggacctgctggtgggccccggcgccgcccaggccgctattaaggaagatccttggaactgctacatgtgcggccacaagggcacatacggcctgctgagacggagagaggactggcctagcagactgcagatgttcttcgccaataaccacgaccaggagttcgacccccctaaggtgtaccctcccgtccccgccgagaagagaaagcccatccgggtcctgagcctgttcgatggcatcgccaccggtctgctggtgctgaaggacctgggcatccaggtggataggtacattgcctccgaggtgtgcgaggactccatcaccgtgggaatggtgcgtcatcagggcaagatcatgtacgtgggcgacgtgcggagcgtgacacagaagcatatccaggagtggggccctttcgacctggtgatcggcggcagcccttgcaatgacctgagcatcgtgaacccagcccggaagggcctgtacgagggaaccggcagactgttcttcgagttttacagactgctgcacgacgcccggcctaaggaaggcgacgaccggcccttcttttggctgttcgagaatgtggtggccatgggagtcagcgacaagcgggatattagccggttcctggagagcaaccccgtgatgatcgatgccaaggaagtgagcgccgcccaccgggccagatacttctggggcaatctgcctggcatgaacagacccctggccagcaccgtgaacgacaagctggagctgcaggagtgcctggagcacggccggatcgccaagttcagcaaggtgagaaccatcaccacccgaagcaacagcatcaaacaaggcaaggaccagcactttcctgtgttcatgaacgagaaggaggacatcctgtggtgtaccgagatggagagagtgttcgggttcccagtccactacacagatgtcagcaacatgtctagactggccagacagagactgctgggaagaagctggtccgtccctgtgatcagacacctgttcgcccctctgaaggagtacttcgcctgcgtgagcagcggcaacagcaacgccaacagccggggccccagcttctctagcggcctggtgccactgtccctgagagggagccacatgggccccatggagatctacaaaaccgtgagcgcctggaagcggcagcctgtgcgcgtgctgagcctgtttcggaatatcgataaagtcctgaaaagcctgggattcctggagagcggctctggctccggcggtggcaccctgaagtacgtggaggatgtgacaaacgtggtcagacgggatgtggagaagtggggccccttcgatctggtgtacggcagcacccaacccctgggcagctcttgtgaccggtgccctggctggtacatgtttcagttccaccggatcctgcagtacgccctgccgagacaggagtcccagcggccattcttttggattttcatggacaacttgctgctgaccgaggatgaccaggaaactaccactcggttcctgcagaccgaagccgtgaccctgcaggacgtgagaggccgggactaccagaacgccatgcgggtgtggtccaacatccctggactgaaaagcaagcacgcacctctgacccctaaagaagaggagtacctgcaggcccaggtgcggagcagaagcaagctggacgcccctaaggtggatctgctggtgaagaattgcctcctgcccctgagagagtacttcaagtatttcagccagaatagtctgcccctgggcggcccaagcagcggcgcccctcctcccagcggcggcagcccagccggctccccaacctctaccgaggagggcacctctgagtccgccacccccgagagcggccctggcacctccaccgagcccagcgagggcagcgcacccggcagccctgccggcagccccacctccacagaggagggaaccagcaccgagcccagcgaaggcagcgccccaggcaccagcaccgagcctagtgagggcggctctggcggcggcagcgcccaggagattaaacggatcaacaagatcagaagaagacttgtgaaagacagcaacaccaagaaggccggcaagacaggccccatgaaaaccctgctggttagagtgatgacacccgatctgagagagcggctggaaaacctgagaaagaagcctgaaaatatcccccagcccatcagcaatacatctagagccaacctgaataagctgctgaccgattacaccgaaatgaagaaggcgatcctgcatgtgtactgggaagagttccagaaggaccctgtgggcctgatgagccgggtggcccagcctgccagcaagaagatcgatcagaacaagctgaaacctgagatggacgagaagggcaacctgaccaccgccggctttgcctgctctcagtgtggccagcccctgttcgtgtacaagctggagcaggtgtctgagaagggcaaggcttacaccaactacttcggacggtgcaatgtggccgagcacgaaaagctgatcctgctggcccagctgaagcccgagaaggatagcgacgaagccgtgacatatagcctgggaaagtttgggcagagggccctggatttctacagcattcatgtgaccaaggagtccacccaccccgtgaagcccctggcccagatcgccggaaacagatacgcctccggacctgtgggaaaggccctgagcgacgcatgtatgggcacaatcgcctccttcctgtctaagtaccaggacatcatcatcgaacaccagaaggtggtgaagggcaaccagaagagactggagagcctgcgggagctggccggcaaggaaaacctggaataccctagcgtgaccctgccacctcagcctcacaccaaggagggcgttgatgcctacaacgaagtgatcgcccgggtgcgaatgtgggtgaacctgaacctgtggcagaagctgaagctaagcagagatgatgccaagcctctgctgagactgaagggattcccttcctttcctctggtcgagagacaggccaacgaagtggactggtgggacatggtgtgtaacgtgaagaagctgatcaacgagaaaaaggaggatggcaaggtgttttggcagaatctggctggctacaagagacaggaagccctgagaccatacctgagcagcgaggaagatcggaagaagggaaagaaattcgctcggtaccagctgggcgacctgctgctgcacctggaaaagaagcacggcgaggactggggaaaggtgtacgacgaggcctgggagcggattgacaagaaagtggaaggcctgagcaagcacatcaagctggaagaggaacggagaagcgaggacgcccagagcaaggccgccctgaccgactggctgcgggctaaggccagcttcgtgatcgagggcctgaaggaggccgacaaggacgagttctgcagatgcgagctgaagctgcagaagtggtacggggacctgcggggaaagcccttcgccatcgaagccgagaacagcatcctggacatcagcggcttcagcaagcagtacaactgtgccttcatctggcagaaggacggcgtgaagaagctgaacctgtacctgatcatcaactacttcaagggcggcaagctgcggttcaagaagatcaaacctgaagccttcgaagccaacagattctacaccgtgatcaacaaaaagagcggcgagatcgtgcccatggaggtgaacttcaacttcgacgaccccaacctgatcatcctgcctctggcctttggcaagagacagggcagagaattcatctggaacgacctgctgtccctggaaaccggcagcctgaagctggccaacggaagagtgatcgagaagacactgtacaacagaagaacccggcaggatgagcctgccctgttcgtggccctgaccttcgagcggcgggaggtcctggactcctccaatatcaaaccaatgaacctgatcggcgtggcaagaggcgaaaacatccccgccgtgatcgccctgaccgaccccgagggctgcccactgagccggtttaaggatagcctgggaaacccaacccacatcctgagaatcggcgagagctataaggagaagcagcggaccatccaggccaagaaggaggtggagcagcggagagccggcggctacagccggaagtacgccagcaaagccaagaatctggcagacgatatggtgagaaacaccgctagagatctgctgtactacgccgtgacccaggatgccatgctgatcttcgccaacctgagccggggcttcggccggcagggcaagcggaccttcatggccgagagacagtacacacggatggaggactggctgaccgccaagctggcctacgagggcctgagcaagacctacctgtccaagacactggcccagtacacctccaagacatgcagcaactgtgggtttaccatcaccagcgccgactacgacagggtgctggagaagctgaagaagacagcaacaggctggatgaccacaattaacggcaaggagctgaaggtggagggccagattacctactacaacagatacaagagacagaacgtagtcaaggacctgtccgtcgagctggatagactgagcgaagaatctgtgaacaacgacatctcctcctggacaaagggcagaagcggagaagctctgagcctcctgaagaaaagattctcccatagacccgtgcaggagaagttcgtgtgcctgaactgcggcttcgagacacacgcagccgagcaagccgccctgaacatcgccagatcctggctgttcctgcggagccaggagtacaagaaataccagacaaacaagacaaccggcaacaccgataagagagccttcgtcgagacctggcagtccttttaccggaagaagcttaaggaggtgtggaaacctgccgtgcggtctggcggatctggcggaggctccacaagcatggccggcgaggccgaggcccagctggaccccagcctgcagggcctggtgatgttcgaggacgtgaccgtgtacttcagcagggaggagtggggcctgctgaacgtgacccagaagggcctgtacagggacgtgatgctggagaacttcgccctggtgagcagcctgggcctggcccccagcaggagccccgtgttcacccagctggaggacgacgagcagagctgggtgcccaactgggtgaccagccccaagaaaaagagaaaagtctaagctgccttctgcggggcttgccttctggccatgcccttcttctctcccttgcacctgtacctcttggtctttgaataaagcctgagtaggaaggctagcaaaaaaaaaaaaaaaaaaaaaaaaaaaaaaaaaaaaaaaaaaaaaaaaaaaaaaaaaaaaaaaaaaaaaaaaaaaaaaaa

SEQ ID NO: 6069 - RNA, 5797 nt, synthetic construct
  source 1..5797: mol_type = other RNA
aggaaataagagagaaaagaagagtaagaagaaatataagagccaccatggcccctaagaagaagcgtaaagtgagccggatggaacgcctcgtctacgaggtgcggcagaagtgcagaaacatcgaggacatctgcatctcctgcggatctctgaacgtgaccctggagcacccactgttcatcggcggcatgtgccagaactgtaaaaactgttttctggagtgtgcctatcaatacgacgatgacggctaccagagctactgcaccatctgttgcggcggaagagaggtgctgatgtgtggaaataacaactgctgccggtgcttctgcgtggaatgcgtggacctgctggtgggccccggcgccgcccaggccgctattaaggaagatccttggaactgctacatgtgcggccacaagggcacatacggcctgctgagacggagagaggactggcctagcagactgcagatgttcttcgccaataaccacgaccaggagttcgacccccctaaggtgtaccctcccgtccccgccgagaagagaaagcccatccgggtcctgagcctgttcgatggcatcgccaccggtctgctggtgctgaaggacctgggcatccaggtggataggtacattgcctccgaggtgtgcgaggactccatcaccgtgggaatggtgcgtcatcagggcaagatcatgtacgtgggcgacgtgcggagcgtgacacagaagcatatccaggagtggggccctttcgacctggtgatcggcggcagcccttgcaatgacctgagcatcgtgaacccagcccggaagggcctgtacgagggaaccggcagactgttcttcgagttttacagactgctgcacgacgcccggcctaaggaaggcgacgaccggcccttcttttggctgttcgagaatgtggtggccatgggagtcagcgacaagcgggatattagccggttcctggagagcaaccccgtgatgatcgatgccaaggaagtgagcgccgcccaccgggccagatacttctggggcaatctgcctggcatgaacagacccctggccagcaccgtgaacgacaagctggagctgcaggagtgcctggagcacggccggatcgccaagttcagcaaggtgagaaccatcaccacccgaagcaacagcatcaaacaaggcaaggaccagcactttcctgtgttcatgaacgagaaggaggacatcctgtggtgtaccgagatggagagagtgttcgggttcccagtccactacacagatgtcagcaacatgtctagactggccagacagagactgctgggaagaagctggtccgtccctgtgatcagacacctgttcgcccctctgaaggagtacttcgcctgcgtgagcagcggcaacagcaacgccaacagccggggccccagcttctctagcggcctggtgccactgtccctgagagggagccacatgggccccatggagatctacaaaaccgtgagcgcctggaagcggcagcctgtgcgcgtgctgagcctgtttcggaatatcgataaagtcctgaaaagcctgggattcctggagagcggctctggctccggcggtggcaccctgaagtacgtggaggatgtgacaaacgtggtcagacgggatgtggagaagtggggccccttcgatctggtgtacggcagcacccaacccctgggcagctcttgtgaccggtgccctggctggtacatgtttcagttccaccggatcctgcagtacgccctgccgagacaggagtcccagcggccattcttttggattttcatggacaacttgctgctgaccgaggatgaccaggaaactaccactcggttcctgcagaccgaagccgtgaccctgcaggacgtgagaggccgggactaccagaacgccatgcgggtgtggtccaacatccctggactgaaaagcaagcacgcacctctgacccctaaagaagaggagtacctgcaggcccaggtgcggagcagaagcaagctggacgcccctaaggtggatctgctggtgaagaattgcctcctgcccctgagagagtacttcaagtatttcagccagaatagtctgcccctgggcggcccaagcagcggcgcccctcctcccagcggcggcagcccagccggctccccaacctctaccgaggagggcacctctgagtccgccacccccgagagcggccctggcacctccaccgagcccagcgagggcagcgcacccggcagccctgccggcagccccacctccacagaggagggaaccagcaccgagcccagcgaaggcagcgccccaggcaccagcaccgagcctagtgagggcggctctggcggcggcagcgcccaggagattaaacggatcaacaagatcagaagaagacttgtgaaagacagcaacaccaagaaggccggcaagacaggccccatgaaaaccctgctggttagagtgatgacacccgatctgagagagcggctggaaaacctgagaaagaagcctgaaaatatcccccagcccatcagcaatacatctagagccaacctgaataagctgctgaccgattacaccgaaatgaagaaggcgatcctgcatgtgtactgggaagagttccagaaggaccctgtgggcctgatgagccgggtggcccagcctgccagcaagaagatcgatcagaacaagctgaaacctgagatggacgagaagggcaacctgaccaccgccggctttgcctgctctcagtgtggccagcccctgttcgtgtacaagctggagcaggtgtctgagaagggcaaggcttacaccaactacttcggacggtgcaatgtggccgagcacgaaaagctgatcctgctggcccagctgaagcccgagaaggatagcgacgaagccgtgacatatagcctgggaaagtttgggcagagggccctggatttctacagcattcatgtgaccaaggagtccacccaccccgtgaagcccctggcccagatcgccggaaacagatacgcctccggacctgtgggaaaggccctgagcgacgcatgtatgggcacaatcgcctccttcctgtctaagtaccaggacatcatcatcgaacaccagaaggtggtgaagggcaaccagaagagactggagagcctgcgggagctggccggcaaggaaaacctggaataccctagcgtgaccctgccacctcagcctcacaccaaggagggcgttgatgcctacaacgaagtgatcgcccgggtgcgaatgtgggtgaacctgaacctgtggcagaagctgaagctaagcagagatgatgccaagcctctgctgagactgaagggattcccttcctttcctctggtcgagagacaggccaacgaagtggactggtgggacatggtgtgtaacgtgaagaagctgatcaacgagaaaaaggaggatggcaaggtgttttggcagaatctggctggctacaagagacaggaagccctgagaccatacctgagcagcgaggaagatcggaagaagggaaagaaattcgctcggtaccagctgggcgacctgctgctgcacctggaaaagaagcacggcgaggactggggaaaggtgtacgacgaggcctgggagcggattgacaagaaagtggaaggcctgagcaagcacatcaagctggaagaggaacggagaagcgaggacgcccagagcaaggccgccctgaccgactggctgcgggctaaggccagcttcgtgatcgagggcctgaaggaggccgacaaggacgagttctgcagatgcgagctgaagctgcagaagtggtacggggacctgcggggaaagcccttcgccatcgaagccgagaacagcatcctggacatcagcggcttcagcaagcagtacaactgtgccttcatctggcagaaggacggcgtgaagaagctgaacctgtacctgatcatcaactacttcaagggcggcaagctgcggttcaagaagatcaaacctgaagccttcgaagccaacagattctacaccgtgatcaacaaaaagagcggcgagatcgtgcccatggaggtgaacttcaacttcgacgaccccaacctgatcatcctgcctctggcctttggcaagagacagggcagagaattcatctggaacgacctgctgtccctggaaaccggcagcctgaagctggccaacggaagagtgatcgagaagacactgtacaacagaagaacccggcaggatgagcctgccctgttcgtggccctgaccttcgagcggcgggaggtcctggactcctccaatatcaaaccaatgaacctgatcggcgtggcaagaggcgaaaacatccccgccgtgatcgccctgaccgaccccgagggctgcccactgagccggtttaaggatagcctgggaaacccaacccacatcctgagaatcggcgagagctataaggagaagcagcggaccatccaggccaagaaggaggtggagcagcggagagccggcggctacagccggaagtacgccagcaaagccaagaatctggcagacgatatggtgagaaacaccgctagagatctgctgtactacgccgtgacccaggatgccatgctgatcttcgccaacctgagccggggcttcggccggcagggcaagcggaccttcatggccgagagacagtacacacggatggaggactggctgaccgccaagctggcctacgagggcctgagcaagacctacctgtccaagacactggcccagtacacctccaagacatgcagcaactgtgggtttaccatcaccagcgccgactacgacagggtgctggagaagctgaagaagacagcaacaggctggatgaccacaattaacggcaaggagctgaaggtggagggccagattacctactacaacagatacaagagacagaacgtagtcaaggacctgtccgtcgagctggatagactgagcgaagaatctgtgaacaacgacatctcctcctggacaaagggcagaagcggagaagctctgagcctcctgaagaaaagattctcccatagacccgtgcaggagaagttcgtgtgcctgaactgcggcttcgagacacacgcagccgagcaagccgccctgaacatcgccagatcctggctgttcctgcggagccaggagtacaagaaataccagacaaacaagacaaccggcaacaccgataagagagccttcgtcgagacctggcagtccttttaccggaagaagcttaaggaggtgtggaaacctgccgtgcggtctggcggatctggcggaggctccacaagccaggagcccgtgaccttcgaggacgtggccgtgtacttcacccagaaccagtgggccaagctggaccccacccagagggccctgtacagggaggtgatgctggagaactacgccaacgtggccagcctgggcgtggccttccccttccccaagcccgacctggtgagccagctggagaggggcgaggtgccctggggccccgacccctgggaggccgaggtgctgaggggcatctgccccggcaccagccccaagaaaaagagaaaagtctaagctgccttctgcggggcttgccttctggccatgcccttcttctctcccttgcacctgtacctcttggtctttgaataaagcctgagtaggaaggctagcaaaaaaaaaaaaaaaaaaaaaaaaaaaaaaaaaaaaaaaaaaaaaaaaaaaaaaaaaaaaaaaaaaaaaaaaaaaaaaaa

SEQ ID NO: 6070 - RNA, 5797 nt, synthetic construct
  source 1..5797: mol_type = other RNA
aggaaataagagagaaaagaagagtaagaagaaatataagagccaccatggcccctaagaagaagcgtaaagtgagccggatggaacgcctcgtctacgaggtgcggcagaagtgcagaaacatcgaggacatctgcatctcctgcggatctctgaacgtgaccctggagcacccactgttcatcggcggcatgtgccagaactgtaaaaactgttttctggagtgtgcctatcaatacgacgatgacggctaccagagctactgcaccatctgttgcggcggaagagaggtgctgatgtgtggaaataacaactgctgccggtgcttctgcgtggaatgcgtggacctgctggtgggccccggcgccgcccaggccgctattaaggaagatccttggaactgctacatgtgcggccacaagggcacatacggcctgctgagacggagagaggactggcctagcagactgcagatgttcttcgccaataaccacgaccaggagttcgacccccctaaggtgtaccctcccgtccccgccgagaagagaaagcccatccgggtcctgagcctgttcgatggcatcgccaccggtctgctggtgctgaaggacctgggcatccaggtggataggtacattgcctccgaggtgtgcgaggactccatcaccgtgggaatggtgcgtcatcagggcaagatcatgtacgtgggcgacgtgcggagcgtgacacagaagcatatccaggagtggggccctttcgacctggtgatcggcggcagcccttgcaatgacctgagcatcgtgaacccagcccggaagggcctgtacgagggaaccggcagactgttcttcgagttttacagactgctgcacgacgcccggcctaaggaaggcgacgaccggcccttcttttggctgttcgagaatgtggtggccatgggagtcagcgacaagcgggatattagccggttcctggagagcaaccccgtgatgatcgatgccaaggaagtgagcgccgcccaccgggccagatacttctggggcaatctgcctggcatgaacagacccctggccagcaccgtgaacgacaagctggagctgcaggagtgcctggagcacggccggatcgccaagttcagcaaggtgagaaccatcaccacccgaagcaacagcatcaaacaaggcaaggaccagcactttcctgtgttcatgaacgagaaggaggacatcctgtggtgtaccgagatggagagagtgttcgggttcccagtccactacacagatgtcagcaacatgtctagactggccagacagagactgctgggaagaagctggtccgtccctgtgatcagacacctgttcgcccctctgaaggagtacttcgcctgcgtgagcagcggcaacagcaacgccaacagccggggccccagcttctctagcggcctggtgccactgtccctgagagggagccacatgggccccatggagatctacaaaaccgtgagcgcctggaagcggcagcctgtgcgcgtgctgagcctgtttcggaatatcgataaagtcctgaaaagcctgggattcctggagagcggctctggctccggcggtggcaccctgaagtacgtggaggatgtgacaaacgtggtcagacgggatgtggagaagtggggccccttcgatctggtgtacggcagcacccaacccctgggcagctcttgtgaccggtgccctggctggtacatgtttcagttccaccggatcctgcagtacgccctgccgagacaggagtcccagcggccattcttttggattttcatggacaacttgctgctgaccgaggatgaccaggaaactaccactcggttcctgcagaccgaagccgtgaccctgcaggacgtgagaggccgggactaccagaacgccatgcgggtgtggtccaacatccctggactgaaaagcaagcacgcacctctgacccctaaagaagaggagtacctgcaggcccaggtgcggagcagaagcaagctggacgcccctaaggtggatctgctggtgaagaattgcctcctgcccctgagagagtacttcaagtatttcagccagaatagtctgcccctgggcggcccaagcagcggcgcccctcctcccagcggcggcagcccagccggctccccaacctctaccgaggagggcacctctgagtccgccacccccgagagcggccctggcacctccaccgagcccagcgagggcagcgcacccggcagccctgccggcagccccacctccacagaggagggaaccagcaccgagcccagcgaaggcagcgccccaggcaccagcaccgagcctagtgagggcggctctggcggcggcagcgcccaggagattaaacggatcaacaagatcagaagaagacttgtgaaagacagcaacaccaagaaggccggcaagacaggccccatgaaaaccctgctggttagagtgatgacacccgatctgagagagcggctggaaaacctgagaaagaagcctgaaaatatcccccagcccatcagcaatacatctagagccaacctgaataagctgctgaccgattacaccgaaatgaagaaggcgatcctgcatgtgtactgggaagagttccagaaggaccctgtgggcctgatgagccgggtggcccagcctgccagcaagaagatcgatcagaacaagctgaaacctgagatggacgagaagggcaacctgaccaccgccggctttgcctgctctcagtgtggccagcccctgttcgtgtacaagctggagcaggtgtctgagaagggcaaggcttacaccaactacttcggacggtgcaatgtggccgagcacgaaaagctgatcctgctggcccagctgaagcccgagaaggatagcgacgaagccgtgacatatagcctgggaaagtttgggcagagggccctggatttctacagcattcatgtgaccaaggagtccacccaccccgtgaagcccctggcccagatcgccggaaacagatacgcctccggacctgtgggaaaggccctgagcgacgcatgtatgggcacaatcgcctccttcctgtctaagtaccaggacatcatcatcgaacaccagaaggtggtgaagggcaaccagaagagactggagagcctgcgggagctggccggcaaggaaaacctggaataccctagcgtgaccctgccacctcagcctcacaccaaggagggcgttgatgcctacaacgaagtgatcgcccgggtgcgaatgtgggtgaacctgaacctgtggcagaagctgaagctaagcagagatgatgccaagcctctgctgagactgaagggattcccttcctttcctctggtcgagagacaggccaacgaagtggactggtgggacatggtgtgtaacgtgaagaagctgatcaacgagaaaaaggaggatggcaaggtgttttggcagaatctggctggctacaagagacaggaagccctgagaccatacctgagcagcgaggaagatcggaagaagggaaagaaattcgctcggtaccagctgggcgacctgctgctgcacctggaaaagaagcacggcgaggactggggaaaggtgtacgacgaggcctgggagcggattgacaagaaagtggaaggcctgagcaagcacatcaagctggaagaggaacggagaagcgaggacgcccagagcaaggccgccctgaccgactggctgcgggctaaggccagcttcgtgatcgagggcctgaaggaggccgacaaggacgagttctgcagatgcgagctgaagctgcagaagtggtacggggacctgcggggaaagcccttcgccatcgaagccgagaacagcatcctggacatcagcggcttcagcaagcagtacaactgtgccttcatctggcagaaggacggcgtgaagaagctgaacctgtacctgatcatcaactacttcaagggcggcaagctgcggttcaagaagatcaaacctgaagccttcgaagccaacagattctacaccgtgatcaacaaaaagagcggcgagatcgtgcccatggaggtgaacttcaacttcgacgaccccaacctgatcatcctgcctctggcctttggcaagagacagggcagagaattcatctggaacgacctgctgtccctggaaaccggcagcctgaagctggccaacggaagagtgatcgagaagacactgtacaacagaagaacccggcaggatgagcctgccctgttcgtggccctgaccttcgagcggcgggaggtcctggactcctccaatatcaaaccaatgaacctgatcggcgtggcaagaggcgaaaacatccccgccgtgatcgccctgaccgaccccgagggctgcccactgagccggtttaaggatagcctgggaaacccaacccacatcctgagaatcggcgagagctataaggagaagcagcggaccatccaggccaagaaggaggtggagcagcggagagccggcggctacagccggaagtacgccagcaaagccaagaatctggcagacgatatggtgagaaacaccgctagagatctgctgtactacgccgtgacccaggatgccatgctgatcttcgccaacctgagccggggcttcggccggcagggcaagcggaccttcatggccgagagacagtacacacggatggaggactggctgaccgccaagctggcctacgagggcctgagcaagacctacctgtccaagacactggcccagtacacctccaagacatgcagcaactgtgggtttaccatcaccagcgccgactacgacagggtgctggagaagctgaagaagacagcaacaggctggatgaccacaattaacggcaaggagctgaaggtggagggccagattacctactacaacagatacaagagacagaacgtagtcaaggacctgtccgtcgagctggatagactgagcgaagaatctgtgaacaacgacatctcctcctggacaaagggcagaagcggagaagctctgagcctcctgaagaaaagattctcccatagacccgtgcaggagaagttcgtgtgcctgaactgcggcttcgagacacacgcagccgagcaagccgccctgaacatcgccagatcctggctgttcctgcggagccaggagtacaagaaataccagacaaacaagacaaccggcaacaccgataagagagccttcgtcgagacctggcagtccttttaccggaagaagcttaaggaggtgtggaaacctgccgtgcggtctggcggatctggcggaggctccacaagcatgaccaagttccaggaggccgtgaccttcaaggacgtggccgtggccttcaccgaggaggagctgggcctgctggacagcgcccagaggaagctgtacagggacgtgatgctggagaacttcaggaacctggtgagcgtgggccaccagagcttcaagcccgacgtgatcagccagctggagagggaggagaagctgtggatgaaggagctgcagacccagaggggcaagcacagcgagaccaccagccccaagaaaaagagaaaagtctaagctgccttctgcggggcttgccttctggccatgcccttcttctctcccttgcacctgtacctcttggtctttgaataaagcctgagtaggaaggctagcaaaaaaaaaaaaaaaaaaaaaaaaaaaaaaaaaaaaaaaaaaaaaaaaaaaaaaaaaaaaaaaaaaaaaaaaaaaaaaaa

SEQ ID NO: 6071 - RNA, 5797 nt, synthetic construct
  source 1..5797: mol_type = other RNA
aggaaataagagagaaaagaagagtaagaagaaatataagagccaccatggcccctaagaagaagcgtaaagtgagccggatggaacgcctcgtctacgaggtgcggcagaagtgcagaaacatcgaggacatctgcatctcctgcggatctctgaacgtgaccctggagcacccactgttcatcggcggcatgtgccagaactgtaaaaactgttttctggagtgtgcctatcaatacgacgatgacggctaccagagctactgcaccatctgttgcggcggaagagaggtgctgatgtgtggaaataacaactgctgccggtgcttctgcgtggaatgcgtggacctgctggtgggccccggcgccgcccaggccgctattaaggaagatccttggaactgctacatgtgcggccacaagggcacatacggcctgctgagacggagagaggactggcctagcagactgcagatgttcttcgccaataaccacgaccaggagttcgacccccctaaggtgtaccctcccgtccccgccgagaagagaaagcccatccgggtcctgagcctgttcgatggcatcgccaccggtctgctggtgctgaaggacctgggcatccaggtggataggtacattgcctccgaggtgtgcgaggactccatcaccgtgggaatggtgcgtcatcagggcaagatcatgtacgtgggcgacgtgcggagcgtgacacagaagcatatccaggagtggggccctttcgacctggtgatcggcggcagcccttgcaatgacctgagcatcgtgaacccagcccggaagggcctgtacgagggaaccggcagactgttcttcgagttttacagactgctgcacgacgcccggcctaaggaaggcgacgaccggcccttcttttggctgttcgagaatgtggtggccatgggagtcagcgacaagcgggatattagccggttcctggagagcaaccccgtgatgatcgatgccaaggaagtgagcgccgcccaccgggccagatacttctggggcaatctgcctggcatgaacagacccctggccagcaccgtgaacgacaagctggagctgcaggagtgcctggagcacggccggatcgccaagttcagcaaggtgagaaccatcaccacccgaagcaacagcatcaaacaaggcaaggaccagcactttcctgtgttcatgaacgagaaggaggacatcctgtggtgtaccgagatggagagagtgttcgggttcccagtccactacacagatgtcagcaacatgtctagactggccagacagagactgctgggaagaagctggtccgtccctgtgatcagacacctgttcgcccctctgaaggagtacttcgcctgcgtgagcagcggcaacagcaacgccaacagccggggccccagcttctctagcggcctggtgccactgtccctgagagggagccacatgggccccatggagatctacaaaaccgtgagcgcctggaagcggcagcctgtgcgcgtgctgagcctgtttcggaatatcgataaagtcctgaaaagcctgggattcctggagagcggctctggctccggcggtggcaccctgaagtacgtggaggatgtgacaaacgtggtcagacgggatgtggagaagtggggccccttcgatctggtgtacggcagcacccaacccctgggcagctcttgtgaccggtgccctggctggtacatgtttcagttccaccggatcctgcagtacgccctgccgagacaggagtcccagcggccattcttttggattttcatggacaacttgctgctgaccgaggatgaccaggaaactaccactcggttcctgcagaccgaagccgtgaccctgcaggacgtgagaggccgggactaccagaacgccatgcgggtgtggtccaacatccctggactgaaaagcaagcacgcacctctgacccctaaagaagaggagtacctgcaggcccaggtgcggagcagaagcaagctggacgcccctaaggtggatctgctggtgaagaattgcctcctgcccctgagagagtacttcaagtatttcagccagaatagtctgcccctgggcggcccaagcagcggcgcccctcctcccagcggcggcagcccagccggctccccaacctctaccgaggagggcacctctgagtccgccacccccgagagcggccctggcacctccaccgagcccagcgagggcagcgcacccggcagccctgccggcagccccacctccacagaggagggaaccagcaccgagcccagcgaaggcagcgccccaggcaccagcaccgagcctagtgagggcggctctggcggcggcagcgcccaggagattaaacggatcaacaagatcagaagaagacttgtgaaagacagcaacaccaagaaggccggcaagacaggccccatgaaaaccctgctggttagagtgatgacacccgatctgagagagcggctggaaaacctgagaaagaagcctgaaaatatcccccagcccatcagcaatacatctagagccaacctgaataagctgctgaccgattacaccgaaatgaagaaggcgatcctgcatgtgtactgggaagagttccagaaggaccctgtgggcctgatgagccgggtggcccagcctgccagcaagaagatcgatcagaacaagctgaaacctgagatggacgagaagggcaacctgaccaccgccggctttgcctgctctcagtgtggccagcccctgttcgtgtacaagctggagcaggtgtctgagaagggcaaggcttacaccaactacttcggacggtgcaatgtggccgagcacgaaaagctgatcctgctggcccagctgaagcccgagaaggatagcgacgaagccgtgacatatagcctgggaaagtttgggcagagggccctggatttctacagcattcatgtgaccaaggagtccacccaccccgtgaagcccctggcccagatcgccggaaacagatacgcctccggacctgtgggaaaggccctgagcgacgcatgtatgggcacaatcgcctccttcctgtctaagtaccaggacatcatcatcgaacaccagaaggtggtgaagggcaaccagaagagactggagagcctgcgggagctggccggcaaggaaaacctggaataccctagcgtgaccctgccacctcagcctcacaccaaggagggcgttgatgcctacaacgaagtgatcgcccgggtgcgaatgtgggtgaacctgaacctgtggcagaagctgaagctaagcagagatgatgccaagcctctgctgagactgaagggattcccttcctttcctctggtcgagagacaggccaacgaagtggactggtgggacatggtgtgtaacgtgaagaagctgatcaacgagaaaaaggaggatggcaaggtgttttggcagaatctggctggctacaagagacaggaagccctgagaccatacctgagcagcgaggaagatcggaagaagggaaagaaattcgctcggtaccagctgggcgacctgctgctgcacctggaaaagaagcacggcgaggactggggaaaggtgtacgacgaggcctgggagcggattgacaagaaagtggaaggcctgagcaagcacatcaagctggaagaggaacggagaagcgaggacgcccagagcaaggccgccctgaccgactggctgcgggctaaggccagcttcgtgatcgagggcctgaaggaggccgacaaggacgagttctgcagatgcgagctgaagctgcagaagtggtacggggacctgcggggaaagcccttcgccatcgaagccgagaacagcatcctggacatcagcggcttcagcaagcagtacaactgtgccttcatctggcagaaggacggcgtgaagaagctgaacctgtacctgatcatcaactacttcaagggcggcaagctgcggttcaagaagatcaaacctgaagccttcgaagccaacagattctacaccgtgatcaacaaaaagagcggcgagatcgtgcccatggaggtgaacttcaacttcgacgaccccaacctgatcatcctgcctctggcctttggcaagagacagggcagagaattcatctggaacgacctgctgtccctggaaaccggcagcctgaagctggccaacggaagagtgatcgagaagacactgtacaacagaagaacccggcaggatgagcctgccctgttcgtggccctgaccttcgagcggcgggaggtcctggactcctccaatatcaaaccaatgaacctgatcggcgtggcaagaggcgaaaacatccccgccgtgatcgccctgaccgaccccgagggctgcccactgagccggtttaaggatagcctgggaaacccaacccacatcctgagaatcggcgagagctataaggagaagcagcggaccatccaggccaagaaggaggtggagcagcggagagccggcggctacagccggaagtacgccagcaaagccaagaatctggcagacgatatggtgagaaacaccgctagagatctgctgtactacgccgtgacccaggatgccatgctgatcttcgccaacctgagccggggcttcggccggcagggcaagcggaccttcatggccgagagacagtacacacggatggaggactggctgaccgccaagctggcctacgagggcctgagcaagacctacctgtccaagacactggcccagtacacctccaagacatgcagcaactgtgggtttaccatcaccagcgccgactacgacagggtgctggagaagctgaagaagacagcaacaggctggatgaccacaattaacggcaaggagctgaaggtggagggccagattacctactacaacagatacaagagacagaacgtagtcaaggacctgtccgtcgagctggatagactgagcgaagaatctgtgaacaacgacatctcctcctggacaaagggcagaagcggagaagctctgagcctcctgaagaaaagattctcccatagacccgtgcaggagaagttcgtgtgcctgaactgcggcttcgagacacacgcagccgagcaagccgccctgaacatcgccagatcctggctgttcctgcggagccaggagtacaagaaataccagacaaacaagacaaccggcaacaccgataagagagccttcgtcgagacctggcagtccttttaccggaagaagcttaaggaggtgtggaaacctgccgtgcggtctggcggatctggcggaggctccacaagcatgaacgccgtgacctacgaggacgtgcacgtgaacttcacccaggaggagtgggccctgctggaccccagccagaagaagctgtacaaggacgtgatgctggagacctacaggaacctgaacgccatcggcttcaactgggacagcaagatcttcaagaacatcgtgcaggtgctggaggacaccgagggcatgaaggaggtgagggtgcagaggaagaggctgaacatcctgaacgtgatcaccagccccaagaaaaagagaaaagtctaagctgccttctgcggggcttgccttctggccatgcccttcttctctcccttgcacctgtacctcttggtctttgaataaagcctgagtaggaaggctagcaaaaaaaaaaaaaaaaaaaaaaaaaaaaaaaaaaaaaaaaaaaaaaaaaaaaaaaaaaaaaaaaaaaaaaaaaaaaaaaa

SEQ ID NO: 6072 - RNA, 5797 nt, synthetic construct
  source 1..5797: mol_type = other RNA
aggaaataagagagaaaagaagagtaagaagaaatataagagccaccatggcccctaagaagaagcgtaaagtgagccggatggaacgcctcgtctacgaggtgcggcagaagtgcagaaacatcgaggacatctgcatctcctgcggatctctgaacgtgaccctggagcacccactgttcatcggcggcatgtgccagaactgtaaaaactgttttctggagtgtgcctatcaatacgacgatgacggctaccagagctactgcaccatctgttgcggcggaagagaggtgctgatgtgtggaaataacaactgctgccggtgcttctgcgtggaatgcgtggacctgctggtgggccccggcgccgcccaggccgctattaaggaagatccttggaactgctacatgtgcggccacaagggcacatacggcctgctgagacggagagaggactggcctagcagactgcagatgttcttcgccaataaccacgaccaggagttcgacccccctaaggtgtaccctcccgtccccgccgagaagagaaagcccatccgggtcctgagcctgttcgatggcatcgccaccggtctgctggtgctgaaggacctgggcatccaggtggataggtacattgcctccgaggtgtgcgaggactccatcaccgtgggaatggtgcgtcatcagggcaagatcatgtacgtgggcgacgtgcggagcgtgacacagaagcatatccaggagtggggccctttcgacctggtgatcggcggcagcccttgcaatgacctgagcatcgtgaacccagcccggaagggcctgtacgagggaaccggcagactgttcttcgagttttacagactgctgcacgacgcccggcctaaggaaggcgacgaccggcccttcttttggctgttcgagaatgtggtggccatgggagtcagcgacaagcgggatattagccggttcctggagagcaaccccgtgatgatcgatgccaaggaagtgagcgccgcccaccgggccagatacttctggggcaatctgcctggcatgaacagacccctggccagcaccgtgaacgacaagctggagctgcaggagtgcctggagcacggccggatcgccaagttcagcaaggtgagaaccatcaccacccgaagcaacagcatcaaacaaggcaaggaccagcactttcctgtgttcatgaacgagaaggaggacatcctgtggtgtaccgagatggagagagtgttcgggttcccagtccactacacagatgtcagcaacatgtctagactggccagacagagactgctgggaagaagctggtccgtccctgtgatcagacacctgttcgcccctctgaaggagtacttcgcctgcgtgagcagcggcaacagcaacgccaacagccggggccccagcttctctagcggcctggtgccactgtccctgagagggagccacatgggccccatggagatctacaaaaccgtgagcgcctggaagcggcagcctgtgcgcgtgctgagcctgtttcggaatatcgataaagtcctgaaaagcctgggattcctggagagcggctctggctccggcggtggcaccctgaagtacgtggaggatgtgacaaacgtggtcagacgggatgtggagaagtggggccccttcgatctggtgtacggcagcacccaacccctgggcagctcttgtgaccggtgccctggctggtacatgtttcagttccaccggatcctgcagtacgccctgccgagacaggagtcccagcggccattcttttggattttcatggacaacttgctgctgaccgaggatgaccaggaaactaccactcggttcctgcagaccgaagccgtgaccctgcaggacgtgagaggccgggactaccagaacgccatgcgggtgtggtccaacatccctggactgaaaagcaagcacgcacctctgacccctaaagaagaggagtacctgcaggcccaggtgcggagcagaagcaagctggacgcccctaaggtggatctgctggtgaagaattgcctcctgcccctgagagagtacttcaagtatttcagccagaatagtctgcccctgggcggcccaagcagcggcgcccctcctcccagcggcggcagcccagccggctccccaacctctaccgaggagggcacctctgagtccgccacccccgagagcggccctggcacctccaccgagcccagcgagggcagcgcacccggcagccctgccggcagccccacctccacagaggagggaaccagcaccgagcccagcgaaggcagcgccccaggcaccagcaccgagcctagtgagggcggctctggcggcggcagcgcccaggagattaaacggatcaacaagatcagaagaagacttgtgaaagacagcaacaccaagaaggccggcaagacaggccccatgaaaaccctgctggttagagtgatgacacccgatctgagagagcggctggaaaacctgagaaagaagcctgaaaatatcccccagcccatcagcaatacatctagagccaacctgaataagctgctgaccgattacaccgaaatgaagaaggcgatcctgcatgtgtactgggaagagttccagaaggaccctgtgggcctgatgagccgggtggcccagcctgccagcaagaagatcgatcagaacaagctgaaacctgagatggacgagaagggcaacctgaccaccgccggctttgcctgctctcagtgtggccagcccctgttcgtgtacaagctggagcaggtgtctgagaagggcaaggcttacaccaactacttcggacggtgcaatgtggccgagcacgaaaagctgatcctgctggcccagctgaagcccgagaaggatagcgacgaagccgtgacatatagcctgggaaagtttgggcagagggccctggatttctacagcattcatgtgaccaaggagtccacccaccccgtgaagcccctggcccagatcgccggaaacagatacgcctccggacctgtgggaaaggccctgagcgacgcatgtatgggcacaatcgcctccttcctgtctaagtaccaggacatcatcatcgaacaccagaaggtggtgaagggcaaccagaagagactggagagcctgcgggagctggccggcaaggaaaacctggaataccctagcgtgaccctgccacctcagcctcacaccaaggagggcgttgatgcctacaacgaagtgatcgcccgggtgcgaatgtgggtgaacctgaacctgtggcagaagctgaagctaagcagagatgatgccaagcctctgctgagactgaagggattcccttcctttcctctggtcgagagacaggccaacgaagtggactggtgggacatggtgtgtaacgtgaagaagctgatcaacgagaaaaaggaggatggcaaggtgttttggcagaatctggctggctacaagagacaggaagccctgagaccatacctgagcagcgaggaagatcggaagaagggaaagaaattcgctcggtaccagctgggcgacctgctgctgcacctggaaaagaagcacggcgaggactggggaaaggtgtacgacgaggcctgggagcggattgacaagaaagtggaaggcctgagcaagcacatcaagctggaagaggaacggagaagcgaggacgcccagagcaaggccgccctgaccgactggctgcgggctaaggccagcttcgtgatcgagggcctgaaggaggccgacaaggacgagttctgcagatgcgagctgaagctgcagaagtggtacggggacctgcggggaaagcccttcgccatcgaagccgagaacagcatcctggacatcagcggcttcagcaagcagtacaactgtgccttcatctggcagaaggacggcgtgaagaagctgaacctgtacctgatcatcaactacttcaagggcggcaagctgcggttcaagaagatcaaacctgaagccttcgaagccaacagattctacaccgtgatcaacaaaaagagcggcgagatcgtgcccatggaggtgaacttcaacttcgacgaccccaacctgatcatcctgcctctggcctttggcaagagacagggcagagaattcatctggaacgacctgctgtccctggaaaccggcagcctgaagctggccaacggaagagtgatcgagaagacactgtacaacagaagaacccggcaggatgagcctgccctgttcgtggccctgaccttcgagcggcgggaggtcctggactcctccaatatcaaaccaatgaacctgatcggcgtggcaagaggcgaaaacatccccgccgtgatcgccctgaccgaccccgagggctgcccactgagccggtttaaggatagcctgggaaacccaacccacatcctgagaatcggcgagagctataaggagaagcagcggaccatccaggccaagaaggaggtggagcagcggagagccggcggctacagccggaagtacgccagcaaagccaagaatctggcagacgatatggtgagaaacaccgctagagatctgctgtactacgccgtgacccaggatgccatgctgatcttcgccaacctgagccggggcttcggccggcagggcaagcggaccttcatggccgagagacagtacacacggatggaggactggctgaccgccaagctggcctacgagggcctgagcaagacctacctgtccaagacactggcccagtacacctccaagacatgcagcaactgtgggtttaccatcaccagcgccgactacgacagggtgctggagaagctgaagaagacagcaacaggctggatgaccacaattaacggcaaggagctgaaggtggagggccagattacctactacaacagatacaagagacagaacgtagtcaaggacctgtccgtcgagctggatagactgagcgaagaatctgtgaacaacgacatctcctcctggacaaagggcagaagcggagaagctctgagcctcctgaagaaaagattctcccatagacccgtgcaggagaagttcgtgtgcctgaactgcggcttcgagacacacgcagccgagcaagccgccctgaacatcgccagatcctggctgttcctgcggagccaggagtacaagaaataccagacaaacaagacaaccggcaacaccgataagagagccttcgtcgagacctggcagtccttttaccggaagaagcttaaggaggtgtggaaacctgccgtgcggtctggcggatctggcggaggctccacaagcatggtgaccttcgaggacgtggccgtgcacttcaccaagaccgagtggaccggcctgagccccgcccagagggccctgtacaggagcgtgatgctggagaacttcggcaacctgaccgccctgggctaccccgtgcccaagcccgccctgatcagcctgctggagggcggcgacatggcctggggcctggaggcccaggacgacccccccgccgagaccaccaagaacgtgaggaaggacgtgaccagccccaagaaaaagagaaaagtctaagctgccttctgcggggcttgccttctggccatgcccttcttctctcccttgcacctgtacctcttggtctttgaataaagcctgagtaggaaggctagcaaaaaaaaaaaaaaaaaaaaaaaaaaaaaaaaaaaaaaaaaaaaaaaaaaaaaaaaaaaaaaaaaaaaaaaaaaaaaaaa

SEQ ID NO: 6073 - RNA, 5797 nt, synthetic construct
  source 1..5797: mol_type = other RNA
aggaaataagagagaaaagaagagtaagaagaaatataagagccaccatggcccctaagaagaagcgtaaagtgagccggatggaacgcctcgtctacgaggtgcggcagaagtgcagaaacatcgaggacatctgcatctcctgcggatctctgaacgtgaccctggagcacccactgttcatcggcggcatgtgccagaactgtaaaaactgttttctggagtgtgcctatcaatacgacgatgacggctaccagagctactgcaccatctgttgcggcggaagagaggtgctgatgtgtggaaataacaactgctgccggtgcttctgcgtggaatgcgtggacctgctggtgggccccggcgccgcccaggccgctattaaggaagatccttggaactgctacatgtgcggccacaagggcacatacggcctgctgagacggagagaggactggcctagcagactgcagatgttcttcgccaataaccacgaccaggagttcgacccccctaaggtgtaccctcccgtccccgccgagaagagaaagcccatccgggtcctgagcctgttcgatggcatcgccaccggtctgctggtgctgaaggacctgggcatccaggtggataggtacattgcctccgaggtgtgcgaggactccatcaccgtgggaatggtgcgtcatcagggcaagatcatgtacgtgggcgacgtgcggagcgtgacacagaagcatatccaggagtggggccctttcgacctggtgatcggcggcagcccttgcaatgacctgagcatcgtgaacccagcccggaagggcctgtacgagggaaccggcagactgttcttcgagttttacagactgctgcacgacgcccggcctaaggaaggcgacgaccggcccttcttttggctgttcgagaatgtggtggccatgggagtcagcgacaagcgggatattagccggttcctggagagcaaccccgtgatgatcgatgccaaggaagtgagcgccgcccaccgggccagatacttctggggcaatctgcctggcatgaacagacccctggccagcaccgtgaacgacaagctggagctgcaggagtgcctggagcacggccggatcgccaagttcagcaaggtgagaaccatcaccacccgaagcaacagcatcaaacaaggcaaggaccagcactttcctgtgttcatgaacgagaaggaggacatcctgtggtgtaccgagatggagagagtgttcgggttcccagtccactacacagatgtcagcaacatgtctagactggccagacagagactgctgggaagaagctggtccgtccctgtgatcagacacctgttcgcccctctgaaggagtacttcgcctgcgtgagcagcggcaacagcaacgccaacagccggggccccagcttctctagcggcctggtgccactgtccctgagagggagccacatgggccccatggagatctacaaaaccgtgagcgcctggaagcggcagcctgtgcgcgtgctgagcctgtttcggaatatcgataaagtcctgaaaagcctgggattcctggagagcggctctggctccggcggtggcaccctgaagtacgtggaggatgtgacaaacgtggtcagacgggatgtggagaagtggggccccttcgatctggtgtacggcagcacccaacccctgggcagctcttgtgaccggtgccctggctggtacatgtttcagttccaccggatcctgcagtacgccctgccgagacaggagtcccagcggccattcttttggattttcatggacaacttgctgctgaccgaggatgaccaggaaactaccactcggttcctgcagaccgaagccgtgaccctgcaggacgtgagaggccgggactaccagaacgccatgcgggtgtggtccaacatccctggactgaaaagcaagcacgcacctctgacccctaaagaagaggagtacctgcaggcccaggtgcggagcagaagcaagctggacgcccctaaggtggatctgctggtgaagaattgcctcctgcccctgagagagtacttcaagtatttcagccagaatagtctgcccctgggcggcccaagcagcggcgcccctcctcccagcggcggcagcccagccggctccccaacctctaccgaggagggcacctctgagtccgccacccccgagagcggccctggcacctccaccgagcccagcgagggcagcgcacccggcagccctgccggcagccccacctccacagaggagggaaccagcaccgagcccagcgaaggcagcgccccaggcaccagcaccgagcctagtgagggcggctctggcggcggcagcgcccaggagattaaacggatcaacaagatcagaagaagacttgtgaaagacagcaacaccaagaaggccggcaagacaggccccatgaaaaccctgctggttagagtgatgacacccgatctgagagagcggctggaaaacctgagaaagaagcctgaaaatatcccccagcccatcagcaatacatctagagccaacctgaataagctgctgaccgattacaccgaaatgaagaaggcgatcctgcatgtgtactgggaagagttccagaaggaccctgtgggcctgatgagccgggtggcccagcctgccagcaagaagatcgatcagaacaagctgaaacctgagatggacgagaagggcaacctgaccaccgccggctttgcctgctctcagtgtggccagcccctgttcgtgtacaagctggagcaggtgtctgagaagggcaaggcttacaccaactacttcggacggtgcaatgtggccgagcacgaaaagctgatcctgctggcccagctgaagcccgagaaggatagcgacgaagccgtgacatatagcctgggaaagtttgggcagagggccctggatttctacagcattcatgtgaccaaggagtccacccaccccgtgaagcccctggcccagatcgccggaaacagatacgcctccggacctgtgggaaaggccctgagcgacgcatgtatgggcacaatcgcctccttcctgtctaagtaccaggacatcatcatcgaacaccagaaggtggtgaagggcaaccagaagagactggagagcctgcgggagctggccggcaaggaaaacctggaataccctagcgtgaccctgccacctcagcctcacaccaaggagggcgttgatgcctacaacgaagtgatcgcccgggtgcgaatgtgggtgaacctgaacctgtggcagaagctgaagctaagcagagatgatgccaagcctctgctgagactgaagggattcccttcctttcctctggtcgagagacaggccaacgaagtggactggtgggacatggtgtgtaacgtgaagaagctgatcaacgagaaaaaggaggatggcaaggtgttttggcagaatctggctggctacaagagacaggaagccctgagaccatacctgagcagcgaggaagatcggaagaagggaaagaaattcgctcggtaccagctgggcgacctgctgctgcacctggaaaagaagcacggcgaggactggggaaaggtgtacgacgaggcctgggagcggattgacaagaaagtggaaggcctgagcaagcacatcaagctggaagaggaacggagaagcgaggacgcccagagcaaggccgccctgaccgactggctgcgggctaaggccagcttcgtgatcgagggcctgaaggaggccgacaaggacgagttctgcagatgcgagctgaagctgcagaagtggtacggggacctgcggggaaagcccttcgccatcgaagccgagaacagcatcctggacatcagcggcttcagcaagcagtacaactgtgccttcatctggcagaaggacggcgtgaagaagctgaacctgtacctgatcatcaactacttcaagggcggcaagctgcggttcaagaagatcaaacctgaagccttcgaagccaacagattctacaccgtgatcaacaaaaagagcggcgagatcgtgcccatggaggtgaacttcaacttcgacgaccccaacctgatcatcctgcctctggcctttggcaagagacagggcagagaattcatctggaacgacctgctgtccctggaaaccggcagcctgaagctggccaacggaagagtgatcgagaagacactgtacaacagaagaacccggcaggatgagcctgccctgttcgtggccctgaccttcgagcggcgggaggtcctggactcctccaatatcaaaccaatgaacctgatcggcgtggcaagaggcgaaaacatccccgccgtgatcgccctgaccgaccccgagggctgcccactgagccggtttaaggatagcctgggaaacccaacccacatcctgagaatcggcgagagctataaggagaagcagcggaccatccaggccaagaaggaggtggagcagcggagagccggcggctacagccggaagtacgccagcaaagccaagaatctggcagacgatatggtgagaaacaccgctagagatctgctgtactacgccgtgacccaggatgccatgctgatcttcgccaacctgagccggggcttcggccggcagggcaagcggaccttcatggccgagagacagtacacacggatggaggactggctgaccgccaagctggcctacgagggcctgagcaagacctacctgtccaagacactggcccagtacacctccaagacatgcagcaactgtgggtttaccatcaccagcgccgactacgacagggtgctggagaagctgaagaagacagcaacaggctggatgaccacaattaacggcaaggagctgaaggtggagggccagattacctactacaacagatacaagagacagaacgtagtcaaggacctgtccgtcgagctggatagactgagcgaagaatctgtgaacaacgacatctcctcctggacaaagggcagaagcggagaagctctgagcctcctgaagaaaagattctcccatagacccgtgcaggagaagttcgtgtgcctgaactgcggcttcgagacacacgcagccgagcaagccgccctgaacatcgccagatcctggctgttcctgcggagccaggagtacaagaaataccagacaaacaagacaaccggcaacaccgataagagagccttcgtcgagacctggcagtccttttaccggaagaagcttaaggaggtgtggaaacctgccgtgcggtctggcggatctggcggaggctccacaagcgtgcaggtgcccgtgaccttcgaggacgtggccgtgtacttcagcgaggacgagtggggcatgctggccggctggcagaaggagctgtacaaggagaccatgaaggagaactacgagaccctgaccctgctgggctgcctgagcgagaagcccagcctgatcagcaagatcgagagggaggaggacccctgcgtgagggaccagcaggaccccagggacaggaggaagctgaggagcagctggaccagccccaagaaaaagagaaaagtctaagctgccttctgcggggcttgccttctggccatgcccttcttctctcccttgcacctgtacctcttggtctttgaataaagcctgagtaggaaggctagcaaaaaaaaaaaaaaaaaaaaaaaaaaaaaaaaaaaaaaaaaaaaaaaaaaaaaaaaaaaaaaaaaaaaaaaaaaaaaaaa

SEQ ID NO: 6074 - RNA, 5797 nt, synthetic construct
  source 1..5797: mol_type = other RNA
aggaaataagagagaaaagaagagtaagaagaaatataagagccaccatggcccctaagaagaagcgtaaagtgagccggatggaacgcctcgtctacgaggtgcggcagaagtgcagaaacatcgaggacatctgcatctcctgcggatctctgaacgtgaccctggagcacccactgttcatcggcggcatgtgccagaactgtaaaaactgttttctggagtgtgcctatcaatacgacgatgacggctaccagagctactgcaccatctgttgcggcggaagagaggtgctgatgtgtggaaataacaactgctgccggtgcttctgcgtggaatgcgtggacctgctggtgggccccggcgccgcccaggccgctattaaggaagatccttggaactgctacatgtgcggccacaagggcacatacggcctgctgagacggagagaggactggcctagcagactgcagatgttcttcgccaataaccacgaccaggagttcgacccccctaaggtgtaccctcccgtccccgccgagaagagaaagcccatccgggtcctgagcctgttcgatggcatcgccaccggtctgctggtgctgaaggacctgggcatccaggtggataggtacattgcctccgaggtgtgcgaggactccatcaccgtgggaatggtgcgtcatcagggcaagatcatgtacgtgggcgacgtgcggagcgtgacacagaagcatatccaggagtggggccctttcgacctggtgatcggcggcagcccttgcaatgacctgagcatcgtgaacccagcccggaagggcctgtacgagggaaccggcagactgttcttcgagttttacagactgctgcacgacgcccggcctaaggaaggcgacgaccggcccttcttttggctgttcgagaatgtggtggccatgggagtcagcgacaagcgggatattagccggttcctggagagcaaccccgtgatgatcgatgccaaggaagtgagcgccgcccaccgggccagatacttctggggcaatctgcctggcatgaacagacccctggccagcaccgtgaacgacaagctggagctgcaggagtgcctggagcacggccggatcgccaagttcagcaaggtgagaaccatcaccacccgaagcaacagcatcaaacaaggcaaggaccagcactttcctgtgttcatgaacgagaaggaggacatcctgtggtgtaccgagatggagagagtgttcgggttcccagtccactacacagatgtcagcaacatgtctagactggccagacagagactgctgggaagaagctggtccgtccctgtgatcagacacctgttcgcccctctgaaggagtacttcgcctgcgtgagcagcggcaacagcaacgccaacagccggggccccagcttctctagcggcctggtgccactgtccctgagagggagccacatgggccccatggagatctacaaaaccgtgagcgcctggaagcggcagcctgtgcgcgtgctgagcctgtttcggaatatcgataaagtcctgaaaagcctgggattcctggagagcggctctggctccggcggtggcaccctgaagtacgtggaggatgtgacaaacgtggtcagacgggatgtggagaagtggggccccttcgatctggtgtacggcagcacccaacccctgggcagctcttgtgaccggtgccctggctggtacatgtttcagttccaccggatcctgcagtacgccctgccgagacaggagtcccagcggccattcttttggattttcatggacaacttgctgctgaccgaggatgaccaggaaactaccactcggttcctgcagaccgaagccgtgaccctgcaggacgtgagaggccgggactaccagaacgccatgcgggtgtggtccaacatccctggactgaaaagcaagcacgcacctctgacccctaaagaagaggagtacctgcaggcccaggtgcggagcagaagcaagctggacgcccctaaggtggatctgctggtgaagaattgcctcctgcccctgagagagtacttcaagtatttcagccagaatagtctgcccctgggcggcccaagcagcggcgcccctcctcccagcggcggcagcccagccggctccccaacctctaccgaggagggcacctctgagtccgccacccccgagagcggccctggcacctccaccgagcccagcgagggcagcgcacccggcagccctgccggcagccccacctccacagaggagggaaccagcaccgagcccagcgaaggcagcgccccaggcaccagcaccgagcctagtgagggcggctctggcggcggcagcgcccaggagattaaacggatcaacaagatcagaagaagacttgtgaaagacagcaacaccaagaaggccggcaagacaggccccatgaaaaccctgctggttagagtgatgacacccgatctgagagagcggctggaaaacctgagaaagaagcctgaaaatatcccccagcccatcagcaatacatctagagccaacctgaataagctgctgaccgattacaccgaaatgaagaaggcgatcctgcatgtgtactgggaagagttccagaaggaccctgtgggcctgatgagccgggtggcccagcctgccagcaagaagatcgatcagaacaagctgaaacctgagatggacgagaagggcaacctgaccaccgccggctttgcctgctctcagtgtggccagcccctgttcgtgtacaagctggagcaggtgtctgagaagggcaaggcttacaccaactacttcggacggtgcaatgtggccgagcacgaaaagctgatcctgctggcccagctgaagcccgagaaggatagcgacgaagccgtgacatatagcctgggaaagtttgggcagagggccctggatttctacagcattcatgtgaccaaggagtccacccaccccgtgaagcccctggcccagatcgccggaaacagatacgcctccggacctgtgggaaaggccctgagcgacgcatgtatgggcacaatcgcctccttcctgtctaagtaccaggacatcatcatcgaacaccagaaggtggtgaagggcaaccagaagagactggagagcctgcgggagctggccggcaaggaaaacctggaataccctagcgtgaccctgccacctcagcctcacaccaaggagggcgttgatgcctacaacgaagtgatcgcccgggtgcgaatgtgggtgaacctgaacctgtggcagaagctgaagctaagcagagatgatgccaagcctctgctgagactgaagggattcccttcctttcctctggtcgagagacaggccaacgaagtggactggtgggacatggtgtgtaacgtgaagaagctgatcaacgagaaaaaggaggatggcaaggtgttttggcagaatctggctggctacaagagacaggaagccctgagaccatacctgagcagcgaggaagatcggaagaagggaaagaaattcgctcggtaccagctgggcgacctgctgctgcacctggaaaagaagcacggcgaggactggggaaaggtgtacgacgaggcctgggagcggattgacaagaaagtggaaggcctgagcaagcacatcaagctggaagaggaacggagaagcgaggacgcccagagcaaggccgccctgaccgactggctgcgggctaaggccagcttcgtgatcgagggcctgaaggaggccgacaaggacgagttctgcagatgcgagctgaagctgcagaagtggtacggggacctgcggggaaagcccttcgccatcgaagccgagaacagcatcctggacatcagcggcttcagcaagcagtacaactgtgccttcatctggcagaaggacggcgtgaagaagctgaacctgtacctgatcatcaactacttcaagggcggcaagctgcggttcaagaagatcaaacctgaagccttcgaagccaacagattctacaccgtgatcaacaaaaagagcggcgagatcgtgcccatggaggtgaacttcaacttcgacgaccccaacctgatcatcctgcctctggcctttggcaagagacagggcagagaattcatctggaacgacctgctgtccctggaaaccggcagcctgaagctggccaacggaagagtgatcgagaagacactgtacaacagaagaacccggcaggatgagcctgccctgttcgtggccctgaccttcgagcggcgggaggtcctggactcctccaatatcaaaccaatgaacctgatcggcgtggcaagaggcgaaaacatccccgccgtgatcgccctgaccgaccccgagggctgcccactgagccggtttaaggatagcctgggaaacccaacccacatcctgagaatcggcgagagctataaggagaagcagcggaccatccaggccaagaaggaggtggagcagcggagagccggcggctacagccggaagtacgccagcaaagccaagaatctggcagacgatatggtgagaaacaccgctagagatctgctgtactacgccgtgacccaggatgccatgctgatcttcgccaacctgagccggggcttcggccggcagggcaagcggaccttcatggccgagagacagtacacacggatggaggactggctgaccgccaagctggcctacgagggcctgagcaagacctacctgtccaagacactggcccagtacacctccaagacatgcagcaactgtgggtttaccatcaccagcgccgactacgacagggtgctggagaagctgaagaagacagcaacaggctggatgaccacaattaacggcaaggagctgaaggtggagggccagattacctactacaacagatacaagagacagaacgtagtcaaggacctgtccgtcgagctggatagactgagcgaagaatctgtgaacaacgacatctcctcctggacaaagggcagaagcggagaagctctgagcctcctgaagaaaagattctcccatagacccgtgcaggagaagttcgtgtgcctgaactgcggcttcgagacacacgcagccgagcaagccgccctgaacatcgccagatcctggctgttcctgcggagccaggagtacaagaaataccagacaaacaagacaaccggcaacaccgataagagagccttcgtcgagacctggcagtccttttaccggaagaagcttaaggaggtgtggaaacctgccgtgcggtctggcggatctggcggaggctccacaagcgacagcgtggccttcgaggacgtggccgtgaacttcacccaggaggagtgggccctgctggaccccagccagaagaacctgtacagggaggtgatgcaggagaccctgaggaacctgaccagcatcggcaagaagtggaacaaccagtacatcgaggacgagcaccagaaccccaagaggaacctgaggaggctgatcggcgagaggctgagcgagagcaaggagagccaccagcacggcgagaccagccccaagaaaaagagaaaagtctaagctgccttctgcggggcttgccttctggccatgcccttcttctctcccttgcacctgtacctcttggtctttgaataaagcctgagtaggaaggctagcaaaaaaaaaaaaaaaaaaaaaaaaaaaaaaaaaaaaaaaaaaaaaaaaaaaaaaaaaaaaaaaaaaaaaaaaaaaaaaaa

SEQ ID NO: 6075 - RNA, 5797 nt, synthetic construct
  source 1..5797: mol_type = other RNA
aggaaataagagagaaaagaagagtaagaagaaatataagagccaccatggcccctaagaagaagcgtaaagtgagccggatggaacgcctcgtctacgaggtgcggcagaagtgcagaaacatcgaggacatctgcatctcctgcggatctctgaacgtgaccctggagcacccactgttcatcggcggcatgtgccagaactgtaaaaactgttttctggagtgtgcctatcaatacgacgatgacggctaccagagctactgcaccatctgttgcggcggaagagaggtgctgatgtgtggaaataacaactgctgccggtgcttctgcgtggaatgcgtggacctgctggtgggccccggcgccgcccaggccgctattaaggaagatccttggaactgctacatgtgcggccacaagggcacatacggcctgctgagacggagagaggactggcctagcagactgcagatgttcttcgccaataaccacgaccaggagttcgacccccctaaggtgtaccctcccgtccccgccgagaagagaaagcccatccgggtcctgagcctgttcgatggcatcgccaccggtctgctggtgctgaaggacctgggcatccaggtggataggtacattgcctccgaggtgtgcgaggactccatcaccgtgggaatggtgcgtcatcagggcaagatcatgtacgtgggcgacgtgcggagcgtgacacagaagcatatccaggagtggggccctttcgacctggtgatcggcggcagcccttgcaatgacctgagcatcgtgaacccagcccggaagggcctgtacgagggaaccggcagactgttcttcgagttttacagactgctgcacgacgcccggcctaaggaaggcgacgaccggcccttcttttggctgttcgagaatgtggtggccatgggagtcagcgacaagcgggatattagccggttcctggagagcaaccccgtgatgatcgatgccaaggaagtgagcgccgcccaccgggccagatacttctggggcaatctgcctggcatgaacagacccctggccagcaccgtgaacgacaagctggagctgcaggagtgcctggagcacggccggatcgccaagttcagcaaggtgagaaccatcaccacccgaagcaacagcatcaaacaaggcaaggaccagcactttcctgtgttcatgaacgagaaggaggacatcctgtggtgtaccgagatggagagagtgttcgggttcccagtccactacacagatgtcagcaacatgtctagactggccagacagagactgctgggaagaagctggtccgtccctgtgatcagacacctgttcgcccctctgaaggagtacttcgcctgcgtgagcagcggcaacagcaacgccaacagccggggccccagcttctctagcggcctggtgccactgtccctgagagggagccacatgggccccatggagatctacaaaaccgtgagcgcctggaagcggcagcctgtgcgcgtgctgagcctgtttcggaatatcgataaagtcctgaaaagcctgggattcctggagagcggctctggctccggcggtggcaccctgaagtacgtggaggatgtgacaaacgtggtcagacgggatgtggagaagtggggccccttcgatctggtgtacggcagcacccaacccctgggcagctcttgtgaccggtgccctggctggtacatgtttcagttccaccggatcctgcagtacgccctgccgagacaggagtcccagcggccattcttttggattttcatggacaacttgctgctgaccgaggatgaccaggaaactaccactcggttcctgcagaccgaagccgtgaccctgcaggacgtgagaggccgggactaccagaacgccatgcgggtgtggtccaacatccctggactgaaaagcaagcacgcacctctgacccctaaagaagaggagtacctgcaggcccaggtgcggagcagaagcaagctggacgcccctaaggtggatctgctggtgaagaattgcctcctgcccctgagagagtacttcaagtatttcagccagaatagtctgcccctgggcggcccaagcagcggcgcccctcctcccagcggcggcagcccagccggctccccaacctctaccgaggagggcacctctgagtccgccacccccgagagcggccctggcacctccaccgagcccagcgagggcagcgcacccggcagccctgccggcagccccacctccacagaggagggaaccagcaccgagcccagcgaaggcagcgccccaggcaccagcaccgagcctagtgagggcggctctggcggcggcagcgcccaggagattaaacggatcaacaagatcagaagaagacttgtgaaagacagcaacaccaagaaggccggcaagacaggccccatgaaaaccctgctggttagagtgatgacacccgatctgagagagcggctggaaaacctgagaaagaagcctgaaaatatcccccagcccatcagcaatacatctagagccaacctgaataagctgctgaccgattacaccgaaatgaagaaggcgatcctgcatgtgtactgggaagagttccagaaggaccctgtgggcctgatgagccgggtggcccagcctgccagcaagaagatcgatcagaacaagctgaaacctgagatggacgagaagggcaacctgaccaccgccggctttgcctgctctcagtgtggccagcccctgttcgtgtacaagctggagcaggtgtctgagaagggcaaggcttacaccaactacttcggacggtgcaatgtggccgagcacgaaaagctgatcctgctggcccagctgaagcccgagaaggatagcgacgaagccgtgacatatagcctgggaaagtttgggcagagggccctggatttctacagcattcatgtgaccaaggagtccacccaccccgtgaagcccctggcccagatcgccggaaacagatacgcctccggacctgtgggaaaggccctgagcgacgcatgtatgggcacaatcgcctccttcctgtctaagtaccaggacatcatcatcgaacaccagaaggtggtgaagggcaaccagaagagactggagagcctgcgggagctggccggcaaggaaaacctggaataccctagcgtgaccctgccacctcagcctcacaccaaggagggcgttgatgcctacaacgaagtgatcgcccgggtgcgaatgtgggtgaacctgaacctgtggcagaagctgaagctaagcagagatgatgccaagcctctgctgagactgaagggattcccttcctttcctctggtcgagagacaggccaacgaagtggactggtgggacatggtgtgtaacgtgaagaagctgatcaacgagaaaaaggaggatggcaaggtgttttggcagaatctggctggctacaagagacaggaagccctgagaccatacctgagcagcgaggaagatcggaagaagggaaagaaattcgctcggtaccagctgggcgacctgctgctgcacctggaaaagaagcacggcgaggactggggaaaggtgtacgacgaggcctgggagcggattgacaagaaagtggaaggcctgagcaagcacatcaagctggaagaggaacggagaagcgaggacgcccagagcaaggccgccctgaccgactggctgcgggctaaggccagcttcgtgatcgagggcctgaaggaggccgacaaggacgagttctgcagatgcgagctgaagctgcagaagtggtacggggacctgcggggaaagcccttcgccatcgaagccgagaacagcatcctggacatcagcggcttcagcaagcagtacaactgtgccttcatctggcagaaggacggcgtgaagaagctgaacctgtacctgatcatcaactacttcaagggcggcaagctgcggttcaagaagatcaaacctgaagccttcgaagccaacagattctacaccgtgatcaacaaaaagagcggcgagatcgtgcccatggaggtgaacttcaacttcgacgaccccaacctgatcatcctgcctctggcctttggcaagagacagggcagagaattcatctggaacgacctgctgtccctggaaaccggcagcctgaagctggccaacggaagagtgatcgagaagacactgtacaacagaagaacccggcaggatgagcctgccctgttcgtggccctgaccttcgagcggcgggaggtcctggactcctccaatatcaaaccaatgaacctgatcggcgtggcaagaggcgaaaacatccccgccgtgatcgccctgaccgaccccgagggctgcccactgagccggtttaaggatagcctgggaaacccaacccacatcctgagaatcggcgagagctataaggagaagcagcggaccatccaggccaagaaggaggtggagcagcggagagccggcggctacagccggaagtacgccagcaaagccaagaatctggcagacgatatggtgagaaacaccgctagagatctgctgtactacgccgtgacccaggatgccatgctgatcttcgccaacctgagccggggcttcggccggcagggcaagcggaccttcatggccgagagacagtacacacggatggaggactggctgaccgccaagctggcctacgagggcctgagcaagacctacctgtccaagacactggcccagtacacctccaagacatgcagcaactgtgggtttaccatcaccagcgccgactacgacagggtgctggagaagctgaagaagacagcaacaggctggatgaccacaattaacggcaaggagctgaaggtggagggccagattacctactacaacagatacaagagacagaacgtagtcaaggacctgtccgtcgagctggatagactgagcgaagaatctgtgaacaacgacatctcctcctggacaaagggcagaagcggagaagctctgagcctcctgaagaaaagattctcccatagacccgtgcaggagaagttcgtgtgcctgaactgcggcttcgagacacacgcagccgagcaagccgccctgaacatcgccagatcctggctgttcctgcggagccaggagtacaagaaataccagacaaacaagacaaccggcaacaccgataagagagccttcgtcgagacctggcagtccttttaccggaagaagcttaaggaggtgtggaaacctgccgtgcggtctggcggatctggcggaggctccacaagcgtgcaggagcccgtgaccttcaaggacgtggccgtggacttcacccaggaggagtggggccagctggacctggtgcagaggaccctgtacagggacgtgatgctggagacctacggccacctgctgagcgtgggcaaccagatcgccaagcccgaggtgatcagcctgctggagcagggcgaggagccctggagcgtggagcaggcctgcccccagaggaccggccccgagtgggtgaggaacaccagccccaagaaaaagagaaaagtctaagctgccttctgcggggcttgccttctggccatgcccttcttctctcccttgcacctgtacctcttggtctttgaataaagcctgagtaggaaggctagcaaaaaaaaaaaaaaaaaaaaaaaaaaaaaaaaaaaaaaaaaaaaaaaaaaaaaaaaaaaaaaaaaaaaaaaaaaaaaaaa

SEQ ID NO: 6076 - RNA, 5797 nt, synthetic construct
  source 1..5797: mol_type = other RNA
aggaaataagagagaaaagaagagtaagaagaaatataagagccaccatggcccctaagaagaagcgtaaagtgagccggatggaacgcctcgtctacgaggtgcggcagaagtgcagaaacatcgaggacatctgcatctcctgcggatctctgaacgtgaccctggagcacccactgttcatcggcggcatgtgccagaactgtaaaaactgttttctggagtgtgcctatcaatacgacgatgacggctaccagagctactgcaccatctgttgcggcggaagagaggtgctgatgtgtggaaataacaactgctgccggtgcttctgcgtggaatgcgtggacctgctggtgggccccggcgccgcccaggccgctattaaggaagatccttggaactgctacatgtgcggccacaagggcacatacggcctgctgagacggagagaggactggcctagcagactgcagatgttcttcgccaataaccacgaccaggagttcgacccccctaaggtgtaccctcccgtccccgccgagaagagaaagcccatccgggtcctgagcctgttcgatggcatcgccaccggtctgctggtgctgaaggacctgggcatccaggtggataggtacattgcctccgaggtgtgcgaggactccatcaccgtgggaatggtgcgtcatcagggcaagatcatgtacgtgggcgacgtgcggagcgtgacacagaagcatatccaggagtggggccctttcgacctggtgatcggcggcagcccttgcaatgacctgagcatcgtgaacccagcccggaagggcctgtacgagggaaccggcagactgttcttcgagttttacagactgctgcacgacgcccggcctaaggaaggcgacgaccggcccttcttttggctgttcgagaatgtggtggccatgggagtcagcgacaagcgggatattagccggttcctggagagcaaccccgtgatgatcgatgccaaggaagtgagcgccgcccaccgggccagatacttctggggcaatctgcctggcatgaacagacccctggccagcaccgtgaacgacaagctggagctgcaggagtgcctggagcacggccggatcgccaagttcagcaaggtgagaaccatcaccacccgaagcaacagcatcaaacaaggcaaggaccagcactttcctgtgttcatgaacgagaaggaggacatcctgtggtgtaccgagatggagagagtgttcgggttcccagtccactacacagatgtcagcaacatgtctagactggccagacagagactgctgggaagaagctggtccgtccctgtgatcagacacctgttcgcccctctgaaggagtacttcgcctgcgtgagcagcggcaacagcaacgccaacagccggggccccagcttctctagcggcctggtgccactgtccctgagagggagccacatgggccccatggagatctacaaaaccgtgagcgcctggaagcggcagcctgtgcgcgtgctgagcctgtttcggaatatcgataaagtcctgaaaagcctgggattcctggagagcggctctggctccggcggtggcaccctgaagtacgtggaggatgtgacaaacgtggtcagacgggatgtggagaagtggggccccttcgatctggtgtacggcagcacccaacccctgggcagctcttgtgaccggtgccctggctggtacatgtttcagttccaccggatcctgcagtacgccctgccgagacaggagtcccagcggccattcttttggattttcatggacaacttgctgctgaccgaggatgaccaggaaactaccactcggttcctgcagaccgaagccgtgaccctgcaggacgtgagaggccgggactaccagaacgccatgcgggtgtggtccaacatccctggactgaaaagcaagcacgcacctctgacccctaaagaagaggagtacctgcaggcccaggtgcggagcagaagcaagctggacgcccctaaggtggatctgctggtgaagaattgcctcctgcccctgagagagtacttcaagtatttcagccagaatagtctgcccctgggcggcccaagcagcggcgcccctcctcccagcggcggcagcccagccggctccccaacctctaccgaggagggcacctctgagtccgccacccccgagagcggccctggcacctccaccgagcccagcgagggcagcgcacccggcagccctgccggcagccccacctccacagaggagggaaccagcaccgagcccagcgaaggcagcgccccaggcaccagcaccgagcctagtgagggcggctctggcggcggcagcgcccaggagattaaacggatcaacaagatcagaagaagacttgtgaaagacagcaacaccaagaaggccggcaagacaggccccatgaaaaccctgctggttagagtgatgacacccgatctgagagagcggctggaaaacctgagaaagaagcctgaaaatatcccccagcccatcagcaatacatctagagccaacctgaataagctgctgaccgattacaccgaaatgaagaaggcgatcctgcatgtgtactgggaagagttccagaaggaccctgtgggcctgatgagccgggtggcccagcctgccagcaagaagatcgatcagaacaagctgaaacctgagatggacgagaagggcaacctgaccaccgccggctttgcctgctctcagtgtggccagcccctgttcgtgtacaagctggagcaggtgtctgagaagggcaaggcttacaccaactacttcggacggtgcaatgtggccgagcacgaaaagctgatcctgctggcccagctgaagcccgagaaggatagcgacgaagccgtgacatatagcctgggaaagtttgggcagagggccctggatttctacagcattcatgtgaccaaggagtccacccaccccgtgaagcccctggcccagatcgccggaaacagatacgcctccggacctgtgggaaaggccctgagcgacgcatgtatgggcacaatcgcctccttcctgtctaagtaccaggacatcatcatcgaacaccagaaggtggtgaagggcaaccagaagagactggagagcctgcgggagctggccggcaaggaaaacctggaataccctagcgtgaccctgccacctcagcctcacaccaaggagggcgttgatgcctacaacgaagtgatcgcccgggtgcgaatgtgggtgaacctgaacctgtggcagaagctgaagctaagcagagatgatgccaagcctctgctgagactgaagggattcccttcctttcctctggtcgagagacaggccaacgaagtggactggtgggacatggtgtgtaacgtgaagaagctgatcaacgagaaaaaggaggatggcaaggtgttttggcagaatctggctggctacaagagacaggaagccctgagaccatacctgagcagcgaggaagatcggaagaagggaaagaaattcgctcggtaccagctgggcgacctgctgctgcacctggaaaagaagcacggcgaggactggggaaaggtgtacgacgaggcctgggagcggattgacaagaaagtggaaggcctgagcaagcacatcaagctggaagaggaacggagaagcgaggacgcccagagcaaggccgccctgaccgactggctgcgggctaaggccagcttcgtgatcgagggcctgaaggaggccgacaaggacgagttctgcagatgcgagctgaagctgcagaagtggtacggggacctgcggggaaagcccttcgccatcgaagccgagaacagcatcctggacatcagcggcttcagcaagcagtacaactgtgccttcatctggcagaaggacggcgtgaagaagctgaacctgtacctgatcatcaactacttcaagggcggcaagctgcggttcaagaagatcaaacctgaagccttcgaagccaacagattctacaccgtgatcaacaaaaagagcggcgagatcgtgcccatggaggtgaacttcaacttcgacgaccccaacctgatcatcctgcctctggcctttggcaagagacagggcagagaattcatctggaacgacctgctgtccctggaaaccggcagcctgaagctggccaacggaagagtgatcgagaagacactgtacaacagaagaacccggcaggatgagcctgccctgttcgtggccctgaccttcgagcggcgggaggtcctggactcctccaatatcaaaccaatgaacctgatcggcgtggcaagaggcgaaaacatccccgccgtgatcgccctgaccgaccccgagggctgcccactgagccggtttaaggatagcctgggaaacccaacccacatcctgagaatcggcgagagctataaggagaagcagcggaccatccaggccaagaaggaggtggagcagcggagagccggcggctacagccggaagtacgccagcaaagccaagaatctggcagacgatatggtgagaaacaccgctagagatctgctgtactacgccgtgacccaggatgccatgctgatcttcgccaacctgagccggggcttcggccggcagggcaagcggaccttcatggccgagagacagtacacacggatggaggactggctgaccgccaagctggcctacgagggcctgagcaagacctacctgtccaagacactggcccagtacacctccaagacatgcagcaactgtgggtttaccatcaccagcgccgactacgacagggtgctggagaagctgaagaagacagcaacaggctggatgaccacaattaacggcaaggagctgaaggtggagggccagattacctactacaacagatacaagagacagaacgtagtcaaggacctgtccgtcgagctggatagactgagcgaagaatctgtgaacaacgacatctcctcctggacaaagggcagaagcggagaagctctgagcctcctgaagaaaagattctcccatagacccgtgcaggagaagttcgtgtgcctgaactgcggcttcgagacacacgcagccgagcaagccgccctgaacatcgccagatcctggctgttcctgcggagccaggagtacaagaaataccagacaaacaagacaaccggcaacaccgataagagagccttcgtcgagacctggcagtccttttaccggaagaagcttaaggaggtgtggaaacctgccgtgcggtctggcggatctggcggaggctccacaagcttccaggagagcgtggccttcgaggacgtggccgtgtacttcacccagaaccagtggggcagcctggaccccgcccagagggccctgtacagcgaggtgatgctggagaactacgccaacgtggccagcctggccttccccttccccaagcccgccctgatcagccacctggagaagggcgaggccccctggggccccgacccctgggacgccgagatccccagcggcatcaaccagggcggcaccagccccaagaaaaagagaaaagtctaagctgccttctgcggggcttgccttctggccatgcccttcttctctcccttgcacctgtacctcttggtctttgaataaagcctgagtaggaaggctagcaaaaaaaaaaaaaaaaaaaaaaaaaaaaaaaaaaaaaaaaaaaaaaaaaaaaaaaaaaaaaaaaaaaaaaaaaaaaaaaa

SEQ ID NO: 6077 - RNA, 5797 nt, synthetic construct
  source 1..5797: mol_type = other RNA
aggaaataagagagaaaagaagagtaagaagaaatataagagccaccatggcccctaagaagaagcgtaaagtgagccggatggaacgcctcgtctacgaggtgcggcagaagtgcagaaacatcgaggacatctgcatctcctgcggatctctgaacgtgaccctggagcacccactgttcatcggcggcatgtgccagaactgtaaaaactgttttctggagtgtgcctatcaatacgacgatgacggctaccagagctactgcaccatctgttgcggcggaagagaggtgctgatgtgtggaaataacaactgctgccggtgcttctgcgtggaatgcgtggacctgctggtgggccccggcgccgcccaggccgctattaaggaagatccttggaactgctacatgtgcggccacaagggcacatacggcctgctgagacggagagaggactggcctagcagactgcagatgttcttcgccaataaccacgaccaggagttcgacccccctaaggtgtaccctcccgtccccgccgagaagagaaagcccatccgggtcctgagcctgttcgatggcatcgccaccggtctgctggtgctgaaggacctgggcatccaggtggataggtacattgcctccgaggtgtgcgaggactccatcaccgtgggaatggtgcgtcatcagggcaagatcatgtacgtgggcgacgtgcggagcgtgacacagaagcatatccaggagtggggccctttcgacctggtgatcggcggcagcccttgcaatgacctgagcatcgtgaacccagcccggaagggcctgtacgagggaaccggcagactgttcttcgagttttacagactgctgcacgacgcccggcctaaggaaggcgacgaccggcccttcttttggctgttcgagaatgtggtggccatgggagtcagcgacaagcgggatattagccggttcctggagagcaaccccgtgatgatcgatgccaaggaagtgagcgccgcccaccgggccagatacttctggggcaatctgcctggcatgaacagacccctggccagcaccgtgaacgacaagctggagctgcaggagtgcctggagcacggccggatcgccaagttcagcaaggtgagaaccatcaccacccgaagcaacagcatcaaacaaggcaaggaccagcactttcctgtgttcatgaacgagaaggaggacatcctgtggtgtaccgagatggagagagtgttcgggttcccagtccactacacagatgtcagcaacatgtctagactggccagacagagactgctgggaagaagctggtccgtccctgtgatcagacacctgttcgcccctctgaaggagtacttcgcctgcgtgagcagcggcaacagcaacgccaacagccggggccccagcttctctagcggcctggtgccactgtccctgagagggagccacatgggccccatggagatctacaaaaccgtgagcgcctggaagcggcagcctgtgcgcgtgctgagcctgtttcggaatatcgataaagtcctgaaaagcctgggattcctggagagcggctctggctccggcggtggcaccctgaagtacgtggaggatgtgacaaacgtggtcagacgggatgtggagaagtggggccccttcgatctggtgtacggcagcacccaacccctgggcagctcttgtgaccggtgccctggctggtacatgtttcagttccaccggatcctgcagtacgccctgccgagacaggagtcccagcggccattcttttggattttcatggacaacttgctgctgaccgaggatgaccaggaaactaccactcggttcctgcagaccgaagccgtgaccctgcaggacgtgagaggccgggactaccagaacgccatgcgggtgtggtccaacatccctggactgaaaagcaagcacgcacctctgacccctaaagaagaggagtacctgcaggcccaggtgcggagcagaagcaagctggacgcccctaaggtggatctgctggtgaagaattgcctcctgcccctgagagagtacttcaagtatttcagccagaatagtctgcccctgggcggcccaagcagcggcgcccctcctcccagcggcggcagcccagccggctccccaacctctaccgaggagggcacctctgagtccgccacccccgagagcggccctggcacctccaccgagcccagcgagggcagcgcacccggcagccctgccggcagccccacctccacagaggagggaaccagcaccgagcccagcgaaggcagcgccccaggcaccagcaccgagcctagtgagggcggctctggcggcggcagcgcccaggagattaaacggatcaacaagatcagaagaagacttgtgaaagacagcaacaccaagaaggccggcaagacaggccccatgaaaaccctgctggttagagtgatgacacccgatctgagagagcggctggaaaacctgagaaagaagcctgaaaatatcccccagcccatcagcaatacatctagagccaacctgaataagctgctgaccgattacaccgaaatgaagaaggcgatcctgcatgtgtactgggaagagttccagaaggaccctgtgggcctgatgagccgggtggcccagcctgccagcaagaagatcgatcagaacaagctgaaacctgagatggacgagaagggcaacctgaccaccgccggctttgcctgctctcagtgtggccagcccctgttcgtgtacaagctggagcaggtgtctgagaagggcaaggcttacaccaactacttcggacggtgcaatgtggccgagcacgaaaagctgatcctgctggcccagctgaagcccgagaaggatagcgacgaagccgtgacatatagcctgggaaagtttgggcagagggccctggatttctacagcattcatgtgaccaaggagtccacccaccccgtgaagcccctggcccagatcgccggaaacagatacgcctccggacctgtgggaaaggccctgagcgacgcatgtatgggcacaatcgcctccttcctgtctaagtaccaggacatcatcatcgaacaccagaaggtggtgaagggcaaccagaagagactggagagcctgcgggagctggccggcaaggaaaacctggaataccctagcgtgaccctgccacctcagcctcacaccaaggagggcgttgatgcctacaacgaagtgatcgcccgggtgcgaatgtgggtgaacctgaacctgtggcagaagctgaagctaagcagagatgatgccaagcctctgctgagactgaagggattcccttcctttcctctggtcgagagacaggccaacgaagtggactggtgggacatggtgtgtaacgtgaagaagctgatcaacgagaaaaaggaggatggcaaggtgttttggcagaatctggctggctacaagagacaggaagccctgagaccatacctgagcagcgaggaagatcggaagaagggaaagaaattcgctcggtaccagctgggcgacctgctgctgcacctggaaaagaagcacggcgaggactggggaaaggtgtacgacgaggcctgggagcggattgacaagaaagtggaaggcctgagcaagcacatcaagctggaagaggaacggagaagcgaggacgcccagagcaaggccgccctgaccgactggctgcgggctaaggccagcttcgtgatcgagggcctgaaggaggccgacaaggacgagttctgcagatgcgagctgaagctgcagaagtggtacggggacctgcggggaaagcccttcgccatcgaagccgagaacagcatcctggacatcagcggcttcagcaagcagtacaactgtgccttcatctggcagaaggacggcgtgaagaagctgaacctgtacctgatcatcaactacttcaagggcggcaagctgcggttcaagaagatcaaacctgaagccttcgaagccaacagattctacaccgtgatcaacaaaaagagcggcgagatcgtgcccatggaggtgaacttcaacttcgacgaccccaacctgatcatcctgcctctggcctttggcaagagacagggcagagaattcatctggaacgacctgctgtccctggaaaccggcagcctgaagctggccaacggaagagtgatcgagaagacactgtacaacagaagaacccggcaggatgagcctgccctgttcgtggccctgaccttcgagcggcgggaggtcctggactcctccaatatcaaaccaatgaacctgatcggcgtggcaagaggcgaaaacatccccgccgtgatcgccctgaccgaccccgagggctgcccactgagccggtttaaggatagcctgggaaacccaacccacatcctgagaatcggcgagagctataaggagaagcagcggaccatccaggccaagaaggaggtggagcagcggagagccggcggctacagccggaagtacgccagcaaagccaagaatctggcagacgatatggtgagaaacaccgctagagatctgctgtactacgccgtgacccaggatgccatgctgatcttcgccaacctgagccggggcttcggccggcagggcaagcggaccttcatggccgagagacagtacacacggatggaggactggctgaccgccaagctggcctacgagggcctgagcaagacctacctgtccaagacactggcccagtacacctccaagacatgcagcaactgtgggtttaccatcaccagcgccgactacgacagggtgctggagaagctgaagaagacagcaacaggctggatgaccacaattaacggcaaggagctgaaggtggagggccagattacctactacaacagatacaagagacagaacgtagtcaaggacctgtccgtcgagctggatagactgagcgaagaatctgtgaacaacgacatctcctcctggacaaagggcagaagcggagaagctctgagcctcctgaagaaaagattctcccatagacccgtgcaggagaagttcgtgtgcctgaactgcggcttcgagacacacgcagccgagcaagccgccctgaacatcgccagatcctggctgttcctgcggagccaggagtacaagaaataccagacaaacaagacaaccggcaacaccgataagagagccttcgtcgagacctggcagtccttttaccggaagaagcttaaggaggtgtggaaacctgccgtgcggtctggcggatctggcggaggctccacaagcatggacgccgtgacctacgacgacgtgcacatcaacttcaccctggaggagtgggccctgctgaaccccagccagaagagcctgtacaaggacgtgatgctggacacctacaggaacctgaccgccatcggctacagctgggacgaccacaacatcgaggagatctgccagagcagcaggagccacaggaggcacctgcagaggcacgccaagatcaacaccggcgagaagccctacggcagcaccagccccaagaaaaagagaaaagtctaagctgccttctgcggggcttgccttctggccatgcccttcttctctcccttgcacctgtacctcttggtctttgaataaagcctgagtaggaaggctagcaaaaaaaaaaaaaaaaaaaaaaaaaaaaaaaaaaaaaaaaaaaaaaaaaaaaaaaaaaaaaaaaaaaaaaaaaaaaaaaa

SEQ ID NO: 6078 - RNA, 5797 nt, synthetic construct
  source 1..5797: mol_type = other RNA
aggaaataagagagaaaagaagagtaagaagaaatataagagccaccatggcccctaagaagaagcgtaaagtgagccggatggaacgcctcgtctacgaggtgcggcagaagtgcagaaacatcgaggacatctgcatctcctgcggatctctgaacgtgaccctggagcacccactgttcatcggcggcatgtgccagaactgtaaaaactgttttctggagtgtgcctatcaatacgacgatgacggctaccagagctactgcaccatctgttgcggcggaagagaggtgctgatgtgtggaaataacaactgctgccggtgcttctgcgtggaatgcgtggacctgctggtgggccccggcgccgcccaggccgctattaaggaagatccttggaactgctacatgtgcggccacaagggcacatacggcctgctgagacggagagaggactggcctagcagactgcagatgttcttcgccaataaccacgaccaggagttcgacccccctaaggtgtaccctcccgtccccgccgagaagagaaagcccatccgggtcctgagcctgttcgatggcatcgccaccggtctgctggtgctgaaggacctgggcatccaggtggataggtacattgcctccgaggtgtgcgaggactccatcaccgtgggaatggtgcgtcatcagggcaagatcatgtacgtgggcgacgtgcggagcgtgacacagaagcatatccaggagtggggccctttcgacctggtgatcggcggcagcccttgcaatgacctgagcatcgtgaacccagcccggaagggcctgtacgagggaaccggcagactgttcttcgagttttacagactgctgcacgacgcccggcctaaggaaggcgacgaccggcccttcttttggctgttcgagaatgtggtggccatgggagtcagcgacaagcgggatattagccggttcctggagagcaaccccgtgatgatcgatgccaaggaagtgagcgccgcccaccgggccagatacttctggggcaatctgcctggcatgaacagacccctggccagcaccgtgaacgacaagctggagctgcaggagtgcctggagcacggccggatcgccaagttcagcaaggtgagaaccatcaccacccgaagcaacagcatcaaacaaggcaaggaccagcactttcctgtgttcatgaacgagaaggaggacatcctgtggtgtaccgagatggagagagtgttcgggttcccagtccactacacagatgtcagcaacatgtctagactggccagacagagactgctgggaagaagctggtccgtccctgtgatcagacacctgttcgcccctctgaaggagtacttcgcctgcgtgagcagcggcaacagcaacgccaacagccggggccccagcttctctagcggcctggtgccactgtccctgagagggagccacatgggccccatggagatctacaaaaccgtgagcgcctggaagcggcagcctgtgcgcgtgctgagcctgtttcggaatatcgataaagtcctgaaaagcctgggattcctggagagcggctctggctccggcggtggcaccctgaagtacgtggaggatgtgacaaacgtggtcagacgggatgtggagaagtggggccccttcgatctggtgtacggcagcacccaacccctgggcagctcttgtgaccggtgccctggctggtacatgtttcagttccaccggatcctgcagtacgccctgccgagacaggagtcccagcggccattcttttggattttcatggacaacttgctgctgaccgaggatgaccaggaaactaccactcggttcctgcagaccgaagccgtgaccctgcaggacgtgagaggccgggactaccagaacgccatgcgggtgtggtccaacatccctggactgaaaagcaagcacgcacctctgacccctaaagaagaggagtacctgcaggcccaggtgcggagcagaagcaagctggacgcccctaaggtggatctgctggtgaagaattgcctcctgcccctgagagagtacttcaagtatttcagccagaatagtctgcccctgggcggcccaagcagcggcgcccctcctcccagcggcggcagcccagccggctccccaacctctaccgaggagggcacctctgagtccgccacccccgagagcggccctggcacctccaccgagcccagcgagggcagcgcacccggcagccctgccggcagccccacctccacagaggagggaaccagcaccgagcccagcgaaggcagcgccccaggcaccagcaccgagcctagtgagggcggctctggcggcggcagcgcccaggagattaaacggatcaacaagatcagaagaagacttgtgaaagacagcaacaccaagaaggccggcaagacaggccccatgaaaaccctgctggttagagtgatgacacccgatctgagagagcggctggaaaacctgagaaagaagcctgaaaatatcccccagcccatcagcaatacatctagagccaacctgaataagctgctgaccgattacaccgaaatgaagaaggcgatcctgcatgtgtactgggaagagttccagaaggaccctgtgggcctgatgagccgggtggcccagcctgccagcaagaagatcgatcagaacaagctgaaacctgagatggacgagaagggcaacctgaccaccgccggctttgcctgctctcagtgtggccagcccctgttcgtgtacaagctggagcaggtgtctgagaagggcaaggcttacaccaactacttcggacggtgcaatgtggccgagcacgaaaagctgatcctgctggcccagctgaagcccgagaaggatagcgacgaagccgtgacatatagcctgggaaagtttgggcagagggccctggatttctacagcattcatgtgaccaaggagtccacccaccccgtgaagcccctggcccagatcgccggaaacagatacgcctccggacctgtgggaaaggccctgagcgacgcatgtatgggcacaatcgcctccttcctgtctaagtaccaggacatcatcatcgaacaccagaaggtggtgaagggcaaccagaagagactggagagcctgcgggagctggccggcaaggaaaacctggaataccctagcgtgaccctgccacctcagcctcacaccaaggagggcgttgatgcctacaacgaagtgatcgcccgggtgcgaatgtgggtgaacctgaacctgtggcagaagctgaagctaagcagagatgatgccaagcctctgctgagactgaagggattcccttcctttcctctggtcgagagacaggccaacgaagtggactggtgggacatggtgtgtaacgtgaagaagctgatcaacgagaaaaaggaggatggcaaggtgttttggcagaatctggctggctacaagagacaggaagccctgagaccatacctgagcagcgaggaagatcggaagaagggaaagaaattcgctcggtaccagctgggcgacctgctgctgcacctggaaaagaagcacggcgaggactggggaaaggtgtacgacgaggcctgggagcggattgacaagaaagtggaaggcctgagcaagcacatcaagctggaagaggaacggagaagcgaggacgcccagagcaaggccgccctgaccgactggctgcgggctaaggccagcttcgtgatcgagggcctgaaggaggccgacaaggacgagttctgcagatgcgagctgaagctgcagaagtggtacggggacctgcggggaaagcccttcgccatcgaagccgagaacagcatcctggacatcagcggcttcagcaagcagtacaactgtgccttcatctggcagaaggacggcgtgaagaagctgaacctgtacctgatcatcaactacttcaagggcggcaagctgcggttcaagaagatcaaacctgaagccttcgaagccaacagattctacaccgtgatcaacaaaaagagcggcgagatcgtgcccatggaggtgaacttcaacttcgacgaccccaacctgatcatcctgcctctggcctttggcaagagacagggcagagaattcatctggaacgacctgctgtccctggaaaccggcagcctgaagctggccaacggaagagtgatcgagaagacactgtacaacagaagaacccggcaggatgagcctgccctgttcgtggccctgaccttcgagcggcgggaggtcctggactcctccaatatcaaaccaatgaacctgatcggcgtggcaagaggcgaaaacatccccgccgtgatcgccctgaccgaccccgagggctgcccactgagccggtttaaggatagcctgggaaacccaacccacatcctgagaatcggcgagagctataaggagaagcagcggaccatccaggccaagaaggaggtggagcagcggagagccggcggctacagccggaagtacgccagcaaagccaagaatctggcagacgatatggtgagaaacaccgctagagatctgctgtactacgccgtgacccaggatgccatgctgatcttcgccaacctgagccggggcttcggccggcagggcaagcggaccttcatggccgagagacagtacacacggatggaggactggctgaccgccaagctggcctacgagggcctgagcaagacctacctgtccaagacactggcccagtacacctccaagacatgcagcaactgtgggtttaccatcaccagcgccgactacgacagggtgctggagaagctgaagaagacagcaacaggctggatgaccacaattaacggcaaggagctgaaggtggagggccagattacctactacaacagatacaagagacagaacgtagtcaaggacctgtccgtcgagctggatagactgagcgaagaatctgtgaacaacgacatctcctcctggacaaagggcagaagcggagaagctctgagcctcctgaagaaaagattctcccatagacccgtgcaggagaagttcgtgtgcctgaactgcggcttcgagacacacgcagccgagcaagccgccctgaacatcgccagatcctggctgttcctgcggagccaggagtacaagaaataccagacaaacaagacaaccggcaacaccgataagagagccttcgtcgagacctggcagtccttttaccggaagaagcttaaggaggtgtggaaacctgccgtgcggtctggcggatctggcggaggctccacaagcagccaggaggccgtgaccttcgaggacgtggccgtgtacttcacccagaaccagtgggccagcctggagcccgcccagaaggccctgtaccaggaggtgatgctggagaactacgccaacatcaccagcctggccgccctgcccttccccaagcccgacctgatcttccagctggagctgggcgaggccccctgggtgcccgacagctggaggcccgtgggcgaggaggccctgggcggcaggaccagccccaagaaaaagagaaaagtctaagctgccttctgcggggcttgccttctggccatgcccttcttctctcccttgcacctgtacctcttggtctttgaataaagcctgagtaggaaggctagcaaaaaaaaaaaaaaaaaaaaaaaaaaaaaaaaaaaaaaaaaaaaaaaaaaaaaaaaaaaaaaaaaaaaaaaaaaaaaaaa

SEQ ID NO: 6079 - RNA, 5797 nt, synthetic construct
  source 1..5797: mol_type = other RNA
aggaaataagagagaaaagaagagtaagaagaaatataagagccaccatggcccctaagaagaagcgtaaagtgagccggatggaacgcctcgtctacgaggtgcggcagaagtgcagaaacatcgaggacatctgcatctcctgcggatctctgaacgtgaccctggagcacccactgttcatcggcggcatgtgccagaactgtaaaaactgttttctggagtgtgcctatcaatacgacgatgacggctaccagagctactgcaccatctgttgcggcggaagagaggtgctgatgtgtggaaataacaactgctgccggtgcttctgcgtggaatgcgtggacctgctggtgggccccggcgccgcccaggccgctattaaggaagatccttggaactgctacatgtgcggccacaagggcacatacggcctgctgagacggagagaggactggcctagcagactgcagatgttcttcgccaataaccacgaccaggagttcgacccccctaaggtgtaccctcccgtccccgccgagaagagaaagcccatccgggtcctgagcctgttcgatggcatcgccaccggtctgctggtgctgaaggacctgggcatccaggtggataggtacattgcctccgaggtgtgcgaggactccatcaccgtgggaatggtgcgtcatcagggcaagatcatgtacgtgggcgacgtgcggagcgtgacacagaagcatatccaggagtggggccctttcgacctggtgatcggcggcagcccttgcaatgacctgagcatcgtgaacccagcccggaagggcctgtacgagggaaccggcagactgttcttcgagttttacagactgctgcacgacgcccggcctaaggaaggcgacgaccggcccttcttttggctgttcgagaatgtggtggccatgggagtcagcgacaagcgggatattagccggttcctggagagcaaccccgtgatgatcgatgccaaggaagtgagcgccgcccaccgggccagatacttctggggcaatctgcctggcatgaacagacccctggccagcaccgtgaacgacaagctggagctgcaggagtgcctggagcacggccggatcgccaagttcagcaaggtgagaaccatcaccacccgaagcaacagcatcaaacaaggcaaggaccagcactttcctgtgttcatgaacgagaaggaggacatcctgtggtgtaccgagatggagagagtgttcgggttcccagtccactacacagatgtcagcaacatgtctagactggccagacagagactgctgggaagaagctggtccgtccctgtgatcagacacctgttcgcccctctgaaggagtacttcgcctgcgtgagcagcggcaacagcaacgccaacagccggggccccagcttctctagcggcctggtgccactgtccctgagagggagccacatgggccccatggagatctacaaaaccgtgagcgcctggaagcggcagcctgtgcgcgtgctgagcctgtttcggaatatcgataaagtcctgaaaagcctgggattcctggagagcggctctggctccggcggtggcaccctgaagtacgtggaggatgtgacaaacgtggtcagacgggatgtggagaagtggggccccttcgatctggtgtacggcagcacccaacccctgggcagctcttgtgaccggtgccctggctggtacatgtttcagttccaccggatcctgcagtacgccctgccgagacaggagtcccagcggccattcttttggattttcatggacaacttgctgctgaccgaggatgaccaggaaactaccactcggttcctgcagaccgaagccgtgaccctgcaggacgtgagaggccgggactaccagaacgccatgcgggtgtggtccaacatccctggactgaaaagcaagcacgcacctctgacccctaaagaagaggagtacctgcaggcccaggtgcggagcagaagcaagctggacgcccctaaggtggatctgctggtgaagaattgcctcctgcccctgagagagtacttcaagtatttcagccagaatagtctgcccctgggcggcccaagcagcggcgcccctcctcccagcggcggcagcccagccggctccccaacctctaccgaggagggcacctctgagtccgccacccccgagagcggccctggcacctccaccgagcccagcgagggcagcgcacccggcagccctgccggcagccccacctccacagaggagggaaccagcaccgagcccagcgaaggcagcgccccaggcaccagcaccgagcctagtgagggcggctctggcggcggcagcgcccaggagattaaacggatcaacaagatcagaagaagacttgtgaaagacagcaacaccaagaaggccggcaagacaggccccatgaaaaccctgctggttagagtgatgacacccgatctgagagagcggctggaaaacctgagaaagaagcctgaaaatatcccccagcccatcagcaatacatctagagccaacctgaataagctgctgaccgattacaccgaaatgaagaaggcgatcctgcatgtgtactgggaagagttccagaaggaccctgtgggcctgatgagccgggtggcccagcctgccagcaagaagatcgatcagaacaagctgaaacctgagatggacgagaagggcaacctgaccaccgccggctttgcctgctctcagtgtggccagcccctgttcgtgtacaagctggagcaggtgtctgagaagggcaaggcttacaccaactacttcggacggtgcaatgtggccgagcacgaaaagctgatcctgctggcccagctgaagcccgagaaggatagcgacgaagccgtgacatatagcctgggaaagtttgggcagagggccctggatttctacagcattcatgtgaccaaggagtccacccaccccgtgaagcccctggcccagatcgccggaaacagatacgcctccggacctgtgggaaaggccctgagcgacgcatgtatgggcacaatcgcctccttcctgtctaagtaccaggacatcatcatcgaacaccagaaggtggtgaagggcaaccagaagagactggagagcctgcgggagctggccggcaaggaaaacctggaataccctagcgtgaccctgccacctcagcctcacaccaaggagggcgttgatgcctacaacgaagtgatcgcccgggtgcgaatgtgggtgaacctgaacctgtggcagaagctgaagctaagcagagatgatgccaagcctctgctgagactgaagggattcccttcctttcctctggtcgagagacaggccaacgaagtggactggtgggacatggtgtgtaacgtgaagaagctgatcaacgagaaaaaggaggatggcaaggtgttttggcagaatctggctggctacaagagacaggaagccctgagaccatacctgagcagcgaggaagatcggaagaagggaaagaaattcgctcggtaccagctgggcgacctgctgctgcacctggaaaagaagcacggcgaggactggggaaaggtgtacgacgaggcctgggagcggattgacaagaaagtggaaggcctgagcaagcacatcaagctggaagaggaacggagaagcgaggacgcccagagcaaggccgccctgaccgactggctgcgggctaaggccagcttcgtgatcgagggcctgaaggaggccgacaaggacgagttctgcagatgcgagctgaagctgcagaagtggtacggggacctgcggggaaagcccttcgccatcgaagccgagaacagcatcctggacatcagcggcttcagcaagcagtacaactgtgccttcatctggcagaaggacggcgtgaagaagctgaacctgtacctgatcatcaactacttcaagggcggcaagctgcggttcaagaagatcaaacctgaagccttcgaagccaacagattctacaccgtgatcaacaaaaagagcggcgagatcgtgcccatggaggtgaacttcaacttcgacgaccccaacctgatcatcctgcctctggcctttggcaagagacagggcagagaattcatctggaacgacctgctgtccctggaaaccggcagcctgaagctggccaacggaagagtgatcgagaagacactgtacaacagaagaacccggcaggatgagcctgccctgttcgtggccctgaccttcgagcggcgggaggtcctggactcctccaatatcaaaccaatgaacctgatcggcgtggcaagaggcgaaaacatccccgccgtgatcgccctgaccgaccccgagggctgcccactgagccggtttaaggatagcctgggaaacccaacccacatcctgagaatcggcgagagctataaggagaagcagcggaccatccaggccaagaaggaggtggagcagcggagagccggcggctacagccggaagtacgccagcaaagccaagaatctggcagacgatatggtgagaaacaccgctagagatctgctgtactacgccgtgacccaggatgccatgctgatcttcgccaacctgagccggggcttcggccggcagggcaagcggaccttcatggccgagagacagtacacacggatggaggactggctgaccgccaagctggcctacgagggcctgagcaagacctacctgtccaagacactggcccagtacacctccaagacatgcagcaactgtgggtttaccatcaccagcgccgactacgacagggtgctggagaagctgaagaagacagcaacaggctggatgaccacaattaacggcaaggagctgaaggtggagggccagattacctactacaacagatacaagagacagaacgtagtcaaggacctgtccgtcgagctggatagactgagcgaagaatctgtgaacaacgacatctcctcctggacaaagggcagaagcggagaagctctgagcctcctgaagaaaagattctcccatagacccgtgcaggagaagttcgtgtgcctgaactgcggcttcgagacacacgcagccgagcaagccgccctgaacatcgccagatcctggctgttcctgcggagccaggagtacaagaaataccagacaaacaagacaaccggcaacaccgataagagagccttcgtcgagacctggcagtccttttaccggaagaagcttaaggaggtgtggaaacctgccgtgcggtctggcggatctggcggaggctccacaagccagatgcccgtgaagttcgaggacatcgccgtgagcttcagccaggaggagtgggagtacctgaacgaggagcagaaggagctgtacagggaggtgatggaggagaactaccagaccctgatcagcctgggcatcggcagccccagcgtgacccccgacatcatcagccacatcgagggcggcgaggagccctacatcagggaggagcccggcagcgaggagagggagcccggcaggagcagcaccagccccaagaaaaagagaaaagtctaagctgccttctgcggggcttgccttctggccatgcccttcttctctcccttgcacctgtacctcttggtctttgaataaagcctgagtaggaaggctagcaaaaaaaaaaaaaaaaaaaaaaaaaaaaaaaaaaaaaaaaaaaaaaaaaaaaaaaaaaaaaaaaaaaaaaaaaaaaaaaa

SEQ ID NO: 6080 - RNA, 5797 nt, synthetic construct
  source 1..5797: mol_type = other RNA
aggaaataagagagaaaagaagagtaagaagaaatataagagccaccatggcccctaagaagaagcgtaaagtgagccggatggaacgcctcgtctacgaggtgcggcagaagtgcagaaacatcgaggacatctgcatctcctgcggatctctgaacgtgaccctggagcacccactgttcatcggcggcatgtgccagaactgtaaaaactgttttctggagtgtgcctatcaatacgacgatgacggctaccagagctactgcaccatctgttgcggcggaagagaggtgctgatgtgtggaaataacaactgctgccggtgcttctgcgtggaatgcgtggacctgctggtgggccccggcgccgcccaggccgctattaaggaagatccttggaactgctacatgtgcggccacaagggcacatacggcctgctgagacggagagaggactggcctagcagactgcagatgttcttcgccaataaccacgaccaggagttcgacccccctaaggtgtaccctcccgtccccgccgagaagagaaagcccatccgggtcctgagcctgttcgatggcatcgccaccggtctgctggtgctgaaggacctgggcatccaggtggataggtacattgcctccgaggtgtgcgaggactccatcaccgtgggaatggtgcgtcatcagggcaagatcatgtacgtgggcgacgtgcggagcgtgacacagaagcatatccaggagtggggccctttcgacctggtgatcggcggcagcccttgcaatgacctgagcatcgtgaacccagcccggaagggcctgtacgagggaaccggcagactgttcttcgagttttacagactgctgcacgacgcccggcctaaggaaggcgacgaccggcccttcttttggctgttcgagaatgtggtggccatgggagtcagcgacaagcgggatattagccggttcctggagagcaaccccgtgatgatcgatgccaaggaagtgagcgccgcccaccgggccagatacttctggggcaatctgcctggcatgaacagacccctggccagcaccgtgaacgacaagctggagctgcaggagtgcctggagcacggccggatcgccaagttcagcaaggtgagaaccatcaccacccgaagcaacagcatcaaacaaggcaaggaccagcactttcctgtgttcatgaacgagaaggaggacatcctgtggtgtaccgagatggagagagtgttcgggttcccagtccactacacagatgtcagcaacatgtctagactggccagacagagactgctgggaagaagctggtccgtccctgtgatcagacacctgttcgcccctctgaaggagtacttcgcctgcgtgagcagcggcaacagcaacgccaacagccggggccccagcttctctagcggcctggtgccactgtccctgagagggagccacatgggccccatggagatctacaaaaccgtgagcgcctggaagcggcagcctgtgcgcgtgctgagcctgtttcggaatatcgataaagtcctgaaaagcctgggattcctggagagcggctctggctccggcggtggcaccctgaagtacgtggaggatgtgacaaacgtggtcagacgggatgtggagaagtggggccccttcgatctggtgtacggcagcacccaacccctgggcagctcttgtgaccggtgccctggctggtacatgtttcagttccaccggatcctgcagtacgccctgccgagacaggagtcccagcggccattcttttggattttcatggacaacttgctgctgaccgaggatgaccaggaaactaccactcggttcctgcagaccgaagccgtgaccctgcaggacgtgagaggccgggactaccagaacgccatgcgggtgtggtccaacatccctggactgaaaagcaagcacgcacctctgacccctaaagaagaggagtacctgcaggcccaggtgcggagcagaagcaagctggacgcccctaaggtggatctgctggtgaagaattgcctcctgcccctgagagagtacttcaagtatttcagccagaatagtctgcccctgggcggcccaagcagcggcgcccctcctcccagcggcggcagcccagccggctccccaacctctaccgaggagggcacctctgagtccgccacccccgagagcggccctggcacctccaccgagcccagcgagggcagcgcacccggcagccctgccggcagccccacctccacagaggagggaaccagcaccgagcccagcgaaggcagcgccccaggcaccagcaccgagcctagtgagggcggctctggcggcggcagcgcccaggagattaaacggatcaacaagatcagaagaagacttgtgaaagacagcaacaccaagaaggccggcaagacaggccccatgaaaaccctgctggttagagtgatgacacccgatctgagagagcggctggaaaacctgagaaagaagcctgaaaatatcccccagcccatcagcaatacatctagagccaacctgaataagctgctgaccgattacaccgaaatgaagaaggcgatcctgcatgtgtactgggaagagttccagaaggaccctgtgggcctgatgagccgggtggcccagcctgccagcaagaagatcgatcagaacaagctgaaacctgagatggacgagaagggcaacctgaccaccgccggctttgcctgctctcagtgtggccagcccctgttcgtgtacaagctggagcaggtgtctgagaagggcaaggcttacaccaactacttcggacggtgcaatgtggccgagcacgaaaagctgatcctgctggcccagctgaagcccgagaaggatagcgacgaagccgtgacatatagcctgggaaagtttgggcagagggccctggatttctacagcattcatgtgaccaaggagtccacccaccccgtgaagcccctggcccagatcgccggaaacagatacgcctccggacctgtgggaaaggccctgagcgacgcatgtatgggcacaatcgcctccttcctgtctaagtaccaggacatcatcatcgaacaccagaaggtggtgaagggcaaccagaagagactggagagcctgcgggagctggccggcaaggaaaacctggaataccctagcgtgaccctgccacctcagcctcacaccaaggagggcgttgatgcctacaacgaagtgatcgcccgggtgcgaatgtgggtgaacctgaacctgtggcagaagctgaagctaagcagagatgatgccaagcctctgctgagactgaagggattcccttcctttcctctggtcgagagacaggccaacgaagtggactggtgggacatggtgtgtaacgtgaagaagctgatcaacgagaaaaaggaggatggcaaggtgttttggcagaatctggctggctacaagagacaggaagccctgagaccatacctgagcagcgaggaagatcggaagaagggaaagaaattcgctcggtaccagctgggcgacctgctgctgcacctggaaaagaagcacggcgaggactggggaaaggtgtacgacgaggcctgggagcggattgacaagaaagtggaaggcctgagcaagcacatcaagctggaagaggaacggagaagcgaggacgcccagagcaaggccgccctgaccgactggctgcgggctaaggccagcttcgtgatcgagggcctgaaggaggccgacaaggacgagttctgcagatgcgagctgaagctgcagaagtggtacggggacctgcggggaaagcccttcgccatcgaagccgagaacagcatcctggacatcagcggcttcagcaagcagtacaactgtgccttcatctggcagaaggacggcgtgaagaagctgaacctgtacctgatcatcaactacttcaagggcggcaagctgcggttcaagaagatcaaacctgaagccttcgaagccaacagattctacaccgtgatcaacaaaaagagcggcgagatcgtgcccatggaggtgaacttcaacttcgacgaccccaacctgatcatcctgcctctggcctttggcaagagacagggcagagaattcatctggaacgacctgctgtccctggaaaccggcagcctgaagctggccaacggaagagtgatcgagaagacactgtacaacagaagaacccggcaggatgagcctgccctgttcgtggccctgaccttcgagcggcgggaggtcctggactcctccaatatcaaaccaatgaacctgatcggcgtggcaagaggcgaaaacatccccgccgtgatcgccctgaccgaccccgagggctgcccactgagccggtttaaggatagcctgggaaacccaacccacatcctgagaatcggcgagagctataaggagaagcagcggaccatccaggccaagaaggaggtggagcagcggagagccggcggctacagccggaagtacgccagcaaagccaagaatctggcagacgatatggtgagaaacaccgctagagatctgctgtactacgccgtgacccaggatgccatgctgatcttcgccaacctgagccggggcttcggccggcagggcaagcggaccttcatggccgagagacagtacacacggatggaggactggctgaccgccaagctggcctacgagggcctgagcaagacctacctgtccaagacactggcccagtacacctccaagacatgcagcaactgtgggtttaccatcaccagcgccgactacgacagggtgctggagaagctgaagaagacagcaacaggctggatgaccacaattaacggcaaggagctgaaggtggagggccagattacctactacaacagatacaagagacagaacgtagtcaaggacctgtccgtcgagctggatagactgagcgaagaatctgtgaacaacgacatctcctcctggacaaagggcagaagcggagaagctctgagcctcctgaagaaaagattctcccatagacccgtgcaggagaagttcgtgtgcctgaactgcggcttcgagacacacgcagccgagcaagccgccctgaacatcgccagatcctggctgttcctgcggagccaggagtacaagaaataccagacaaacaagacaaccggcaacaccgataagagagccttcgtcgagacctggcagtccttttaccggaagaagcttaaggaggtgtggaaacctgccgtgcggtctggcggatctggcggaggctccacaagcatggacagcgtgaccatcgaggacgtggccgtggacttcaccctggaggagtgggccctgctgggccccagccagaggaagctgtacagggacgtgatgcaggagaccctgaggaacctggccgccgtgggcgccaagagggagtaccacgccatcgaggaccagtacaagaaccagggcaggaagctgaggaccttcatggtggagaggttctgcaagagcaaggacatcagcctgtgcggcaccagccccaagaaaaagagaaaagtctaagctgccttctgcggggcttgccttctggccatgcccttcttctctcccttgcacctgtacctcttggtctttgaataaagcctgagtaggaaggctagcaaaaaaaaaaaaaaaaaaaaaaaaaaaaaaaaaaaaaaaaaaaaaaaaaaaaaaaaaaaaaaaaaaaaaaaaaaaaaaaa

SEQ ID NO: 6081 - RNA, 5797 nt, synthetic construct
  source 1..5797: mol_type = other RNA
aggaaataagagagaaaagaagagtaagaagaaatataagagccaccatggcccctaagaagaagcgtaaagtgagccggatggaacgcctcgtctacgaggtgcggcagaagtgcagaaacatcgaggacatctgcatctcctgcggatctctgaacgtgaccctggagcacccactgttcatcggcggcatgtgccagaactgtaaaaactgttttctggagtgtgcctatcaatacgacgatgacggctaccagagctactgcaccatctgttgcggcggaagagaggtgctgatgtgtggaaataacaactgctgccggtgcttctgcgtggaatgcgtggacctgctggtgggccccggcgccgcccaggccgctattaaggaagatccttggaactgctacatgtgcggccacaagggcacatacggcctgctgagacggagagaggactggcctagcagactgcagatgttcttcgccaataaccacgaccaggagttcgacccccctaaggtgtaccctcccgtccccgccgagaagagaaagcccatccgggtcctgagcctgttcgatggcatcgccaccggtctgctggtgctgaaggacctgggcatccaggtggataggtacattgcctccgaggtgtgcgaggactccatcaccgtgggaatggtgcgtcatcagggcaagatcatgtacgtgggcgacgtgcggagcgtgacacagaagcatatccaggagtggggccctttcgacctggtgatcggcggcagcccttgcaatgacctgagcatcgtgaacccagcccggaagggcctgtacgagggaaccggcagactgttcttcgagttttacagactgctgcacgacgcccggcctaaggaaggcgacgaccggcccttcttttggctgttcgagaatgtggtggccatgggagtcagcgacaagcgggatattagccggttcctggagagcaaccccgtgatgatcgatgccaaggaagtgagcgccgcccaccgggccagatacttctggggcaatctgcctggcatgaacagacccctggccagcaccgtgaacgacaagctggagctgcaggagtgcctggagcacggccggatcgccaagttcagcaaggtgagaaccatcaccacccgaagcaacagcatcaaacaaggcaaggaccagcactttcctgtgttcatgaacgagaaggaggacatcctgtggtgtaccgagatggagagagtgttcgggttcccagtccactacacagatgtcagcaacatgtctagactggccagacagagactgctgggaagaagctggtccgtccctgtgatcagacacctgttcgcccctctgaaggagtacttcgcctgcgtgagcagcggcaacagcaacgccaacagccggggccccagcttctctagcggcctggtgccactgtccctgagagggagccacatgggccccatggagatctacaaaaccgtgagcgcctggaagcggcagcctgtgcgcgtgctgagcctgtttcggaatatcgataaagtcctgaaaagcctgggattcctggagagcggctctggctccggcggtggcaccctgaagtacgtggaggatgtgacaaacgtggtcagacgggatgtggagaagtggggccccttcgatctggtgtacggcagcacccaacccctgggcagctcttgtgaccggtgccctggctggtacatgtttcagttccaccggatcctgcagtacgccctgccgagacaggagtcccagcggccattcttttggattttcatggacaacttgctgctgaccgaggatgaccaggaaactaccactcggttcctgcagaccgaagccgtgaccctgcaggacgtgagaggccgggactaccagaacgccatgcgggtgtggtccaacatccctggactgaaaagcaagcacgcacctctgacccctaaagaagaggagtacctgcaggcccaggtgcggagcagaagcaagctggacgcccctaaggtggatctgctggtgaagaattgcctcctgcccctgagagagtacttcaagtatttcagccagaatagtctgcccctgggcggcccaagcagcggcgcccctcctcccagcggcggcagcccagccggctccccaacctctaccgaggagggcacctctgagtccgccacccccgagagcggccctggcacctccaccgagcccagcgagggcagcgcacccggcagccctgccggcagccccacctccacagaggagggaaccagcaccgagcccagcgaaggcagcgccccaggcaccagcaccgagcctagtgagggcggctctggcggcggcagcgcccaggagattaaacggatcaacaagatcagaagaagacttgtgaaagacagcaacaccaagaaggccggcaagacaggccccatgaaaaccctgctggttagagtgatgacacccgatctgagagagcggctggaaaacctgagaaagaagcctgaaaatatcccccagcccatcagcaatacatctagagccaacctgaataagctgctgaccgattacaccgaaatgaagaaggcgatcctgcatgtgtactgggaagagttccagaaggaccctgtgggcctgatgagccgggtggcccagcctgccagcaagaagatcgatcagaacaagctgaaacctgagatggacgagaagggcaacctgaccaccgccggctttgcctgctctcagtgtggccagcccctgttcgtgtacaagctggagcaggtgtctgagaagggcaaggcttacaccaactacttcggacggtgcaatgtggccgagcacgaaaagctgatcctgctggcccagctgaagcccgagaaggatagcgacgaagccgtgacatatagcctgggaaagtttgggcagagggccctggatttctacagcattcatgtgaccaaggagtccacccaccccgtgaagcccctggcccagatcgccggaaacagatacgcctccggacctgtgggaaaggccctgagcgacgcatgtatgggcacaatcgcctccttcctgtctaagtaccaggacatcatcatcgaacaccagaaggtggtgaagggcaaccagaagagactggagagcctgcgggagctggccggcaaggaaaacctggaataccctagcgtgaccctgccacctcagcctcacaccaaggagggcgttgatgcctacaacgaagtgatcgcccgggtgcgaatgtgggtgaacctgaacctgtggcagaagctgaagctaagcagagatgatgccaagcctctgctgagactgaagggattcccttcctttcctctggtcgagagacaggccaacgaagtggactggtgggacatggtgtgtaacgtgaagaagctgatcaacgagaaaaaggaggatggcaaggtgttttggcagaatctggctggctacaagagacaggaagccctgagaccatacctgagcagcgaggaagatcggaagaagggaaagaaattcgctcggtaccagctgggcgacctgctgctgcacctggaaaagaagcacggcgaggactggggaaaggtgtacgacgaggcctgggagcggattgacaagaaagtggaaggcctgagcaagcacatcaagctggaagaggaacggagaagcgaggacgcccagagcaaggccgccctgaccgactggctgcgggctaaggccagcttcgtgatcgagggcctgaaggaggccgacaaggacgagttctgcagatgcgagctgaagctgcagaagtggtacggggacctgcggggaaagcccttcgccatcgaagccgagaacagcatcctggacatcagcggcttcagcaagcagtacaactgtgccttcatctggcagaaggacggcgtgaagaagctgaacctgtacctgatcatcaactacttcaagggcggcaagctgcggttcaagaagatcaaacctgaagccttcgaagccaacagattctacaccgtgatcaacaaaaagagcggcgagatcgtgcccatggaggtgaacttcaacttcgacgaccccaacctgatcatcctgcctctggcctttggcaagagacagggcagagaattcatctggaacgacctgctgtccctggaaaccggcagcctgaagctggccaacggaagagtgatcgagaagacactgtacaacagaagaacccggcaggatgagcctgccctgttcgtggccctgaccttcgagcggcgggaggtcctggactcctccaatatcaaaccaatgaacctgatcggcgtggcaagaggcgaaaacatccccgccgtgatcgccctgaccgaccccgagggctgcccactgagccggtttaaggatagcctgggaaacccaacccacatcctgagaatcggcgagagctataaggagaagcagcggaccatccaggccaagaaggaggtggagcagcggagagccggcggctacagccggaagtacgccagcaaagccaagaatctggcagacgatatggtgagaaacaccgctagagatctgctgtactacgccgtgacccaggatgccatgctgatcttcgccaacctgagccggggcttcggccggcagggcaagcggaccttcatggccgagagacagtacacacggatggaggactggctgaccgccaagctggcctacgagggcctgagcaagacctacctgtccaagacactggcccagtacacctccaagacatgcagcaactgtgggtttaccatcaccagcgccgactacgacagggtgctggagaagctgaagaagacagcaacaggctggatgaccacaattaacggcaaggagctgaaggtggagggccagattacctactacaacagatacaagagacagaacgtagtcaaggacctgtccgtcgagctggatagactgagcgaagaatctgtgaacaacgacatctcctcctggacaaagggcagaagcggagaagctctgagcctcctgaagaaaagattctcccatagacccgtgcaggagaagttcgtgtgcctgaactgcggcttcgagacacacgcagccgagcaagccgccctgaacatcgccagatcctggctgttcctgcggagccaggagtacaagaaataccagacaaacaagacaaccggcaacaccgataagagagccttcgtcgagacctggcagtccttttaccggaagaagcttaaggaggtgtggaaacctgccgtgcggtctggcggatctggcggaggctccacaagcttccaggagcccgtgaccttcgaggacgtggccgtgtacttcacccagaacgagtggaccagcctgcagcccagccagagggccctgttcagggaggtgatgctggagaactacgccaccgtgaccagcctgagcgccttccccttccccaagcccgacctgatcttcaggctggagcagggcgaggccgcctggggccccgacccctggaccctggccggcgaggaggccctgaggggcctgaccagccccaagaaaaagagaaaagtctaagctgccttctgcggggcttgccttctggccatgcccttcttctctcccttgcacctgtacctcttggtctttgaataaagcctgagtaggaaggctagcaaaaaaaaaaaaaaaaaaaaaaaaaaaaaaaaaaaaaaaaaaaaaaaaaaaaaaaaaaaaaaaaaaaaaaaaaaaaaaaa

SEQ ID NO: 6082 - RNA, 5797 nt, synthetic construct
  source 1..5797: mol_type = other RNA
aggaaataagagagaaaagaagagtaagaagaaatataagagccaccatggcccctaagaagaagcgtaaagtgagccggatggaacgcctcgtctacgaggtgcggcagaagtgcagaaacatcgaggacatctgcatctcctgcggatctctgaacgtgaccctggagcacccactgttcatcggcggcatgtgccagaactgtaaaaactgttttctggagtgtgcctatcaatacgacgatgacggctaccagagctactgcaccatctgttgcggcggaagagaggtgctgatgtgtggaaataacaactgctgccggtgcttctgcgtggaatgcgtggacctgctggtgggccccggcgccgcccaggccgctattaaggaagatccttggaactgctacatgtgcggccacaagggcacatacggcctgctgagacggagagaggactggcctagcagactgcagatgttcttcgccaataaccacgaccaggagttcgacccccctaaggtgtaccctcccgtccccgccgagaagagaaagcccatccgggtcctgagcctgttcgatggcatcgccaccggtctgctggtgctgaaggacctgggcatccaggtggataggtacattgcctccgaggtgtgcgaggactccatcaccgtgggaatggtgcgtcatcagggcaagatcatgtacgtgggcgacgtgcggagcgtgacacagaagcatatccaggagtggggccctttcgacctggtgatcggcggcagcccttgcaatgacctgagcatcgtgaacccagcccggaagggcctgtacgagggaaccggcagactgttcttcgagttttacagactgctgcacgacgcccggcctaaggaaggcgacgaccggcccttcttttggctgttcgagaatgtggtggccatgggagtcagcgacaagcgggatattagccggttcctggagagcaaccccgtgatgatcgatgccaaggaagtgagcgccgcccaccgggccagatacttctggggcaatctgcctggcatgaacagacccctggccagcaccgtgaacgacaagctggagctgcaggagtgcctggagcacggccggatcgccaagttcagcaaggtgagaaccatcaccacccgaagcaacagcatcaaacaaggcaaggaccagcactttcctgtgttcatgaacgagaaggaggacatcctgtggtgtaccgagatggagagagtgttcgggttcccagtccactacacagatgtcagcaacatgtctagactggccagacagagactgctgggaagaagctggtccgtccctgtgatcagacacctgttcgcccctctgaaggagtacttcgcctgcgtgagcagcggcaacagcaacgccaacagccggggccccagcttctctagcggcctggtgccactgtccctgagagggagccacatgggccccatggagatctacaaaaccgtgagcgcctggaagcggcagcctgtgcgcgtgctgagcctgtttcggaatatcgataaagtcctgaaaagcctgggattcctggagagcggctctggctccggcggtggcaccctgaagtacgtggaggatgtgacaaacgtggtcagacgggatgtggagaagtggggccccttcgatctggtgtacggcagcacccaacccctgggcagctcttgtgaccggtgccctggctggtacatgtttcagttccaccggatcctgcagtacgccctgccgagacaggagtcccagcggccattcttttggattttcatggacaacttgctgctgaccgaggatgaccaggaaactaccactcggttcctgcagaccgaagccgtgaccctgcaggacgtgagaggccgggactaccagaacgccatgcgggtgtggtccaacatccctggactgaaaagcaagcacgcacctctgacccctaaagaagaggagtacctgcaggcccaggtgcggagcagaagcaagctggacgcccctaaggtggatctgctggtgaagaattgcctcctgcccctgagagagtacttcaagtatttcagccagaatagtctgcccctgggcggcccaagcagcggcgcccctcctcccagcggcggcagcccagccggctccccaacctctaccgaggagggcacctctgagtccgccacccccgagagcggccctggcacctccaccgagcccagcgagggcagcgcacccggcagccctgccggcagccccacctccacagaggagggaaccagcaccgagcccagcgaaggcagcgccccaggcaccagcaccgagcctagtgagggcggctctggcggcggcagcgcccaggagattaaacggatcaacaagatcagaagaagacttgtgaaagacagcaacaccaagaaggccggcaagacaggccccatgaaaaccctgctggttagagtgatgacacccgatctgagagagcggctggaaaacctgagaaagaagcctgaaaatatcccccagcccatcagcaatacatctagagccaacctgaataagctgctgaccgattacaccgaaatgaagaaggcgatcctgcatgtgtactgggaagagttccagaaggaccctgtgggcctgatgagccgggtggcccagcctgccagcaagaagatcgatcagaacaagctgaaacctgagatggacgagaagggcaacctgaccaccgccggctttgcctgctctcagtgtggccagcccctgttcgtgtacaagctggagcaggtgtctgagaagggcaaggcttacaccaactacttcggacggtgcaatgtggccgagcacgaaaagctgatcctgctggcccagctgaagcccgagaaggatagcgacgaagccgtgacatatagcctgggaaagtttgggcagagggccctggatttctacagcattcatgtgaccaaggagtccacccaccccgtgaagcccctggcccagatcgccggaaacagatacgcctccggacctgtgggaaaggccctgagcgacgcatgtatgggcacaatcgcctccttcctgtctaagtaccaggacatcatcatcgaacaccagaaggtggtgaagggcaaccagaagagactggagagcctgcgggagctggccggcaaggaaaacctggaataccctagcgtgaccctgccacctcagcctcacaccaaggagggcgttgatgcctacaacgaagtgatcgcccgggtgcgaatgtgggtgaacctgaacctgtggcagaagctgaagctaagcagagatgatgccaagcctctgctgagactgaagggattcccttcctttcctctggtcgagagacaggccaacgaagtggactggtgggacatggtgtgtaacgtgaagaagctgatcaacgagaaaaaggaggatggcaaggtgttttggcagaatctggctggctacaagagacaggaagccctgagaccatacctgagcagcgaggaagatcggaagaagggaaagaaattcgctcggtaccagctgggcgacctgctgctgcacctggaaaagaagcacggcgaggactggggaaaggtgtacgacgaggcctgggagcggattgacaagaaagtggaaggcctgagcaagcacatcaagctggaagaggaacggagaagcgaggacgcccagagcaaggccgccctgaccgactggctgcgggctaaggccagcttcgtgatcgagggcctgaaggaggccgacaaggacgagttctgcagatgcgagctgaagctgcagaagtggtacggggacctgcggggaaagcccttcgccatcgaagccgagaacagcatcctggacatcagcggcttcagcaagcagtacaactgtgccttcatctggcagaaggacggcgtgaagaagctgaacctgtacctgatcatcaactacttcaagggcggcaagctgcggttcaagaagatcaaacctgaagccttcgaagccaacagattctacaccgtgatcaacaaaaagagcggcgagatcgtgcccatggaggtgaacttcaacttcgacgaccccaacctgatcatcctgcctctggcctttggcaagagacagggcagagaattcatctggaacgacctgctgtccctggaaaccggcagcctgaagctggccaacggaagagtgatcgagaagacactgtacaacagaagaacccggcaggatgagcctgccctgttcgtggccctgaccttcgagcggcgggaggtcctggactcctccaatatcaaaccaatgaacctgatcggcgtggcaagaggcgaaaacatccccgccgtgatcgccctgaccgaccccgagggctgcccactgagccggtttaaggatagcctgggaaacccaacccacatcctgagaatcggcgagagctataaggagaagcagcggaccatccaggccaagaaggaggtggagcagcggagagccggcggctacagccggaagtacgccagcaaagccaagaatctggcagacgatatggtgagaaacaccgctagagatctgctgtactacgccgtgacccaggatgccatgctgatcttcgccaacctgagccggggcttcggccggcagggcaagcggaccttcatggccgagagacagtacacacggatggaggactggctgaccgccaagctggcctacgagggcctgagcaagacctacctgtccaagacactggcccagtacacctccaagacatgcagcaactgtgggtttaccatcaccagcgccgactacgacagggtgctggagaagctgaagaagacagcaacaggctggatgaccacaattaacggcaaggagctgaaggtggagggccagattacctactacaacagatacaagagacagaacgtagtcaaggacctgtccgtcgagctggatagactgagcgaagaatctgtgaacaacgacatctcctcctggacaaagggcagaagcggagaagctctgagcctcctgaagaaaagattctcccatagacccgtgcaggagaagttcgtgtgcctgaactgcggcttcgagacacacgcagccgagcaagccgccctgaacatcgccagatcctggctgttcctgcggagccaggagtacaagaaataccagacaaacaagacaaccggcaacaccgataagagagccttcgtcgagacctggcagtccttttaccggaagaagcttaaggaggtgtggaaacctgccgtgcggtctggcggatctggcggaggctccacaagcatgatcgagtaccagatccccgtgagcttcaaggacgtggtggtgggcttcacccaggaggagtggcaccagctgagccccgcccagagggccctgtacagggacgtgatgctggagacctacagcaacctggtgagcgtgggctacgagggcaccaagcccgacgtgatcctgaggctggagcaggaggaggccccctggatcggcgaggccgcctgccccggctgccactgctgggaggacaccagccccaagaaaaagagaaaagtctaagctgccttctgcggggcttgccttctggccatgcccttcttctctcccttgcacctgtacctcttggtctttgaataaagcctgagtaggaaggctagcaaaaaaaaaaaaaaaaaaaaaaaaaaaaaaaaaaaaaaaaaaaaaaaaaaaaaaaaaaaaaaaaaaaaaaaaaaaaaaaa

SEQ ID NO: 6083 - RNA, 5797 nt, synthetic construct
  source 1..5797: mol_type = other RNA
aggaaataagagagaaaagaagagtaagaagaaatataagagccaccatggcccctaagaagaagcgtaaagtgagccggatggaacgcctcgtctacgaggtgcggcagaagtgcagaaacatcgaggacatctgcatctcctgcggatctctgaacgtgaccctggagcacccactgttcatcggcggcatgtgccagaactgtaaaaactgttttctggagtgtgcctatcaatacgacgatgacggctaccagagctactgcaccatctgttgcggcggaagagaggtgctgatgtgtggaaataacaactgctgccggtgcttctgcgtggaatgcgtggacctgctggtgggccccggcgccgcccaggccgctattaaggaagatccttggaactgctacatgtgcggccacaagggcacatacggcctgctgagacggagagaggactggcctagcagactgcagatgttcttcgccaataaccacgaccaggagttcgacccccctaaggtgtaccctcccgtccccgccgagaagagaaagcccatccgggtcctgagcctgttcgatggcatcgccaccggtctgctggtgctgaaggacctgggcatccaggtggataggtacattgcctccgaggtgtgcgaggactccatcaccgtgggaatggtgcgtcatcagggcaagatcatgtacgtgggcgacgtgcggagcgtgacacagaagcatatccaggagtggggccctttcgacctggtgatcggcggcagcccttgcaatgacctgagcatcgtgaacccagcccggaagggcctgtacgagggaaccggcagactgttcttcgagttttacagactgctgcacgacgcccggcctaaggaaggcgacgaccggcccttcttttggctgttcgagaatgtggtggccatgggagtcagcgacaagcgggatattagccggttcctggagagcaaccccgtgatgatcgatgccaaggaagtgagcgccgcccaccgggccagatacttctggggcaatctgcctggcatgaacagacccctggccagcaccgtgaacgacaagctggagctgcaggagtgcctggagcacggccggatcgccaagttcagcaaggtgagaaccatcaccacccgaagcaacagcatcaaacaaggcaaggaccagcactttcctgtgttcatgaacgagaaggaggacatcctgtggtgtaccgagatggagagagtgttcgggttcccagtccactacacagatgtcagcaacatgtctagactggccagacagagactgctgggaagaagctggtccgtccctgtgatcagacacctgttcgcccctctgaaggagtacttcgcctgcgtgagcagcggcaacagcaacgccaacagccggggccccagcttctctagcggcctggtgccactgtccctgagagggagccacatgggccccatggagatctacaaaaccgtgagcgcctggaagcggcagcctgtgcgcgtgctgagcctgtttcggaatatcgataaagtcctgaaaagcctgggattcctggagagcggctctggctccggcggtggcaccctgaagtacgtggaggatgtgacaaacgtggtcagacgggatgtggagaagtggggccccttcgatctggtgtacggcagcacccaacccctgggcagctcttgtgaccggtgccctggctggtacatgtttcagttccaccggatcctgcagtacgccctgccgagacaggagtcccagcggccattcttttggattttcatggacaacttgctgctgaccgaggatgaccaggaaactaccactcggttcctgcagaccgaagccgtgaccctgcaggacgtgagaggccgggactaccagaacgccatgcgggtgtggtccaacatccctggactgaaaagcaagcacgcacctctgacccctaaagaagaggagtacctgcaggcccaggtgcggagcagaagcaagctggacgcccctaaggtggatctgctggtgaagaattgcctcctgcccctgagagagtacttcaagtatttcagccagaatagtctgcccctgggcggcccaagcagcggcgcccctcctcccagcggcggcagcccagccggctccccaacctctaccgaggagggcacctctgagtccgccacccccgagagcggccctggcacctccaccgagcccagcgagggcagcgcacccggcagccctgccggcagccccacctccacagaggagggaaccagcaccgagcccagcgaaggcagcgccccaggcaccagcaccgagcctagtgagggcggctctggcggcggcagcgcccaggagattaaacggatcaacaagatcagaagaagacttgtgaaagacagcaacaccaagaaggccggcaagacaggccccatgaaaaccctgctggttagagtgatgacacccgatctgagagagcggctggaaaacctgagaaagaagcctgaaaatatcccccagcccatcagcaatacatctagagccaacctgaataagctgctgaccgattacaccgaaatgaagaaggcgatcctgcatgtgtactgggaagagttccagaaggaccctgtgggcctgatgagccgggtggcccagcctgccagcaagaagatcgatcagaacaagctgaaacctgagatggacgagaagggcaacctgaccaccgccggctttgcctgctctcagtgtggccagcccctgttcgtgtacaagctggagcaggtgtctgagaagggcaaggcttacaccaactacttcggacggtgcaatgtggccgagcacgaaaagctgatcctgctggcccagctgaagcccgagaaggatagcgacgaagccgtgacatatagcctgggaaagtttgggcagagggccctggatttctacagcattcatgtgaccaaggagtccacccaccccgtgaagcccctggcccagatcgccggaaacagatacgcctccggacctgtgggaaaggccctgagcgacgcatgtatgggcacaatcgcctccttcctgtctaagtaccaggacatcatcatcgaacaccagaaggtggtgaagggcaaccagaagagactggagagcctgcgggagctggccggcaaggaaaacctggaataccctagcgtgaccctgccacctcagcctcacaccaaggagggcgttgatgcctacaacgaagtgatcgcccgggtgcgaatgtgggtgaacctgaacctgtggcagaagctgaagctaagcagagatgatgccaagcctctgctgagactgaagggattcccttcctttcctctggtcgagagacaggccaacgaagtggactggtgggacatggtgtgtaacgtgaagaagctgatcaacgagaaaaaggaggatggcaaggtgttttggcagaatctggctggctacaagagacaggaagccctgagaccatacctgagcagcgaggaagatcggaagaagggaaagaaattcgctcggtaccagctgggcgacctgctgctgcacctggaaaagaagcacggcgaggactggggaaaggtgtacgacgaggcctgggagcggattgacaagaaagtggaaggcctgagcaagcacatcaagctggaagaggaacggagaagcgaggacgcccagagcaaggccgccctgaccgactggctgcgggctaaggccagcttcgtgatcgagggcctgaaggaggccgacaaggacgagttctgcagatgcgagctgaagctgcagaagtggtacggggacctgcggggaaagcccttcgccatcgaagccgagaacagcatcctggacatcagcggcttcagcaagcagtacaactgtgccttcatctggcagaaggacggcgtgaagaagctgaacctgtacctgatcatcaactacttcaagggcggcaagctgcggttcaagaagatcaaacctgaagccttcgaagccaacagattctacaccgtgatcaacaaaaagagcggcgagatcgtgcccatggaggtgaacttcaacttcgacgaccccaacctgatcatcctgcctctggcctttggcaagagacagggcagagaattcatctggaacgacctgctgtccctggaaaccggcagcctgaagctggccaacggaagagtgatcgagaagacactgtacaacagaagaacccggcaggatgagcctgccctgttcgtggccctgaccttcgagcggcgggaggtcctggactcctccaatatcaaaccaatgaacctgatcggcgtggcaagaggcgaaaacatccccgccgtgatcgccctgaccgaccccgagggctgcccactgagccggtttaaggatagcctgggaaacccaacccacatcctgagaatcggcgagagctataaggagaagcagcggaccatccaggccaagaaggaggtggagcagcggagagccggcggctacagccggaagtacgccagcaaagccaagaatctggcagacgatatggtgagaaacaccgctagagatctgctgtactacgccgtgacccaggatgccatgctgatcttcgccaacctgagccggggcttcggccggcagggcaagcggaccttcatggccgagagacagtacacacggatggaggactggctgaccgccaagctggcctacgagggcctgagcaagacctacctgtccaagacactggcccagtacacctccaagacatgcagcaactgtgggtttaccatcaccagcgccgactacgacagggtgctggagaagctgaagaagacagcaacaggctggatgaccacaattaacggcaaggagctgaaggtggagggccagattacctactacaacagatacaagagacagaacgtagtcaaggacctgtccgtcgagctggatagactgagcgaagaatctgtgaacaacgacatctcctcctggacaaagggcagaagcggagaagctctgagcctcctgaagaaaagattctcccatagacccgtgcaggagaagttcgtgtgcctgaactgcggcttcgagacacacgcagccgagcaagccgccctgaacatcgccagatcctggctgttcctgcggagccaggagtacaagaaataccagacaaacaagacaaccggcaacaccgataagagagccttcgtcgagacctggcagtccttttaccggaagaagcttaaggaggtgtggaaacctgccgtgcggtctggcggatctggcggaggctccacaagcccccaggagctggtgaccttcgaggacgtggccgtgtacctgagcaaggaggagtggggcctgctggaccccgcccagaggaggctgtacagggacgtgatgctggagaactacggcaacgtggccagcctgggcctgcccgtgagcaagcccgacctgatcagccagctggagaggaccgacctgcccctggtgcccaggctgccccagaccgagatcgaggacctgttcgacgagaagctgaccagccccaagaaaaagagaaaagtctaagctgccttctgcggggcttgccttctggccatgcccttcttctctcccttgcacctgtacctcttggtctttgaataaagcctgagtaggaaggctagcaaaaaaaaaaaaaaaaaaaaaaaaaaaaaaaaaaaaaaaaaaaaaaaaaaaaaaaaaaaaaaaaaaaaaaaaaaaaaaaa

SEQ ID NO: 6084 - RNA, 5797 nt, synthetic construct
  source 1..5797: mol_type = other RNA
aggaaataagagagaaaagaagagtaagaagaaatataagagccaccatggcccctaagaagaagcgtaaagtgagccggatggaacgcctcgtctacgaggtgcggcagaagtgcagaaacatcgaggacatctgcatctcctgcggatctctgaacgtgaccctggagcacccactgttcatcggcggcatgtgccagaactgtaaaaactgttttctggagtgtgcctatcaatacgacgatgacggctaccagagctactgcaccatctgttgcggcggaagagaggtgctgatgtgtggaaataacaactgctgccggtgcttctgcgtggaatgcgtggacctgctggtgggccccggcgccgcccaggccgctattaaggaagatccttggaactgctacatgtgcggccacaagggcacatacggcctgctgagacggagagaggactggcctagcagactgcagatgttcttcgccaataaccacgaccaggagttcgacccccctaaggtgtaccctcccgtccccgccgagaagagaaagcccatccgggtcctgagcctgttcgatggcatcgccaccggtctgctggtgctgaaggacctgggcatccaggtggataggtacattgcctccgaggtgtgcgaggactccatcaccgtgggaatggtgcgtcatcagggcaagatcatgtacgtgggcgacgtgcggagcgtgacacagaagcatatccaggagtggggccctttcgacctggtgatcggcggcagcccttgcaatgacctgagcatcgtgaacccagcccggaagggcctgtacgagggaaccggcagactgttcttcgagttttacagactgctgcacgacgcccggcctaaggaaggcgacgaccggcccttcttttggctgttcgagaatgtggtggccatgggagtcagcgacaagcgggatattagccggttcctggagagcaaccccgtgatgatcgatgccaaggaagtgagcgccgcccaccgggccagatacttctggggcaatctgcctggcatgaacagacccctggccagcaccgtgaacgacaagctggagctgcaggagtgcctggagcacggccggatcgccaagttcagcaaggtgagaaccatcaccacccgaagcaacagcatcaaacaaggcaaggaccagcactttcctgtgttcatgaacgagaaggaggacatcctgtggtgtaccgagatggagagagtgttcgggttcccagtccactacacagatgtcagcaacatgtctagactggccagacagagactgctgggaagaagctggtccgtccctgtgatcagacacctgttcgcccctctgaaggagtacttcgcctgcgtgagcagcggcaacagcaacgccaacagccggggccccagcttctctagcggcctggtgccactgtccctgagagggagccacatgggccccatggagatctacaaaaccgtgagcgcctggaagcggcagcctgtgcgcgtgctgagcctgtttcggaatatcgataaagtcctgaaaagcctgggattcctggagagcggctctggctccggcggtggcaccctgaagtacgtggaggatgtgacaaacgtggtcagacgggatgtggagaagtggggccccttcgatctggtgtacggcagcacccaacccctgggcagctcttgtgaccggtgccctggctggtacatgtttcagttccaccggatcctgcagtacgccctgccgagacaggagtcccagcggccattcttttggattttcatggacaacttgctgctgaccgaggatgaccaggaaactaccactcggttcctgcagaccgaagccgtgaccctgcaggacgtgagaggccgggactaccagaacgccatgcgggtgtggtccaacatccctggactgaaaagcaagcacgcacctctgacccctaaagaagaggagtacctgcaggcccaggtgcggagcagaagcaagctggacgcccctaaggtggatctgctggtgaagaattgcctcctgcccctgagagagtacttcaagtatttcagccagaatagtctgcccctgggcggcccaagcagcggcgcccctcctcccagcggcggcagcccagccggctccccaacctctaccgaggagggcacctctgagtccgccacccccgagagcggccctggcacctccaccgagcccagcgagggcagcgcacccggcagccctgccggcagccccacctccacagaggagggaaccagcaccgagcccagcgaaggcagcgccccaggcaccagcaccgagcctagtgagggcggctctggcggcggcagcgcccaggagattaaacggatcaacaagatcagaagaagacttgtgaaagacagcaacaccaagaaggccggcaagacaggccccatgaaaaccctgctggttagagtgatgacacccgatctgagagagcggctggaaaacctgagaaagaagcctgaaaatatcccccagcccatcagcaatacatctagagccaacctgaataagctgctgaccgattacaccgaaatgaagaaggcgatcctgcatgtgtactgggaagagttccagaaggaccctgtgggcctgatgagccgggtggcccagcctgccagcaagaagatcgatcagaacaagctgaaacctgagatggacgagaagggcaacctgaccaccgccggctttgcctgctctcagtgtggccagcccctgttcgtgtacaagctggagcaggtgtctgagaagggcaaggcttacaccaactacttcggacggtgcaatgtggccgagcacgaaaagctgatcctgctggcccagctgaagcccgagaaggatagcgacgaagccgtgacatatagcctgggaaagtttgggcagagggccctggatttctacagcattcatgtgaccaaggagtccacccaccccgtgaagcccctggcccagatcgccggaaacagatacgcctccggacctgtgggaaaggccctgagcgacgcatgtatgggcacaatcgcctccttcctgtctaagtaccaggacatcatcatcgaacaccagaaggtggtgaagggcaaccagaagagactggagagcctgcgggagctggccggcaaggaaaacctggaataccctagcgtgaccctgccacctcagcctcacaccaaggagggcgttgatgcctacaacgaagtgatcgcccgggtgcgaatgtgggtgaacctgaacctgtggcagaagctgaagctaagcagagatgatgccaagcctctgctgagactgaagggattcccttcctttcctctggtcgagagacaggccaacgaagtggactggtgggacatggtgtgtaacgtgaagaagctgatcaacgagaaaaaggaggatggcaaggtgttttggcagaatctggctggctacaagagacaggaagccctgagaccatacctgagcagcgaggaagatcggaagaagggaaagaaattcgctcggtaccagctgggcgacctgctgctgcacctggaaaagaagcacggcgaggactggggaaaggtgtacgacgaggcctgggagcggattgacaagaaagtggaaggcctgagcaagcacatcaagctggaagaggaacggagaagcgaggacgcccagagcaaggccgccctgaccgactggctgcgggctaaggccagcttcgtgatcgagggcctgaaggaggccgacaaggacgagttctgcagatgcgagctgaagctgcagaagtggtacggggacctgcggggaaagcccttcgccatcgaagccgagaacagcatcctggacatcagcggcttcagcaagcagtacaactgtgccttcatctggcagaaggacggcgtgaagaagctgaacctgtacctgatcatcaactacttcaagggcggcaagctgcggttcaagaagatcaaacctgaagccttcgaagccaacagattctacaccgtgatcaacaaaaagagcggcgagatcgtgcccatggaggtgaacttcaacttcgacgaccccaacctgatcatcctgcctctggcctttggcaagagacagggcagagaattcatctggaacgacctgctgtccctggaaaccggcagcctgaagctggccaacggaagagtgatcgagaagacactgtacaacagaagaacccggcaggatgagcctgccctgttcgtggccctgaccttcgagcggcgggaggtcctggactcctccaatatcaaaccaatgaacctgatcggcgtggcaagaggcgaaaacatccccgccgtgatcgccctgaccgaccccgagggctgcccactgagccggtttaaggatagcctgggaaacccaacccacatcctgagaatcggcgagagctataaggagaagcagcggaccatccaggccaagaaggaggtggagcagcggagagccggcggctacagccggaagtacgccagcaaagccaagaatctggcagacgatatggtgagaaacaccgctagagatctgctgtactacgccgtgacccaggatgccatgctgatcttcgccaacctgagccggggcttcggccggcagggcaagcggaccttcatggccgagagacagtacacacggatggaggactggctgaccgccaagctggcctacgagggcctgagcaagacctacctgtccaagacactggcccagtacacctccaagacatgcagcaactgtgggtttaccatcaccagcgccgactacgacagggtgctggagaagctgaagaagacagcaacaggctggatgaccacaattaacggcaaggagctgaaggtggagggccagattacctactacaacagatacaagagacagaacgtagtcaaggacctgtccgtcgagctggatagactgagcgaagaatctgtgaacaacgacatctcctcctggacaaagggcagaagcggagaagctctgagcctcctgaagaaaagattctcccatagacccgtgcaggagaagttcgtgtgcctgaactgcggcttcgagacacacgcagccgagcaagccgccctgaacatcgccagatcctggctgttcctgcggagccaggagtacaagaaataccagacaaacaagacaaccggcaacaccgataagagagccttcgtcgagacctggcagtccttttaccggaagaagcttaaggaggtgtggaaacctgccgtgcggtctggcggatctggcggaggctccacaagcccccagggcctggtgaccttcggcgacgtggccgtggacttcagccaggaggagtgggagtggctgaaccccaaccagaggaacctgtacaggaaggtgatgctggagaactacaagaacctggccagcctgggcctgtgcgtgagcaagcccgacgtgatcagcagcctggagcagggcaaggagccctggaccgtgaagaggaagatgaccagggcctggtgccccgacctgaagatcgtgaccagccccaagaaaaagagaaaagtctaagctgccttctgcggggcttgccttctggccatgcccttcttctctcccttgcacctgtacctcttggtctttgaataaagcctgagtaggaaggctagcaaaaaaaaaaaaaaaaaaaaaaaaaaaaaaaaaaaaaaaaaaaaaaaaaaaaaaaaaaaaaaaaaaaaaaaaaaaaaaaa

SEQ ID NO: 6085 - RNA, 5797 nt, synthetic construct
  source 1..5797: mol_type = other RNA
aggaaataagagagaaaagaagagtaagaagaaatataagagccaccatggcccctaagaagaagcgtaaagtgagccggatggaacgcctcgtctacgaggtgcggcagaagtgcagaaacatcgaggacatctgcatctcctgcggatctctgaacgtgaccctggagcacccactgttcatcggcggcatgtgccagaactgtaaaaactgttttctggagtgtgcctatcaatacgacgatgacggctaccagagctactgcaccatctgttgcggcggaagagaggtgctgatgtgtggaaataacaactgctgccggtgcttctgcgtggaatgcgtggacctgctggtgggccccggcgccgcccaggccgctattaaggaagatccttggaactgctacatgtgcggccacaagggcacatacggcctgctgagacggagagaggactggcctagcagactgcagatgttcttcgccaataaccacgaccaggagttcgacccccctaaggtgtaccctcccgtccccgccgagaagagaaagcccatccgggtcctgagcctgttcgatggcatcgccaccggtctgctggtgctgaaggacctgggcatccaggtggataggtacattgcctccgaggtgtgcgaggactccatcaccgtgggaatggtgcgtcatcagggcaagatcatgtacgtgggcgacgtgcggagcgtgacacagaagcatatccaggagtggggccctttcgacctggtgatcggcggcagcccttgcaatgacctgagcatcgtgaacccagcccggaagggcctgtacgagggaaccggcagactgttcttcgagttttacagactgctgcacgacgcccggcctaaggaaggcgacgaccggcccttcttttggctgttcgagaatgtggtggccatgggagtcagcgacaagcgggatattagccggttcctggagagcaaccccgtgatgatcgatgccaaggaagtgagcgccgcccaccgggccagatacttctggggcaatctgcctggcatgaacagacccctggccagcaccgtgaacgacaagctggagctgcaggagtgcctggagcacggccggatcgccaagttcagcaaggtgagaaccatcaccacccgaagcaacagcatcaaacaaggcaaggaccagcactttcctgtgttcatgaacgagaaggaggacatcctgtggtgtaccgagatggagagagtgttcgggttcccagtccactacacagatgtcagcaacatgtctagactggccagacagagactgctgggaagaagctggtccgtccctgtgatcagacacctgttcgcccctctgaaggagtacttcgcctgcgtgagcagcggcaacagcaacgccaacagccggggccccagcttctctagcggcctggtgccactgtccctgagagggagccacatgggccccatggagatctacaaaaccgtgagcgcctggaagcggcagcctgtgcgcgtgctgagcctgtttcggaatatcgataaagtcctgaaaagcctgggattcctggagagcggctctggctccggcggtggcaccctgaagtacgtggaggatgtgacaaacgtggtcagacgggatgtggagaagtggggccccttcgatctggtgtacggcagcacccaacccctgggcagctcttgtgaccggtgccctggctggtacatgtttcagttccaccggatcctgcagtacgccctgccgagacaggagtcccagcggccattcttttggattttcatggacaacttgctgctgaccgaggatgaccaggaaactaccactcggttcctgcagaccgaagccgtgaccctgcaggacgtgagaggccgggactaccagaacgccatgcgggtgtggtccaacatccctggactgaaaagcaagcacgcacctctgacccctaaagaagaggagtacctgcaggcccaggtgcggagcagaagcaagctggacgcccctaaggtggatctgctggtgaagaattgcctcctgcccctgagagagtacttcaagtatttcagccagaatagtctgcccctgggcggcccaagcagcggcgcccctcctcccagcggcggcagcccagccggctccccaacctctaccgaggagggcacctctgagtccgccacccccgagagcggccctggcacctccaccgagcccagcgagggcagcgcacccggcagccctgccggcagccccacctccacagaggagggaaccagcaccgagcccagcgaaggcagcgccccaggcaccagcaccgagcctagtgagggcggctctggcggcggcagcgcccaggagattaaacggatcaacaagatcagaagaagacttgtgaaagacagcaacaccaagaaggccggcaagacaggccccatgaaaaccctgctggttagagtgatgacacccgatctgagagagcggctggaaaacctgagaaagaagcctgaaaatatcccccagcccatcagcaatacatctagagccaacctgaataagctgctgaccgattacaccgaaatgaagaaggcgatcctgcatgtgtactgggaagagttccagaaggaccctgtgggcctgatgagccgggtggcccagcctgccagcaagaagatcgatcagaacaagctgaaacctgagatggacgagaagggcaacctgaccaccgccggctttgcctgctctcagtgtggccagcccctgttcgtgtacaagctggagcaggtgtctgagaagggcaaggcttacaccaactacttcggacggtgcaatgtggccgagcacgaaaagctgatcctgctggcccagctgaagcccgagaaggatagcgacgaagccgtgacatatagcctgggaaagtttgggcagagggccctggatttctacagcattcatgtgaccaaggagtccacccaccccgtgaagcccctggcccagatcgccggaaacagatacgcctccggacctgtgggaaaggccctgagcgacgcatgtatgggcacaatcgcctccttcctgtctaagtaccaggacatcatcatcgaacaccagaaggtggtgaagggcaaccagaagagactggagagcctgcgggagctggccggcaaggaaaacctggaataccctagcgtgaccctgccacctcagcctcacaccaaggagggcgttgatgcctacaacgaagtgatcgcccgggtgcgaatgtgggtgaacctgaacctgtggcagaagctgaagctaagcagagatgatgccaagcctctgctgagactgaagggattcccttcctttcctctggtcgagagacaggccaacgaagtggactggtgggacatggtgtgtaacgtgaagaagctgatcaacgagaaaaaggaggatggcaaggtgttttggcagaatctggctggctacaagagacaggaagccctgagaccatacctgagcagcgaggaagatcggaagaagggaaagaaattcgctcggtaccagctgggcgacctgctgctgcacctggaaaagaagcacggcgaggactggggaaaggtgtacgacgaggcctgggagcggattgacaagaaagtggaaggcctgagcaagcacatcaagctggaagaggaacggagaagcgaggacgcccagagcaaggccgccctgaccgactggctgcgggctaaggccagcttcgtgatcgagggcctgaaggaggccgacaaggacgagttctgcagatgcgagctgaagctgcagaagtggtacggggacctgcggggaaagcccttcgccatcgaagccgagaacagcatcctggacatcagcggcttcagcaagcagtacaactgtgccttcatctggcagaaggacggcgtgaagaagctgaacctgtacctgatcatcaactacttcaagggcggcaagctgcggttcaagaagatcaaacctgaagccttcgaagccaacagattctacaccgtgatcaacaaaaagagcggcgagatcgtgcccatggaggtgaacttcaacttcgacgaccccaacctgatcatcctgcctctggcctttggcaagagacagggcagagaattcatctggaacgacctgctgtccctggaaaccggcagcctgaagctggccaacggaagagtgatcgagaagacactgtacaacagaagaacccggcaggatgagcctgccctgttcgtggccctgaccttcgagcggcgggaggtcctggactcctccaatatcaaaccaatgaacctgatcggcgtggcaagaggcgaaaacatccccgccgtgatcgccctgaccgaccccgagggctgcccactgagccggtttaaggatagcctgggaaacccaacccacatcctgagaatcggcgagagctataaggagaagcagcggaccatccaggccaagaaggaggtggagcagcggagagccggcggctacagccggaagtacgccagcaaagccaagaatctggcagacgatatggtgagaaacaccgctagagatctgctgtactacgccgtgacccaggatgccatgctgatcttcgccaacctgagccggggcttcggccggcagggcaagcggaccttcatggccgagagacagtacacacggatggaggactggctgaccgccaagctggcctacgagggcctgagcaagacctacctgtccaagacactggcccagtacacctccaagacatgcagcaactgtgggtttaccatcaccagcgccgactacgacagggtgctggagaagctgaagaagacagcaacaggctggatgaccacaattaacggcaaggagctgaaggtggagggccagattacctactacaacagatacaagagacagaacgtagtcaaggacctgtccgtcgagctggatagactgagcgaagaatctgtgaacaacgacatctcctcctggacaaagggcagaagcggagaagctctgagcctcctgaagaaaagattctcccatagacccgtgcaggagaagttcgtgtgcctgaactgcggcttcgagacacacgcagccgagcaagccgccctgaacatcgccagatcctggctgttcctgcggagccaggagtacaagaaataccagacaaacaagacaaccggcaacaccgataagagagccttcgtcgagacctggcagtccttttaccggaagaagcttaaggaggtgtggaaacctgccgtgcggtctggcggatctggcggaggctccacaagcagcgtgaccttcagggacgtgatcgtggacttcacccaggaggagtgggagcagctgaagcccgtgcagaaggacctgtacagggacgtgatgatggagaactactggaacctggtgagcctggacctggagaccgagggcgacatgaacgaccccgaccccgagaaggacagctgggaggacaggcccagcgtgaccagcagcatgcccgccccccccaggctggagggccccaggggcgccaccagccccaagaaaaagagaaaagtctaagctgccttctgcggggcttgccttctggccatgcccttcttctctcccttgcacctgtacctcttggtctttgaataaagcctgagtaggaaggctagcaaaaaaaaaaaaaaaaaaaaaaaaaaaaaaaaaaaaaaaaaaaaaaaaaaaaaaaaaaaaaaaaaaaaaaaaaaaaaaaa

SEQ ID NO: 6086 - RNA, 5797 nt, synthetic construct
  source 1..5797: mol_type = other RNA
aggaaataagagagaaaagaagagtaagaagaaatataagagccaccatggcccctaagaagaagcgtaaagtgagccggatggaacgcctcgtctacgaggtgcggcagaagtgcagaaacatcgaggacatctgcatctcctgcggatctctgaacgtgaccctggagcacccactgttcatcggcggcatgtgccagaactgtaaaaactgttttctggagtgtgcctatcaatacgacgatgacggctaccagagctactgcaccatctgttgcggcggaagagaggtgctgatgtgtggaaataacaactgctgccggtgcttctgcgtggaatgcgtggacctgctggtgggccccggcgccgcccaggccgctattaaggaagatccttggaactgctacatgtgcggccacaagggcacatacggcctgctgagacggagagaggactggcctagcagactgcagatgttcttcgccaataaccacgaccaggagttcgacccccctaaggtgtaccctcccgtccccgccgagaagagaaagcccatccgggtcctgagcctgttcgatggcatcgccaccggtctgctggtgctgaaggacctgggcatccaggtggataggtacattgcctccgaggtgtgcgaggactccatcaccgtgggaatggtgcgtcatcagggcaagatcatgtacgtgggcgacgtgcggagcgtgacacagaagcatatccaggagtggggccctttcgacctggtgatcggcggcagcccttgcaatgacctgagcatcgtgaacccagcccggaagggcctgtacgagggaaccggcagactgttcttcgagttttacagactgctgcacgacgcccggcctaaggaaggcgacgaccggcccttcttttggctgttcgagaatgtggtggccatgggagtcagcgacaagcgggatattagccggttcctggagagcaaccccgtgatgatcgatgccaaggaagtgagcgccgcccaccgggccagatacttctggggcaatctgcctggcatgaacagacccctggccagcaccgtgaacgacaagctggagctgcaggagtgcctggagcacggccggatcgccaagttcagcaaggtgagaaccatcaccacccgaagcaacagcatcaaacaaggcaaggaccagcactttcctgtgttcatgaacgagaaggaggacatcctgtggtgtaccgagatggagagagtgttcgggttcccagtccactacacagatgtcagcaacatgtctagactggccagacagagactgctgggaagaagctggtccgtccctgtgatcagacacctgttcgcccctctgaaggagtacttcgcctgcgtgagcagcggcaacagcaacgccaacagccggggccccagcttctctagcggcctggtgccactgtccctgagagggagccacatgggccccatggagatctacaaaaccgtgagcgcctggaagcggcagcctgtgcgcgtgctgagcctgtttcggaatatcgataaagtcctgaaaagcctgggattcctggagagcggctctggctccggcggtggcaccctgaagtacgtggaggatgtgacaaacgtggtcagacgggatgtggagaagtggggccccttcgatctggtgtacggcagcacccaacccctgggcagctcttgtgaccggtgccctggctggtacatgtttcagttccaccggatcctgcagtacgccctgccgagacaggagtcccagcggccattcttttggattttcatggacaacttgctgctgaccgaggatgaccaggaaactaccactcggttcctgcagaccgaagccgtgaccctgcaggacgtgagaggccgggactaccagaacgccatgcgggtgtggtccaacatccctggactgaaaagcaagcacgcacctctgacccctaaagaagaggagtacctgcaggcccaggtgcggagcagaagcaagctggacgcccctaaggtggatctgctggtgaagaattgcctcctgcccctgagagagtacttcaagtatttcagccagaatagtctgcccctgggcggcccaagcagcggcgcccctcctcccagcggcggcagcccagccggctccccaacctctaccgaggagggcacctctgagtccgccacccccgagagcggccctggcacctccaccgagcccagcgagggcagcgcacccggcagccctgccggcagccccacctccacagaggagggaaccagcaccgagcccagcgaaggcagcgccccaggcaccagcaccgagcctagtgagggcggctctggcggcggcagcgcccaggagattaaacggatcaacaagatcagaagaagacttgtgaaagacagcaacaccaagaaggccggcaagacaggccccatgaaaaccctgctggttagagtgatgacacccgatctgagagagcggctggaaaacctgagaaagaagcctgaaaatatcccccagcccatcagcaatacatctagagccaacctgaataagctgctgaccgattacaccgaaatgaagaaggcgatcctgcatgtgtactgggaagagttccagaaggaccctgtgggcctgatgagccgggtggcccagcctgccagcaagaagatcgatcagaacaagctgaaacctgagatggacgagaagggcaacctgaccaccgccggctttgcctgctctcagtgtggccagcccctgttcgtgtacaagctggagcaggtgtctgagaagggcaaggcttacaccaactacttcggacggtgcaatgtggccgagcacgaaaagctgatcctgctggcccagctgaagcccgagaaggatagcgacgaagccgtgacatatagcctgggaaagtttgggcagagggccctggatttctacagcattcatgtgaccaaggagtccacccaccccgtgaagcccctggcccagatcgccggaaacagatacgcctccggacctgtgggaaaggccctgagcgacgcatgtatgggcacaatcgcctccttcctgtctaagtaccaggacatcatcatcgaacaccagaaggtggtgaagggcaaccagaagagactggagagcctgcgggagctggccggcaaggaaaacctggaataccctagcgtgaccctgccacctcagcctcacaccaaggagggcgttgatgcctacaacgaagtgatcgcccgggtgcgaatgtgggtgaacctgaacctgtggcagaagctgaagctaagcagagatgatgccaagcctctgctgagactgaagggattcccttcctttcctctggtcgagagacaggccaacgaagtggactggtgggacatggtgtgtaacgtgaagaagctgatcaacgagaaaaaggaggatggcaaggtgttttggcagaatctggctggctacaagagacaggaagccctgagaccatacctgagcagcgaggaagatcggaagaagggaaagaaattcgctcggtaccagctgggcgacctgctgctgcacctggaaaagaagcacggcgaggactggggaaaggtgtacgacgaggcctgggagcggattgacaagaaagtggaaggcctgagcaagcacatcaagctggaagaggaacggagaagcgaggacgcccagagcaaggccgccctgaccgactggctgcgggctaaggccagcttcgtgatcgagggcctgaaggaggccgacaaggacgagttctgcagatgcgagctgaagctgcagaagtggtacggggacctgcggggaaagcccttcgccatcgaagccgagaacagcatcctggacatcagcggcttcagcaagcagtacaactgtgccttcatctggcagaaggacggcgtgaagaagctgaacctgtacctgatcatcaactacttcaagggcggcaagctgcggttcaagaagatcaaacctgaagccttcgaagccaacagattctacaccgtgatcaacaaaaagagcggcgagatcgtgcccatggaggtgaacttcaacttcgacgaccccaacctgatcatcctgcctctggcctttggcaagagacagggcagagaattcatctggaacgacctgctgtccctggaaaccggcagcctgaagctggccaacggaagagtgatcgagaagacactgtacaacagaagaacccggcaggatgagcctgccctgttcgtggccctgaccttcgagcggcgggaggtcctggactcctccaatatcaaaccaatgaacctgatcggcgtggcaagaggcgaaaacatccccgccgtgatcgccctgaccgaccccgagggctgcccactgagccggtttaaggatagcctgggaaacccaacccacatcctgagaatcggcgagagctataaggagaagcagcggaccatccaggccaagaaggaggtggagcagcggagagccggcggctacagccggaagtacgccagcaaagccaagaatctggcagacgatatggtgagaaacaccgctagagatctgctgtactacgccgtgacccaggatgccatgctgatcttcgccaacctgagccggggcttcggccggcagggcaagcggaccttcatggccgagagacagtacacacggatggaggactggctgaccgccaagctggcctacgagggcctgagcaagacctacctgtccaagacactggcccagtacacctccaagacatgcagcaactgtgggtttaccatcaccagcgccgactacgacagggtgctggagaagctgaagaagacagcaacaggctggatgaccacaattaacggcaaggagctgaaggtggagggccagattacctactacaacagatacaagagacagaacgtagtcaaggacctgtccgtcgagctggatagactgagcgaagaatctgtgaacaacgacatctcctcctggacaaagggcagaagcggagaagctctgagcctcctgaagaaaagattctcccatagacccgtgcaggagaagttcgtgtgcctgaactgcggcttcgagacacacgcagccgagcaagccgccctgaacatcgccagatcctggctgttcctgcggagccaggagtacaagaaataccagacaaacaagacaaccggcaacaccgataagagagccttcgtcgagacctggcagtccttttaccggaagaagcttaaggaggtgtggaaacctgccgtgcggtctggcggatctggcggaggctccacaagccccgcccaggtgctggtgaccttcaaggacgtggccgtggacttcacccaggaggagtggaggctgctggacccccaccagaaggagctgtacaaggaggtgaccctggagaacgcctggaacatgctgagcatgggcctgcccgtgcccagggacctggtgagccacttcaagcaggtggaggccccctggatgctggaggaggagggcagcagcaacagctgcctggacggcgagaggaggaccagccccaagaaaaagagaaaagtctaagctgccttctgcggggcttgccttctggccatgcccttcttctctcccttgcacctgtacctcttggtctttgaataaagcctgagtaggaaggctagcaaaaaaaaaaaaaaaaaaaaaaaaaaaaaaaaaaaaaaaaaaaaaaaaaaaaaaaaaaaaaaaaaaaaaaaaaaaaaaaa

SEQ ID NO: 6087 - RNA, 5797 nt, synthetic construct
  source 1..5797: mol_type = other RNA
aggaaataagagagaaaagaagagtaagaagaaatataagagccaccatggcccctaagaagaagcgtaaagtgagccggatggaacgcctcgtctacgaggtgcggcagaagtgcagaaacatcgaggacatctgcatctcctgcggatctctgaacgtgaccctggagcacccactgttcatcggcggcatgtgccagaactgtaaaaactgttttctggagtgtgcctatcaatacgacgatgacggctaccagagctactgcaccatctgttgcggcggaagagaggtgctgatgtgtggaaataacaactgctgccggtgcttctgcgtggaatgcgtggacctgctggtgggccccggcgccgcccaggccgctattaaggaagatccttggaactgctacatgtgcggccacaagggcacatacggcctgctgagacggagagaggactggcctagcagactgcagatgttcttcgccaataaccacgaccaggagttcgacccccctaaggtgtaccctcccgtccccgccgagaagagaaagcccatccgggtcctgagcctgttcgatggcatcgccaccggtctgctggtgctgaaggacctgggcatccaggtggataggtacattgcctccgaggtgtgcgaggactccatcaccgtgggaatggtgcgtcatcagggcaagatcatgtacgtgggcgacgtgcggagcgtgacacagaagcatatccaggagtggggccctttcgacctggtgatcggcggcagcccttgcaatgacctgagcatcgtgaacccagcccggaagggcctgtacgagggaaccggcagactgttcttcgagttttacagactgctgcacgacgcccggcctaaggaaggcgacgaccggcccttcttttggctgttcgagaatgtggtggccatgggagtcagcgacaagcgggatattagccggttcctggagagcaaccccgtgatgatcgatgccaaggaagtgagcgccgcccaccgggccagatacttctggggcaatctgcctggcatgaacagacccctggccagcaccgtgaacgacaagctggagctgcaggagtgcctggagcacggccggatcgccaagttcagcaaggtgagaaccatcaccacccgaagcaacagcatcaaacaaggcaaggaccagcactttcctgtgttcatgaacgagaaggaggacatcctgtggtgtaccgagatggagagagtgttcgggttcccagtccactacacagatgtcagcaacatgtctagactggccagacagagactgctgggaagaagctggtccgtccctgtgatcagacacctgttcgcccctctgaaggagtacttcgcctgcgtgagcagcggcaacagcaacgccaacagccggggccccagcttctctagcggcctggtgccactgtccctgagagggagccacatgggccccatggagatctacaaaaccgtgagcgcctggaagcggcagcctgtgcgcgtgctgagcctgtttcggaatatcgataaagtcctgaaaagcctgggattcctggagagcggctctggctccggcggtggcaccctgaagtacgtggaggatgtgacaaacgtggtcagacgggatgtggagaagtggggccccttcgatctggtgtacggcagcacccaacccctgggcagctcttgtgaccggtgccctggctggtacatgtttcagttccaccggatcctgcagtacgccctgccgagacaggagtcccagcggccattcttttggattttcatggacaacttgctgctgaccgaggatgaccaggaaactaccactcggttcctgcagaccgaagccgtgaccctgcaggacgtgagaggccgggactaccagaacgccatgcgggtgtggtccaacatccctggactgaaaagcaagcacgcacctctgacccctaaagaagaggagtacctgcaggcccaggtgcggagcagaagcaagctggacgcccctaaggtggatctgctggtgaagaattgcctcctgcccctgagagagtacttcaagtatttcagccagaatagtctgcccctgggcggcccaagcagcggcgcccctcctcccagcggcggcagcccagccggctccccaacctctaccgaggagggcacctctgagtccgccacccccgagagcggccctggcacctccaccgagcccagcgagggcagcgcacccggcagccctgccggcagccccacctccacagaggagggaaccagcaccgagcccagcgaaggcagcgccccaggcaccagcaccgagcctagtgagggcggctctggcggcggcagcgcccaggagattaaacggatcaacaagatcagaagaagacttgtgaaagacagcaacaccaagaaggccggcaagacaggccccatgaaaaccctgctggttagagtgatgacacccgatctgagagagcggctggaaaacctgagaaagaagcctgaaaatatcccccagcccatcagcaatacatctagagccaacctgaataagctgctgaccgattacaccgaaatgaagaaggcgatcctgcatgtgtactgggaagagttccagaaggaccctgtgggcctgatgagccgggtggcccagcctgccagcaagaagatcgatcagaacaagctgaaacctgagatggacgagaagggcaacctgaccaccgccggctttgcctgctctcagtgtggccagcccctgttcgtgtacaagctggagcaggtgtctgagaagggcaaggcttacaccaactacttcggacggtgcaatgtggccgagcacgaaaagctgatcctgctggcccagctgaagcccgagaaggatagcgacgaagccgtgacatatagcctgggaaagtttgggcagagggccctggatttctacagcattcatgtgaccaaggagtccacccaccccgtgaagcccctggcccagatcgccggaaacagatacgcctccggacctgtgggaaaggccctgagcgacgcatgtatgggcacaatcgcctccttcctgtctaagtaccaggacatcatcatcgaacaccagaaggtggtgaagggcaaccagaagagactggagagcctgcgggagctggccggcaaggaaaacctggaataccctagcgtgaccctgccacctcagcctcacaccaaggagggcgttgatgcctacaacgaagtgatcgcccgggtgcgaatgtgggtgaacctgaacctgtggcagaagctgaagctaagcagagatgatgccaagcctctgctgagactgaagggattcccttcctttcctctggtcgagagacaggccaacgaagtggactggtgggacatggtgtgtaacgtgaagaagctgatcaacgagaaaaaggaggatggcaaggtgttttggcagaatctggctggctacaagagacaggaagccctgagaccatacctgagcagcgaggaagatcggaagaagggaaagaaattcgctcggtaccagctgggcgacctgctgctgcacctggaaaagaagcacggcgaggactggggaaaggtgtacgacgaggcctgggagcggattgacaagaaagtggaaggcctgagcaagcacatcaagctggaagaggaacggagaagcgaggacgcccagagcaaggccgccctgaccgactggctgcgggctaaggccagcttcgtgatcgagggcctgaaggaggccgacaaggacgagttctgcagatgcgagctgaagctgcagaagtggtacggggacctgcggggaaagcccttcgccatcgaagccgagaacagcatcctggacatcagcggcttcagcaagcagtacaactgtgccttcatctggcagaaggacggcgtgaagaagctgaacctgtacctgatcatcaactacttcaagggcggcaagctgcggttcaagaagatcaaacctgaagccttcgaagccaacagattctacaccgtgatcaacaaaaagagcggcgagatcgtgcccatggaggtgaacttcaacttcgacgaccccaacctgatcatcctgcctctggcctttggcaagagacagggcagagaattcatctggaacgacctgctgtccctggaaaccggcagcctgaagctggccaacggaagagtgatcgagaagacactgtacaacagaagaacccggcaggatgagcctgccctgttcgtggccctgaccttcgagcggcgggaggtcctggactcctccaatatcaaaccaatgaacctgatcggcgtggcaagaggcgaaaacatccccgccgtgatcgccctgaccgaccccgagggctgcccactgagccggtttaaggatagcctgggaaacccaacccacatcctgagaatcggcgagagctataaggagaagcagcggaccatccaggccaagaaggaggtggagcagcggagagccggcggctacagccggaagtacgccagcaaagccaagaatctggcagacgatatggtgagaaacaccgctagagatctgctgtactacgccgtgacccaggatgccatgctgatcttcgccaacctgagccggggcttcggccggcagggcaagcggaccttcatggccgagagacagtacacacggatggaggactggctgaccgccaagctggcctacgagggcctgagcaagacctacctgtccaagacactggcccagtacacctccaagacatgcagcaactgtgggtttaccatcaccagcgccgactacgacagggtgctggagaagctgaagaagacagcaacaggctggatgaccacaattaacggcaaggagctgaaggtggagggccagattacctactacaacagatacaagagacagaacgtagtcaaggacctgtccgtcgagctggatagactgagcgaagaatctgtgaacaacgacatctcctcctggacaaagggcagaagcggagaagctctgagcctcctgaagaaaagattctcccatagacccgtgcaggagaagttcgtgtgcctgaactgcggcttcgagacacacgcagccgagcaagccgccctgaacatcgccagatcctggctgttcctgcggagccaggagtacaagaaataccagacaaacaagacaaccggcaacaccgataagagagccttcgtcgagacctggcagtccttttaccggaagaagcttaaggaggtgtggaaacctgccgtgcggtctggcggatctggcggaggctccacaagcagcctggccctggtgaccttcaaggacgtgctggtgaacttcaccagggaggagtggaagctgctggacgccgcccagcaggtgatgtacagggacgtgatgctggagaactacaggaacctggtgagcctgggccacaggctgcccaagcccgacgtgatcctgcagctggagaagggcgaggagccctggctggtggagaggggcacccaccaggacgcccaccccgactgggacaccgccaccagccccaagaaaaagagaaaagtctaagctgccttctgcggggcttgccttctggccatgcccttcttctctcccttgcacctgtacctcttggtctttgaataaagcctgagtaggaaggctagcaaaaaaaaaaaaaaaaaaaaaaaaaaaaaaaaaaaaaaaaaaaaaaaaaaaaaaaaaaaaaaaaaaaaaaaaaaaaaaaa

SEQ ID NO: 6088 - RNA, 5797 nt, synthetic construct
  source 1..5797: mol_type = other RNA
aggaaataagagagaaaagaagagtaagaagaaatataagagccaccatggcccctaagaagaagcgtaaagtgagccggatggaacgcctcgtctacgaggtgcggcagaagtgcagaaacatcgaggacatctgcatctcctgcggatctctgaacgtgaccctggagcacccactgttcatcggcggcatgtgccagaactgtaaaaactgttttctggagtgtgcctatcaatacgacgatgacggctaccagagctactgcaccatctgttgcggcggaagagaggtgctgatgtgtggaaataacaactgctgccggtgcttctgcgtggaatgcgtggacctgctggtgggccccggcgccgcccaggccgctattaaggaagatccttggaactgctacatgtgcggccacaagggcacatacggcctgctgagacggagagaggactggcctagcagactgcagatgttcttcgccaataaccacgaccaggagttcgacccccctaaggtgtaccctcccgtccccgccgagaagagaaagcccatccgggtcctgagcctgttcgatggcatcgccaccggtctgctggtgctgaaggacctgggcatccaggtggataggtacattgcctccgaggtgtgcgaggactccatcaccgtgggaatggtgcgtcatcagggcaagatcatgtacgtgggcgacgtgcggagcgtgacacagaagcatatccaggagtggggccctttcgacctggtgatcggcggcagcccttgcaatgacctgagcatcgtgaacccagcccggaagggcctgtacgagggaaccggcagactgttcttcgagttttacagactgctgcacgacgcccggcctaaggaaggcgacgaccggcccttcttttggctgttcgagaatgtggtggccatgggagtcagcgacaagcgggatattagccggttcctggagagcaaccccgtgatgatcgatgccaaggaagtgagcgccgcccaccgggccagatacttctggggcaatctgcctggcatgaacagacccctggccagcaccgtgaacgacaagctggagctgcaggagtgcctggagcacggccggatcgccaagttcagcaaggtgagaaccatcaccacccgaagcaacagcatcaaacaaggcaaggaccagcactttcctgtgttcatgaacgagaaggaggacatcctgtggtgtaccgagatggagagagtgttcgggttcccagtccactacacagatgtcagcaacatgtctagactggccagacagagactgctgggaagaagctggtccgtccctgtgatcagacacctgttcgcccctctgaaggagtacttcgcctgcgtgagcagcggcaacagcaacgccaacagccggggccccagcttctctagcggcctggtgccactgtccctgagagggagccacatgggccccatggagatctacaaaaccgtgagcgcctggaagcggcagcctgtgcgcgtgctgagcctgtttcggaatatcgataaagtcctgaaaagcctgggattcctggagagcggctctggctccggcggtggcaccctgaagtacgtggaggatgtgacaaacgtggtcagacgggatgtggagaagtggggccccttcgatctggtgtacggcagcacccaacccctgggcagctcttgtgaccggtgccctggctggtacatgtttcagttccaccggatcctgcagtacgccctgccgagacaggagtcccagcggccattcttttggattttcatggacaacttgctgctgaccgaggatgaccaggaaactaccactcggttcctgcagaccgaagccgtgaccctgcaggacgtgagaggccgggactaccagaacgccatgcgggtgtggtccaacatccctggactgaaaagcaagcacgcacctctgacccctaaagaagaggagtacctgcaggcccaggtgcggagcagaagcaagctggacgcccctaaggtggatctgctggtgaagaattgcctcctgcccctgagagagtacttcaagtatttcagccagaatagtctgcccctgggcggcccaagcagcggcgcccctcctcccagcggcggcagcccagccggctccccaacctctaccgaggagggcacctctgagtccgccacccccgagagcggccctggcacctccaccgagcccagcgagggcagcgcacccggcagccctgccggcagccccacctccacagaggagggaaccagcaccgagcccagcgaaggcagcgccccaggcaccagcaccgagcctagtgagggcggctctggcggcggcagcgcccaggagattaaacggatcaacaagatcagaagaagacttgtgaaagacagcaacaccaagaaggccggcaagacaggccccatgaaaaccctgctggttagagtgatgacacccgatctgagagagcggctggaaaacctgagaaagaagcctgaaaatatcccccagcccatcagcaatacatctagagccaacctgaataagctgctgaccgattacaccgaaatgaagaaggcgatcctgcatgtgtactgggaagagttccagaaggaccctgtgggcctgatgagccgggtggcccagcctgccagcaagaagatcgatcagaacaagctgaaacctgagatggacgagaagggcaacctgaccaccgccggctttgcctgctctcagtgtggccagcccctgttcgtgtacaagctggagcaggtgtctgagaagggcaaggcttacaccaactacttcggacggtgcaatgtggccgagcacgaaaagctgatcctgctggcccagctgaagcccgagaaggatagcgacgaagccgtgacatatagcctgggaaagtttgggcagagggccctggatttctacagcattcatgtgaccaaggagtccacccaccccgtgaagcccctggcccagatcgccggaaacagatacgcctccggacctgtgggaaaggccctgagcgacgcatgtatgggcacaatcgcctccttcctgtctaagtaccaggacatcatcatcgaacaccagaaggtggtgaagggcaaccagaagagactggagagcctgcgggagctggccggcaaggaaaacctggaataccctagcgtgaccctgccacctcagcctcacaccaaggagggcgttgatgcctacaacgaagtgatcgcccgggtgcgaatgtgggtgaacctgaacctgtggcagaagctgaagctaagcagagatgatgccaagcctctgctgagactgaagggattcccttcctttcctctggtcgagagacaggccaacgaagtggactggtgggacatggtgtgtaacgtgaagaagctgatcaacgagaaaaaggaggatggcaaggtgttttggcagaatctggctggctacaagagacaggaagccctgagaccatacctgagcagcgaggaagatcggaagaagggaaagaaattcgctcggtaccagctgggcgacctgctgctgcacctggaaaagaagcacggcgaggactggggaaaggtgtacgacgaggcctgggagcggattgacaagaaagtggaaggcctgagcaagcacatcaagctggaagaggaacggagaagcgaggacgcccagagcaaggccgccctgaccgactggctgcgggctaaggccagcttcgtgatcgagggcctgaaggaggccgacaaggacgagttctgcagatgcgagctgaagctgcagaagtggtacggggacctgcggggaaagcccttcgccatcgaagccgagaacagcatcctggacatcagcggcttcagcaagcagtacaactgtgccttcatctggcagaaggacggcgtgaagaagctgaacctgtacctgatcatcaactacttcaagggcggcaagctgcggttcaagaagatcaaacctgaagccttcgaagccaacagattctacaccgtgatcaacaaaaagagcggcgagatcgtgcccatggaggtgaacttcaacttcgacgaccccaacctgatcatcctgcctctggcctttggcaagagacagggcagagaattcatctggaacgacctgctgtccctggaaaccggcagcctgaagctggccaacggaagagtgatcgagaagacactgtacaacagaagaacccggcaggatgagcctgccctgttcgtggccctgaccttcgagcggcgggaggtcctggactcctccaatatcaaaccaatgaacctgatcggcgtggcaagaggcgaaaacatccccgccgtgatcgccctgaccgaccccgagggctgcccactgagccggtttaaggatagcctgggaaacccaacccacatcctgagaatcggcgagagctataaggagaagcagcggaccatccaggccaagaaggaggtggagcagcggagagccggcggctacagccggaagtacgccagcaaagccaagaatctggcagacgatatggtgagaaacaccgctagagatctgctgtactacgccgtgacccaggatgccatgctgatcttcgccaacctgagccggggcttcggccggcagggcaagcggaccttcatggccgagagacagtacacacggatggaggactggctgaccgccaagctggcctacgagggcctgagcaagacctacctgtccaagacactggcccagtacacctccaagacatgcagcaactgtgggtttaccatcaccagcgccgactacgacagggtgctggagaagctgaagaagacagcaacaggctggatgaccacaattaacggcaaggagctgaaggtggagggccagattacctactacaacagatacaagagacagaacgtagtcaaggacctgtccgtcgagctggatagactgagcgaagaatctgtgaacaacgacatctcctcctggacaaagggcagaagcggagaagctctgagcctcctgaagaaaagattctcccatagacccgtgcaggagaagttcgtgtgcctgaactgcggcttcgagacacacgcagccgagcaagccgccctgaacatcgccagatcctggctgttcctgcggagccaggagtacaagaaataccagacaaacaagacaaccggcaacaccgataagagagccttcgtcgagacctggcagtccttttaccggaagaagcttaaggaggtgtggaaacctgccgtgcggtctggcggatctggcggaggctccacaagcagccaggccagcgtgagcttcaaggacgtgaccgtggagttcacccaggacgagtggaggctgatgagcagcgcccagaggaccctgtacagggaggtgatgctggagaactacagccacctgatcagcatgggctactgcagcaccaagcccgagctgatcttcgccctggagcagaaggacttcagggagagcatcctggagagggagagcctgagcaccatcccccccgaggacttccagaccagccccaagaaaaagagaaaagtctaagctgccttctgcggggcttgccttctggccatgcccttcttctctcccttgcacctgtacctcttggtctttgaataaagcctgagtaggaaggctagcaaaaaaaaaaaaaaaaaaaaaaaaaaaaaaaaaaaaaaaaaaaaaaaaaaaaaaaaaaaaaaaaaaaaaaaaaaaaaaaa

SEQ ID NO: 6089 - RNA, 5797 nt, synthetic construct
  source 1..5797: mol_type = other RNA
aggaaataagagagaaaagaagagtaagaagaaatataagagccaccatggcccctaagaagaagcgtaaagtgagccggatggaacgcctcgtctacgaggtgcggcagaagtgcagaaacatcgaggacatctgcatctcctgcggatctctgaacgtgaccctggagcacccactgttcatcggcggcatgtgccagaactgtaaaaactgttttctggagtgtgcctatcaatacgacgatgacggctaccagagctactgcaccatctgttgcggcggaagagaggtgctgatgtgtggaaataacaactgctgccggtgcttctgcgtggaatgcgtggacctgctggtgggccccggcgccgcccaggccgctattaaggaagatccttggaactgctacatgtgcggccacaagggcacatacggcctgctgagacggagagaggactggcctagcagactgcagatgttcttcgccaataaccacgaccaggagttcgacccccctaaggtgtaccctcccgtccccgccgagaagagaaagcccatccgggtcctgagcctgttcgatggcatcgccaccggtctgctggtgctgaaggacctgggcatccaggtggataggtacattgcctccgaggtgtgcgaggactccatcaccgtgggaatggtgcgtcatcagggcaagatcatgtacgtgggcgacgtgcggagcgtgacacagaagcatatccaggagtggggccctttcgacctggtgatcggcggcagcccttgcaatgacctgagcatcgtgaacccagcccggaagggcctgtacgagggaaccggcagactgttcttcgagttttacagactgctgcacgacgcccggcctaaggaaggcgacgaccggcccttcttttggctgttcgagaatgtggtggccatgggagtcagcgacaagcgggatattagccggttcctggagagcaaccccgtgatgatcgatgccaaggaagtgagcgccgcccaccgggccagatacttctggggcaatctgcctggcatgaacagacccctggccagcaccgtgaacgacaagctggagctgcaggagtgcctggagcacggccggatcgccaagttcagcaaggtgagaaccatcaccacccgaagcaacagcatcaaacaaggcaaggaccagcactttcctgtgttcatgaacgagaaggaggacatcctgtggtgtaccgagatggagagagtgttcgggttcccagtccactacacagatgtcagcaacatgtctagactggccagacagagactgctgggaagaagctggtccgtccctgtgatcagacacctgttcgcccctctgaaggagtacttcgcctgcgtgagcagcggcaacagcaacgccaacagccggggccccagcttctctagcggcctggtgccactgtccctgagagggagccacatgggccccatggagatctacaaaaccgtgagcgcctggaagcggcagcctgtgcgcgtgctgagcctgtttcggaatatcgataaagtcctgaaaagcctgggattcctggagagcggctctggctccggcggtggcaccctgaagtacgtggaggatgtgacaaacgtggtcagacgggatgtggagaagtggggccccttcgatctggtgtacggcagcacccaacccctgggcagctcttgtgaccggtgccctggctggtacatgtttcagttccaccggatcctgcagtacgccctgccgagacaggagtcccagcggccattcttttggattttcatggacaacttgctgctgaccgaggatgaccaggaaactaccactcggttcctgcagaccgaagccgtgaccctgcaggacgtgagaggccgggactaccagaacgccatgcgggtgtggtccaacatccctggactgaaaagcaagcacgcacctctgacccctaaagaagaggagtacctgcaggcccaggtgcggagcagaagcaagctggacgcccctaaggtggatctgctggtgaagaattgcctcctgcccctgagagagtacttcaagtatttcagccagaatagtctgcccctgggcggcccaagcagcggcgcccctcctcccagcggcggcagcccagccggctccccaacctctaccgaggagggcacctctgagtccgccacccccgagagcggccctggcacctccaccgagcccagcgagggcagcgcacccggcagccctgccggcagccccacctccacagaggagggaaccagcaccgagcccagcgaaggcagcgccccaggcaccagcaccgagcctagtgagggcggctctggcggcggcagcgcccaggagattaaacggatcaacaagatcagaagaagacttgtgaaagacagcaacaccaagaaggccggcaagacaggccccatgaaaaccctgctggttagagtgatgacacccgatctgagagagcggctggaaaacctgagaaagaagcctgaaaatatcccccagcccatcagcaatacatctagagccaacctgaataagctgctgaccgattacaccgaaatgaagaaggcgatcctgcatgtgtactgggaagagttccagaaggaccctgtgggcctgatgagccgggtggcccagcctgccagcaagaagatcgatcagaacaagctgaaacctgagatggacgagaagggcaacctgaccaccgccggctttgcctgctctcagtgtggccagcccctgttcgtgtacaagctggagcaggtgtctgagaagggcaaggcttacaccaactacttcggacggtgcaatgtggccgagcacgaaaagctgatcctgctggcccagctgaagcccgagaaggatagcgacgaagccgtgacatatagcctgggaaagtttgggcagagggccctggatttctacagcattcatgtgaccaaggagtccacccaccccgtgaagcccctggcccagatcgccggaaacagatacgcctccggacctgtgggaaaggccctgagcgacgcatgtatgggcacaatcgcctccttcctgtctaagtaccaggacatcatcatcgaacaccagaaggtggtgaagggcaaccagaagagactggagagcctgcgggagctggccggcaaggaaaacctggaataccctagcgtgaccctgccacctcagcctcacaccaaggagggcgttgatgcctacaacgaagtgatcgcccgggtgcgaatgtgggtgaacctgaacctgtggcagaagctgaagctaagcagagatgatgccaagcctctgctgagactgaagggattcccttcctttcctctggtcgagagacaggccaacgaagtggactggtgggacatggtgtgtaacgtgaagaagctgatcaacgagaaaaaggaggatggcaaggtgttttggcagaatctggctggctacaagagacaggaagccctgagaccatacctgagcagcgaggaagatcggaagaagggaaagaaattcgctcggtaccagctgggcgacctgctgctgcacctggaaaagaagcacggcgaggactggggaaaggtgtacgacgaggcctgggagcggattgacaagaaagtggaaggcctgagcaagcacatcaagctggaagaggaacggagaagcgaggacgcccagagcaaggccgccctgaccgactggctgcgggctaaggccagcttcgtgatcgagggcctgaaggaggccgacaaggacgagttctgcagatgcgagctgaagctgcagaagtggtacggggacctgcggggaaagcccttcgccatcgaagccgagaacagcatcctggacatcagcggcttcagcaagcagtacaactgtgccttcatctggcagaaggacggcgtgaagaagctgaacctgtacctgatcatcaactacttcaagggcggcaagctgcggttcaagaagatcaaacctgaagccttcgaagccaacagattctacaccgtgatcaacaaaaagagcggcgagatcgtgcccatggaggtgaacttcaacttcgacgaccccaacctgatcatcctgcctctggcctttggcaagagacagggcagagaattcatctggaacgacctgctgtccctggaaaccggcagcctgaagctggccaacggaagagtgatcgagaagacactgtacaacagaagaacccggcaggatgagcctgccctgttcgtggccctgaccttcgagcggcgggaggtcctggactcctccaatatcaaaccaatgaacctgatcggcgtggcaagaggcgaaaacatccccgccgtgatcgccctgaccgaccccgagggctgcccactgagccggtttaaggatagcctgggaaacccaacccacatcctgagaatcggcgagagctataaggagaagcagcggaccatccaggccaagaaggaggtggagcagcggagagccggcggctacagccggaagtacgccagcaaagccaagaatctggcagacgatatggtgagaaacaccgctagagatctgctgtactacgccgtgacccaggatgccatgctgatcttcgccaacctgagccggggcttcggccggcagggcaagcggaccttcatggccgagagacagtacacacggatggaggactggctgaccgccaagctggcctacgagggcctgagcaagacctacctgtccaagacactggcccagtacacctccaagacatgcagcaactgtgggtttaccatcaccagcgccgactacgacagggtgctggagaagctgaagaagacagcaacaggctggatgaccacaattaacggcaaggagctgaaggtggagggccagattacctactacaacagatacaagagacagaacgtagtcaaggacctgtccgtcgagctggatagactgagcgaagaatctgtgaacaacgacatctcctcctggacaaagggcagaagcggagaagctctgagcctcctgaagaaaagattctcccatagacccgtgcaggagaagttcgtgtgcctgaactgcggcttcgagacacacgcagccgagcaagccgccctgaacatcgccagatcctggctgttcctgcggagccaggagtacaagaaataccagacaaacaagacaaccggcaacaccgataagagagccttcgtcgagacctggcagtccttttaccggaagaagcttaaggaggtgtggaaacctgccgtgcggtctggcggatctggcggaggctccacaagcagcctgggcagcgagctgttcagggacgtggccatcgtgttcagccaggaggagtggcagtggctggcccccgcccagagggacctgtacagggacgtgatgctggagacctacagcaacctggtgagcctgggcctggccatcagcaagcccgacgtgatcagcttcctggagcagggcagggagccctggatggtggagagggtggtggccggcggcctgtgccccgtgctggagagcaggaccagccccaagaaaaagagaaaagtctaagctgccttctgcggggcttgccttctggccatgcccttcttctctcccttgcacctgtacctcttggtctttgaataaagcctgagtaggaaggctagcaaaaaaaaaaaaaaaaaaaaaaaaaaaaaaaaaaaaaaaaaaaaaaaaaaaaaaaaaaaaaaaaaaaaaaaaaaaaaaaa

SEQ ID NO: 6090 - RNA, 5797 nt, synthetic construct
  source 1..5797: mol_type = other RNA
aggaaataagagagaaaagaagagtaagaagaaatataagagccaccatggcccctaagaagaagcgtaaagtgagccggatggaacgcctcgtctacgaggtgcggcagaagtgcagaaacatcgaggacatctgcatctcctgcggatctctgaacgtgaccctggagcacccactgttcatcggcggcatgtgccagaactgtaaaaactgttttctggagtgtgcctatcaatacgacgatgacggctaccagagctactgcaccatctgttgcggcggaagagaggtgctgatgtgtggaaataacaactgctgccggtgcttctgcgtggaatgcgtggacctgctggtgggccccggcgccgcccaggccgctattaaggaagatccttggaactgctacatgtgcggccacaagggcacatacggcctgctgagacggagagaggactggcctagcagactgcagatgttcttcgccaataaccacgaccaggagttcgacccccctaaggtgtaccctcccgtccccgccgagaagagaaagcccatccgggtcctgagcctgttcgatggcatcgccaccggtctgctggtgctgaaggacctgggcatccaggtggataggtacattgcctccgaggtgtgcgaggactccatcaccgtgggaatggtgcgtcatcagggcaagatcatgtacgtgggcgacgtgcggagcgtgacacagaagcatatccaggagtggggccctttcgacctggtgatcggcggcagcccttgcaatgacctgagcatcgtgaacccagcccggaagggcctgtacgagggaaccggcagactgttcttcgagttttacagactgctgcacgacgcccggcctaaggaaggcgacgaccggcccttcttttggctgttcgagaatgtggtggccatgggagtcagcgacaagcgggatattagccggttcctggagagcaaccccgtgatgatcgatgccaaggaagtgagcgccgcccaccgggccagatacttctggggcaatctgcctggcatgaacagacccctggccagcaccgtgaacgacaagctggagctgcaggagtgcctggagcacggccggatcgccaagttcagcaaggtgagaaccatcaccacccgaagcaacagcatcaaacaaggcaaggaccagcactttcctgtgttcatgaacgagaaggaggacatcctgtggtgtaccgagatggagagagtgttcgggttcccagtccactacacagatgtcagcaacatgtctagactggccagacagagactgctgggaagaagctggtccgtccctgtgatcagacacctgttcgcccctctgaaggagtacttcgcctgcgtgagcagcggcaacagcaacgccaacagccggggccccagcttctctagcggcctggtgccactgtccctgagagggagccacatgggccccatggagatctacaaaaccgtgagcgcctggaagcggcagcctgtgcgcgtgctgagcctgtttcggaatatcgataaagtcctgaaaagcctgggattcctggagagcggctctggctccggcggtggcaccctgaagtacgtggaggatgtgacaaacgtggtcagacgggatgtggagaagtggggccccttcgatctggtgtacggcagcacccaacccctgggcagctcttgtgaccggtgccctggctggtacatgtttcagttccaccggatcctgcagtacgccctgccgagacaggagtcccagcggccattcttttggattttcatggacaacttgctgctgaccgaggatgaccaggaaactaccactcggttcctgcagaccgaagccgtgaccctgcaggacgtgagaggccgggactaccagaacgccatgcgggtgtggtccaacatccctggactgaaaagcaagcacgcacctctgacccctaaagaagaggagtacctgcaggcccaggtgcggagcagaagcaagctggacgcccctaaggtggatctgctggtgaagaattgcctcctgcccctgagagagtacttcaagtatttcagccagaatagtctgcccctgggcggcccaagcagcggcgcccctcctcccagcggcggcagcccagccggctccccaacctctaccgaggagggcacctctgagtccgccacccccgagagcggccctggcacctccaccgagcccagcgagggcagcgcacccggcagccctgccggcagccccacctccacagaggagggaaccagcaccgagcccagcgaaggcagcgccccaggcaccagcaccgagcctagtgagggcggctctggcggcggcagcgcccaggagattaaacggatcaacaagatcagaagaagacttgtgaaagacagcaacaccaagaaggccggcaagacaggccccatgaaaaccctgctggttagagtgatgacacccgatctgagagagcggctggaaaacctgagaaagaagcctgaaaatatcccccagcccatcagcaatacatctagagccaacctgaataagctgctgaccgattacaccgaaatgaagaaggcgatcctgcatgtgtactgggaagagttccagaaggaccctgtgggcctgatgagccgggtggcccagcctgccagcaagaagatcgatcagaacaagctgaaacctgagatggacgagaagggcaacctgaccaccgccggctttgcctgctctcagtgtggccagcccctgttcgtgtacaagctggagcaggtgtctgagaagggcaaggcttacaccaactacttcggacggtgcaatgtggccgagcacgaaaagctgatcctgctggcccagctgaagcccgagaaggatagcgacgaagccgtgacatatagcctgggaaagtttgggcagagggccctggatttctacagcattcatgtgaccaaggagtccacccaccccgtgaagcccctggcccagatcgccggaaacagatacgcctccggacctgtgggaaaggccctgagcgacgcatgtatgggcacaatcgcctccttcctgtctaagtaccaggacatcatcatcgaacaccagaaggtggtgaagggcaaccagaagagactggagagcctgcgggagctggccggcaaggaaaacctggaataccctagcgtgaccctgccacctcagcctcacaccaaggagggcgttgatgcctacaacgaagtgatcgcccgggtgcgaatgtgggtgaacctgaacctgtggcagaagctgaagctaagcagagatgatgccaagcctctgctgagactgaagggattcccttcctttcctctggtcgagagacaggccaacgaagtggactggtgggacatggtgtgtaacgtgaagaagctgatcaacgagaaaaaggaggatggcaaggtgttttggcagaatctggctggctacaagagacaggaagccctgagaccatacctgagcagcgaggaagatcggaagaagggaaagaaattcgctcggtaccagctgggcgacctgctgctgcacctggaaaagaagcacggcgaggactggggaaaggtgtacgacgaggcctgggagcggattgacaagaaagtggaaggcctgagcaagcacatcaagctggaagaggaacggagaagcgaggacgcccagagcaaggccgccctgaccgactggctgcgggctaaggccagcttcgtgatcgagggcctgaaggaggccgacaaggacgagttctgcagatgcgagctgaagctgcagaagtggtacggggacctgcggggaaagcccttcgccatcgaagccgagaacagcatcctggacatcagcggcttcagcaagcagtacaactgtgccttcatctggcagaaggacggcgtgaagaagctgaacctgtacctgatcatcaactacttcaagggcggcaagctgcggttcaagaagatcaaacctgaagccttcgaagccaacagattctacaccgtgatcaacaaaaagagcggcgagatcgtgcccatggaggtgaacttcaacttcgacgaccccaacctgatcatcctgcctctggcctttggcaagagacagggcagagaattcatctggaacgacctgctgtccctggaaaccggcagcctgaagctggccaacggaagagtgatcgagaagacactgtacaacagaagaacccggcaggatgagcctgccctgttcgtggccctgaccttcgagcggcgggaggtcctggactcctccaatatcaaaccaatgaacctgatcggcgtggcaagaggcgaaaacatccccgccgtgatcgccctgaccgaccccgagggctgcccactgagccggtttaaggatagcctgggaaacccaacccacatcctgagaatcggcgagagctataaggagaagcagcggaccatccaggccaagaaggaggtggagcagcggagagccggcggctacagccggaagtacgccagcaaagccaagaatctggcagacgatatggtgagaaacaccgctagagatctgctgtactacgccgtgacccaggatgccatgctgatcttcgccaacctgagccggggcttcggccggcagggcaagcggaccttcatggccgagagacagtacacacggatggaggactggctgaccgccaagctggcctacgagggcctgagcaagacctacctgtccaagacactggcccagtacacctccaagacatgcagcaactgtgggtttaccatcaccagcgccgactacgacagggtgctggagaagctgaagaagacagcaacaggctggatgaccacaattaacggcaaggagctgaaggtggagggccagattacctactacaacagatacaagagacagaacgtagtcaaggacctgtccgtcgagctggatagactgagcgaagaatctgtgaacaacgacatctcctcctggacaaagggcagaagcggagaagctctgagcctcctgaagaaaagattctcccatagacccgtgcaggagaagttcgtgtgcctgaactgcggcttcgagacacacgcagccgagcaagccgccctgaacatcgccagatcctggctgttcctgcggagccaggagtacaagaaataccagacaaacaagacaaccggcaacaccgataagagagccttcgtcgagacctggcagtccttttaccggaagaagcttaaggaggtgtggaaacctgccgtgcggtctggcggatctggcggaggctccacaagcttccaggagagcgtgaccttcagggacgtggccgtggacttcacccaggaggagtggaggcacctggagcccgcccagagggccctgtacagggacgtgatgctggagaactacgagaacctggtgagcgtgggcatccccgtgagcaggctggacgtgaccagcctgctggagaggcaggaggccgtgtggaaggacggcggcctgagggacagctgcctggacagcctgagcaacaagatcaccagccccaagaaaaagagaaaagtctaagctgccttctgcggggcttgccttctggccatgcccttcttctctcccttgcacctgtacctcttggtctttgaataaagcctgagtaggaaggctagcaaaaaaaaaaaaaaaaaaaaaaaaaaaaaaaaaaaaaaaaaaaaaaaaaaaaaaaaaaaaaaaaaaaaaaaaaaaaaaaa

SEQ ID NO: 6091 - RNA, 5797 nt, synthetic construct
  source 1..5797: mol_type = other RNA
aggaaataagagagaaaagaagagtaagaagaaatataagagccaccatggcccctaagaagaagcgtaaagtgagccggatggaacgcctcgtctacgaggtgcggcagaagtgcagaaacatcgaggacatctgcatctcctgcggatctctgaacgtgaccctggagcacccactgttcatcggcggcatgtgccagaactgtaaaaactgttttctggagtgtgcctatcaatacgacgatgacggctaccagagctactgcaccatctgttgcggcggaagagaggtgctgatgtgtggaaataacaactgctgccggtgcttctgcgtggaatgcgtggacctgctggtgggccccggcgccgcccaggccgctattaaggaagatccttggaactgctacatgtgcggccacaagggcacatacggcctgctgagacggagagaggactggcctagcagactgcagatgttcttcgccaataaccacgaccaggagttcgacccccctaaggtgtaccctcccgtccccgccgagaagagaaagcccatccgggtcctgagcctgttcgatggcatcgccaccggtctgctggtgctgaaggacctgggcatccaggtggataggtacattgcctccgaggtgtgcgaggactccatcaccgtgggaatggtgcgtcatcagggcaagatcatgtacgtgggcgacgtgcggagcgtgacacagaagcatatccaggagtggggccctttcgacctggtgatcggcggcagcccttgcaatgacctgagcatcgtgaacccagcccggaagggcctgtacgagggaaccggcagactgttcttcgagttttacagactgctgcacgacgcccggcctaaggaaggcgacgaccggcccttcttttggctgttcgagaatgtggtggccatgggagtcagcgacaagcgggatattagccggttcctggagagcaaccccgtgatgatcgatgccaaggaagtgagcgccgcccaccgggccagatacttctggggcaatctgcctggcatgaacagacccctggccagcaccgtgaacgacaagctggagctgcaggagtgcctggagcacggccggatcgccaagttcagcaaggtgagaaccatcaccacccgaagcaacagcatcaaacaaggcaaggaccagcactttcctgtgttcatgaacgagaaggaggacatcctgtggtgtaccgagatggagagagtgttcgggttcccagtccactacacagatgtcagcaacatgtctagactggccagacagagactgctgggaagaagctggtccgtccctgtgatcagacacctgttcgcccctctgaaggagtacttcgcctgcgtgagcagcggcaacagcaacgccaacagccggggccccagcttctctagcggcctggtgccactgtccctgagagggagccacatgggccccatggagatctacaaaaccgtgagcgcctggaagcggcagcctgtgcgcgtgctgagcctgtttcggaatatcgataaagtcctgaaaagcctgggattcctggagagcggctctggctccggcggtggcaccctgaagtacgtggaggatgtgacaaacgtggtcagacgggatgtggagaagtggggccccttcgatctggtgtacggcagcacccaacccctgggcagctcttgtgaccggtgccctggctggtacatgtttcagttccaccggatcctgcagtacgccctgccgagacaggagtcccagcggccattcttttggattttcatggacaacttgctgctgaccgaggatgaccaggaaactaccactcggttcctgcagaccgaagccgtgaccctgcaggacgtgagaggccgggactaccagaacgccatgcgggtgtggtccaacatccctggactgaaaagcaagcacgcacctctgacccctaaagaagaggagtacctgcaggcccaggtgcggagcagaagcaagctggacgcccctaaggtggatctgctggtgaagaattgcctcctgcccctgagagagtacttcaagtatttcagccagaatagtctgcccctgggcggcccaagcagcggcgcccctcctcccagcggcggcagcccagccggctccccaacctctaccgaggagggcacctctgagtccgccacccccgagagcggccctggcacctccaccgagcccagcgagggcagcgcacccggcagccctgccggcagccccacctccacagaggagggaaccagcaccgagcccagcgaaggcagcgccccaggcaccagcaccgagcctagtgagggcggctctggcggcggcagcgcccaggagattaaacggatcaacaagatcagaagaagacttgtgaaagacagcaacaccaagaaggccggcaagacaggccccatgaaaaccctgctggttagagtgatgacacccgatctgagagagcggctggaaaacctgagaaagaagcctgaaaatatcccccagcccatcagcaatacatctagagccaacctgaataagctgctgaccgattacaccgaaatgaagaaggcgatcctgcatgtgtactgggaagagttccagaaggaccctgtgggcctgatgagccgggtggcccagcctgccagcaagaagatcgatcagaacaagctgaaacctgagatggacgagaagggcaacctgaccaccgccggctttgcctgctctcagtgtggccagcccctgttcgtgtacaagctggagcaggtgtctgagaagggcaaggcttacaccaactacttcggacggtgcaatgtggccgagcacgaaaagctgatcctgctggcccagctgaagcccgagaaggatagcgacgaagccgtgacatatagcctgggaaagtttgggcagagggccctggatttctacagcattcatgtgaccaaggagtccacccaccccgtgaagcccctggcccagatcgccggaaacagatacgcctccggacctgtgggaaaggccctgagcgacgcatgtatgggcacaatcgcctccttcctgtctaagtaccaggacatcatcatcgaacaccagaaggtggtgaagggcaaccagaagagactggagagcctgcgggagctggccggcaaggaaaacctggaataccctagcgtgaccctgccacctcagcctcacaccaaggagggcgttgatgcctacaacgaagtgatcgcccgggtgcgaatgtgggtgaacctgaacctgtggcagaagctgaagctaagcagagatgatgccaagcctctgctgagactgaagggattcccttcctttcctctggtcgagagacaggccaacgaagtggactggtgggacatggtgtgtaacgtgaagaagctgatcaacgagaaaaaggaggatggcaaggtgttttggcagaatctggctggctacaagagacaggaagccctgagaccatacctgagcagcgaggaagatcggaagaagggaaagaaattcgctcggtaccagctgggcgacctgctgctgcacctggaaaagaagcacggcgaggactggggaaaggtgtacgacgaggcctgggagcggattgacaagaaagtggaaggcctgagcaagcacatcaagctggaagaggaacggagaagcgaggacgcccagagcaaggccgccctgaccgactggctgcgggctaaggccagcttcgtgatcgagggcctgaaggaggccgacaaggacgagttctgcagatgcgagctgaagctgcagaagtggtacggggacctgcggggaaagcccttcgccatcgaagccgagaacagcatcctggacatcagcggcttcagcaagcagtacaactgtgccttcatctggcagaaggacggcgtgaagaagctgaacctgtacctgatcatcaactacttcaagggcggcaagctgcggttcaagaagatcaaacctgaagccttcgaagccaacagattctacaccgtgatcaacaaaaagagcggcgagatcgtgcccatggaggtgaacttcaacttcgacgaccccaacctgatcatcctgcctctggcctttggcaagagacagggcagagaattcatctggaacgacctgctgtccctggaaaccggcagcctgaagctggccaacggaagagtgatcgagaagacactgtacaacagaagaacccggcaggatgagcctgccctgttcgtggccctgaccttcgagcggcgggaggtcctggactcctccaatatcaaaccaatgaacctgatcggcgtggcaagaggcgaaaacatccccgccgtgatcgccctgaccgaccccgagggctgcccactgagccggtttaaggatagcctgggaaacccaacccacatcctgagaatcggcgagagctataaggagaagcagcggaccatccaggccaagaaggaggtggagcagcggagagccggcggctacagccggaagtacgccagcaaagccaagaatctggcagacgatatggtgagaaacaccgctagagatctgctgtactacgccgtgacccaggatgccatgctgatcttcgccaacctgagccggggcttcggccggcagggcaagcggaccttcatggccgagagacagtacacacggatggaggactggctgaccgccaagctggcctacgagggcctgagcaagacctacctgtccaagacactggcccagtacacctccaagacatgcagcaactgtgggtttaccatcaccagcgccgactacgacagggtgctggagaagctgaagaagacagcaacaggctggatgaccacaattaacggcaaggagctgaaggtggagggccagattacctactacaacagatacaagagacagaacgtagtcaaggacctgtccgtcgagctggatagactgagcgaagaatctgtgaacaacgacatctcctcctggacaaagggcagaagcggagaagctctgagcctcctgaagaaaagattctcccatagacccgtgcaggagaagttcgtgtgcctgaactgcggcttcgagacacacgcagccgagcaagccgccctgaacatcgccagatcctggctgttcctgcggagccaggagtacaagaaataccagacaaacaagacaaccggcaacaccgataagagagccttcgtcgagacctggcagtccttttaccggaagaagcttaaggaggtgtggaaacctgccgtgcggtctggcggatctggcggaggctccacaagcgaggccgtgaccttcaaggacgtggccgtgttcttcaccgaggaggagctgggcctgctggacctggcccagaggaagctgtacagagacgtgatgctggagaacttcaggaacctgctgagcgtgggccaccagcccttccaccaggacgtgttccacttcctgagggaggagaagttctggatgatggagaccgccacccagagggagggcaacagcggcgagaacgccagcgtgcaccccaccagccccaagaaaaagagaaaagtctaagctgccttctgcggggcttgccttctggccatgcccttcttctctcccttgcacctgtacctcttggtctttgaataaagcctgagtaggaaggctagcaaaaaaaaaaaaaaaaaaaaaaaaaaaaaaaaaaaaaaaaaaaaaaaaaaaaaaaaaaaaaaaaaaaaaaaaaaaaaaaa

SEQ ID NO: 6092 - RNA, 5797 nt, synthetic construct
  source 1..5797: mol_type = other RNA
aggaaataagagagaaaagaagagtaagaagaaatataagagccaccatggcccctaagaagaagcgtaaagtgagccggatggaacgcctcgtctacgaggtgcggcagaagtgcagaaacatcgaggacatctgcatctcctgcggatctctgaacgtgaccctggagcacccactgttcatcggcggcatgtgccagaactgtaaaaactgttttctggagtgtgcctatcaatacgacgatgacggctaccagagctactgcaccatctgttgcggcggaagagaggtgctgatgtgtggaaataacaactgctgccggtgcttctgcgtggaatgcgtggacctgctggtgggccccggcgccgcccaggccgctattaaggaagatccttggaactgctacatgtgcggccacaagggcacatacggcctgctgagacggagagaggactggcctagcagactgcagatgttcttcgccaataaccacgaccaggagttcgacccccctaaggtgtaccctcccgtccccgccgagaagagaaagcccatccgggtcctgagcctgttcgatggcatcgccaccggtctgctggtgctgaaggacctgggcatccaggtggataggtacattgcctccgaggtgtgcgaggactccatcaccgtgggaatggtgcgtcatcagggcaagatcatgtacgtgggcgacgtgcggagcgtgacacagaagcatatccaggagtggggccctttcgacctggtgatcggcggcagcccttgcaatgacctgagcatcgtgaacccagcccggaagggcctgtacgagggaaccggcagactgttcttcgagttttacagactgctgcacgacgcccggcctaaggaaggcgacgaccggcccttcttttggctgttcgagaatgtggtggccatgggagtcagcgacaagcgggatattagccggttcctggagagcaaccccgtgatgatcgatgccaaggaagtgagcgccgcccaccgggccagatacttctggggcaatctgcctggcatgaacagacccctggccagcaccgtgaacgacaagctggagctgcaggagtgcctggagcacggccggatcgccaagttcagcaaggtgagaaccatcaccacccgaagcaacagcatcaaacaaggcaaggaccagcactttcctgtgttcatgaacgagaaggaggacatcctgtggtgtaccgagatggagagagtgttcgggttcccagtccactacacagatgtcagcaacatgtctagactggccagacagagactgctgggaagaagctggtccgtccctgtgatcagacacctgttcgcccctctgaaggagtacttcgcctgcgtgagcagcggcaacagcaacgccaacagccggggccccagcttctctagcggcctggtgccactgtccctgagagggagccacatgggccccatggagatctacaaaaccgtgagcgcctggaagcggcagcctgtgcgcgtgctgagcctgtttcggaatatcgataaagtcctgaaaagcctgggattcctggagagcggctctggctccggcggtggcaccctgaagtacgtggaggatgtgacaaacgtggtcagacgggatgtggagaagtggggccccttcgatctggtgtacggcagcacccaacccctgggcagctcttgtgaccggtgccctggctggtacatgtttcagttccaccggatcctgcagtacgccctgccgagacaggagtcccagcggccattcttttggattttcatggacaacttgctgctgaccgaggatgaccaggaaactaccactcggttcctgcagaccgaagccgtgaccctgcaggacgtgagaggccgggactaccagaacgccatgcgggtgtggtccaacatccctggactgaaaagcaagcacgcacctctgacccctaaagaagaggagtacctgcaggcccaggtgcggagcagaagcaagctggacgcccctaaggtggatctgctggtgaagaattgcctcctgcccctgagagagtacttcaagtatttcagccagaatagtctgcccctgggcggcccaagcagcggcgcccctcctcccagcggcggcagcccagccggctccccaacctctaccgaggagggcacctctgagtccgccacccccgagagcggccctggcacctccaccgagcccagcgagggcagcgcacccggcagccctgccggcagccccacctccacagaggagggaaccagcaccgagcccagcgaaggcagcgccccaggcaccagcaccgagcctagtgagggcggctctggcggcggcagcgcccaggagattaaacggatcaacaagatcagaagaagacttgtgaaagacagcaacaccaagaaggccggcaagacaggccccatgaaaaccctgctggttagagtgatgacacccgatctgagagagcggctggaaaacctgagaaagaagcctgaaaatatcccccagcccatcagcaatacatctagagccaacctgaataagctgctgaccgattacaccgaaatgaagaaggcgatcctgcatgtgtactgggaagagttccagaaggaccctgtgggcctgatgagccgggtggcccagcctgccagcaagaagatcgatcagaacaagctgaaacctgagatggacgagaagggcaacctgaccaccgccggctttgcctgctctcagtgtggccagcccctgttcgtgtacaagctggagcaggtgtctgagaagggcaaggcttacaccaactacttcggacggtgcaatgtggccgagcacgaaaagctgatcctgctggcccagctgaagcccgagaaggatagcgacgaagccgtgacatatagcctgggaaagtttgggcagagggccctggatttctacagcattcatgtgaccaaggagtccacccaccccgtgaagcccctggcccagatcgccggaaacagatacgcctccggacctgtgggaaaggccctgagcgacgcatgtatgggcacaatcgcctccttcctgtctaagtaccaggacatcatcatcgaacaccagaaggtggtgaagggcaaccagaagagactggagagcctgcgggagctggccggcaaggaaaacctggaataccctagcgtgaccctgccacctcagcctcacaccaaggagggcgttgatgcctacaacgaagtgatcgcccgggtgcgaatgtgggtgaacctgaacctgtggcagaagctgaagctaagcagagatgatgccaagcctctgctgagactgaagggattcccttcctttcctctggtcgagagacaggccaacgaagtggactggtgggacatggtgtgtaacgtgaagaagctgatcaacgagaaaaaggaggatggcaaggtgttttggcagaatctggctggctacaagagacaggaagccctgagaccatacctgagcagcgaggaagatcggaagaagggaaagaaattcgctcggtaccagctgggcgacctgctgctgcacctggaaaagaagcacggcgaggactggggaaaggtgtacgacgaggcctgggagcggattgacaagaaagtggaaggcctgagcaagcacatcaagctggaagaggaacggagaagcgaggacgcccagagcaaggccgccctgaccgactggctgcgggctaaggccagcttcgtgatcgagggcctgaaggaggccgacaaggacgagttctgcagatgcgagctgaagctgcagaagtggtacggggacctgcggggaaagcccttcgccatcgaagccgagaacagcatcctggacatcagcggcttcagcaagcagtacaactgtgccttcatctggcagaaggacggcgtgaagaagctgaacctgtacctgatcatcaactacttcaagggcggcaagctgcggttcaagaagatcaaacctgaagccttcgaagccaacagattctacaccgtgatcaacaaaaagagcggcgagatcgtgcccatggaggtgaacttcaacttcgacgaccccaacctgatcatcctgcctctggcctttggcaagagacagggcagagaattcatctggaacgacctgctgtccctggaaaccggcagcctgaagctggccaacggaagagtgatcgagaagacactgtacaacagaagaacccggcaggatgagcctgccctgttcgtggccctgaccttcgagcggcgggaggtcctggactcctccaatatcaaaccaatgaacctgatcggcgtggcaagaggcgaaaacatccccgccgtgatcgccctgaccgaccccgagggctgcccactgagccggtttaaggatagcctgggaaacccaacccacatcctgagaatcggcgagagctataaggagaagcagcggaccatccaggccaagaaggaggtggagcagcggagagccggcggctacagccggaagtacgccagcaaagccaagaatctggcagacgatatggtgagaaacaccgctagagatctgctgtactacgccgtgacccaggatgccatgctgatcttcgccaacctgagccggggcttcggccggcagggcaagcggaccttcatggccgagagacagtacacacggatggaggactggctgaccgccaagctggcctacgagggcctgagcaagacctacctgtccaagacactggcccagtacacctccaagacatgcagcaactgtgggtttaccatcaccagcgccgactacgacagggtgctggagaagctgaagaagacagcaacaggctggatgaccacaattaacggcaaggagctgaaggtggagggccagattacctactacaacagatacaagagacagaacgtagtcaaggacctgtccgtcgagctggatagactgagcgaagaatctgtgaacaacgacatctcctcctggacaaagggcagaagcggagaagctctgagcctcctgaagaaaagattctcccatagacccgtgcaggagaagttcgtgtgcctgaactgcggcttcgagacacacgcagccgagcaagccgccctgaacatcgccagatcctggctgttcctgcggagccaggagtacaagaaataccagacaaacaagacaaccggcaacaccgataagagagccttcgtcgagacctggcagtccttttaccggaagaagcttaaggaggtgtggaaacctgccgtgcggtctggcggatctggcggaggctccacaagcacccagctgaccgtggaggacgtggacatcaagttcacccccgaggagtgggagtgcctggaccccgcccagagggccctgtactgggacgtgatggaggagacctacaggaacctgctgagcgtggacgtgagccacatccacatgaccaagaagctgcaggccaaggccaacagcggcaagggcgagatcctgcagaccgtgatgttcggcagggccgagacccacgagatcaaggacttcaccagccccaagaaaaagagaaaagtctaagctgccttctgcggggcttgccttctggccatgcccttcttctctcccttgcacctgtacctcttggtctttgaataaagcctgagtaggaaggctagcaaaaaaaaaaaaaaaaaaaaaaaaaaaaaaaaaaaaaaaaaaaaaaaaaaaaaaaaaaaaaaaaaaaaaaaaaaaaaaaa

SEQ ID NO: 6093 - RNA, 5797 nt, synthetic construct
  source 1..5797: mol_type = other RNA
aggaaataagagagaaaagaagagtaagaagaaatataagagccaccatggcccctaagaagaagcgtaaagtgagccggatggaacgcctcgtctacgaggtgcggcagaagtgcagaaacatcgaggacatctgcatctcctgcggatctctgaacgtgaccctggagcacccactgttcatcggcggcatgtgccagaactgtaaaaactgttttctggagtgtgcctatcaatacgacgatgacggctaccagagctactgcaccatctgttgcggcggaagagaggtgctgatgtgtggaaataacaactgctgccggtgcttctgcgtggaatgcgtggacctgctggtgggccccggcgccgcccaggccgctattaaggaagatccttggaactgctacatgtgcggccacaagggcacatacggcctgctgagacggagagaggactggcctagcagactgcagatgttcttcgccaataaccacgaccaggagttcgacccccctaaggtgtaccctcccgtccccgccgagaagagaaagcccatccgggtcctgagcctgttcgatggcatcgccaccggtctgctggtgctgaaggacctgggcatccaggtggataggtacattgcctccgaggtgtgcgaggactccatcaccgtgggaatggtgcgtcatcagggcaagatcatgtacgtgggcgacgtgcggagcgtgacacagaagcatatccaggagtggggccctttcgacctggtgatcggcggcagcccttgcaatgacctgagcatcgtgaacccagcccggaagggcctgtacgagggaaccggcagactgttcttcgagttttacagactgctgcacgacgcccggcctaaggaaggcgacgaccggcccttcttttggctgttcgagaatgtggtggccatgggagtcagcgacaagcgggatattagccggttcctggagagcaaccccgtgatgatcgatgccaaggaagtgagcgccgcccaccgggccagatacttctggggcaatctgcctggcatgaacagacccctggccagcaccgtgaacgacaagctggagctgcaggagtgcctggagcacggccggatcgccaagttcagcaaggtgagaaccatcaccacccgaagcaacagcatcaaacaaggcaaggaccagcactttcctgtgttcatgaacgagaaggaggacatcctgtggtgtaccgagatggagagagtgttcgggttcccagtccactacacagatgtcagcaacatgtctagactggccagacagagactgctgggaagaagctggtccgtccctgtgatcagacacctgttcgcccctctgaaggagtacttcgcctgcgtgagcagcggcaacagcaacgccaacagccggggccccagcttctctagcggcctggtgccactgtccctgagagggagccacatgggccccatggagatctacaaaaccgtgagcgcctggaagcggcagcctgtgcgcgtgctgagcctgtttcggaatatcgataaagtcctgaaaagcctgggattcctggagagcggctctggctccggcggtggcaccctgaagtacgtggaggatgtgacaaacgtggtcagacgggatgtggagaagtggggccccttcgatctggtgtacggcagcacccaacccctgggcagctcttgtgaccggtgccctggctggtacatgtttcagttccaccggatcctgcagtacgccctgccgagacaggagtcccagcggccattcttttggattttcatggacaacttgctgctgaccgaggatgaccaggaaactaccactcggttcctgcagaccgaagccgtgaccctgcaggacgtgagaggccgggactaccagaacgccatgcgggtgtggtccaacatccctggactgaaaagcaagcacgcacctctgacccctaaagaagaggagtacctgcaggcccaggtgcggagcagaagcaagctggacgcccctaaggtggatctgctggtgaagaattgcctcctgcccctgagagagtacttcaagtatttcagccagaatagtctgcccctgggcggcccaagcagcggcgcccctcctcccagcggcggcagcccagccggctccccaacctctaccgaggagggcacctctgagtccgccacccccgagagcggccctggcacctccaccgagcccagcgagggcagcgcacccggcagccctgccggcagccccacctccacagaggagggaaccagcaccgagcccagcgaaggcagcgccccaggcaccagcaccgagcctagtgagggcggctctggcggcggcagcgcccaggagattaaacggatcaacaagatcagaagaagacttgtgaaagacagcaacaccaagaaggccggcaagacaggccccatgaaaaccctgctggttagagtgatgacacccgatctgagagagcggctggaaaacctgagaaagaagcctgaaaatatcccccagcccatcagcaatacatctagagccaacctgaataagctgctgaccgattacaccgaaatgaagaaggcgatcctgcatgtgtactgggaagagttccagaaggaccctgtgggcctgatgagccgggtggcccagcctgccagcaagaagatcgatcagaacaagctgaaacctgagatggacgagaagggcaacctgaccaccgccggctttgcctgctctcagtgtggccagcccctgttcgtgtacaagctggagcaggtgtctgagaagggcaaggcttacaccaactacttcggacggtgcaatgtggccgagcacgaaaagctgatcctgctggcccagctgaagcccgagaaggatagcgacgaagccgtgacatatagcctgggaaagtttgggcagagggccctggatttctacagcattcatgtgaccaaggagtccacccaccccgtgaagcccctggcccagatcgccggaaacagatacgcctccggacctgtgggaaaggccctgagcgacgcatgtatgggcacaatcgcctccttcctgtctaagtaccaggacatcatcatcgaacaccagaaggtggtgaagggcaaccagaagagactggagagcctgcgggagctggccggcaaggaaaacctggaataccctagcgtgaccctgccacctcagcctcacaccaaggagggcgttgatgcctacaacgaagtgatcgcccgggtgcgaatgtgggtgaacctgaacctgtggcagaagctgaagctaagcagagatgatgccaagcctctgctgagactgaagggattcccttcctttcctctggtcgagagacaggccaacgaagtggactggtgggacatggtgtgtaacgtgaagaagctgatcaacgagaaaaaggaggatggcaaggtgttttggcagaatctggctggctacaagagacaggaagccctgagaccatacctgagcagcgaggaagatcggaagaagggaaagaaattcgctcggtaccagctgggcgacctgctgctgcacctggaaaagaagcacggcgaggactggggaaaggtgtacgacgaggcctgggagcggattgacaagaaagtggaaggcctgagcaagcacatcaagctggaagaggaacggagaagcgaggacgcccagagcaaggccgccctgaccgactggctgcgggctaaggccagcttcgtgatcgagggcctgaaggaggccgacaaggacgagttctgcagatgcgagctgaagctgcagaagtggtacggggacctgcggggaaagcccttcgccatcgaagccgagaacagcatcctggacatcagcggcttcagcaagcagtacaactgtgccttcatctggcagaaggacggcgtgaagaagctgaacctgtacctgatcatcaactacttcaagggcggcaagctgcggttcaagaagatcaaacctgaagccttcgaagccaacagattctacaccgtgatcaacaaaaagagcggcgagatcgtgcccatggaggtgaacttcaacttcgacgaccccaacctgatcatcctgcctctggcctttggcaagagacagggcagagaattcatctggaacgacctgctgtccctggaaaccggcagcctgaagctggccaacggaagagtgatcgagaagacactgtacaacagaagaacccggcaggatgagcctgccctgttcgtggccctgaccttcgagcggcgggaggtcctggactcctccaatatcaaaccaatgaacctgatcggcgtggcaagaggcgaaaacatccccgccgtgatcgccctgaccgaccccgagggctgcccactgagccggtttaaggatagcctgggaaacccaacccacatcctgagaatcggcgagagctataaggagaagcagcggaccatccaggccaagaaggaggtggagcagcggagagccggcggctacagccggaagtacgccagcaaagccaagaatctggcagacgatatggtgagaaacaccgctagagatctgctgtactacgccgtgacccaggatgccatgctgatcttcgccaacctgagccggggcttcggccggcagggcaagcggaccttcatggccgagagacagtacacacggatggaggactggctgaccgccaagctggcctacgagggcctgagcaagacctacctgtccaagacactggcccagtacacctccaagacatgcagcaactgtgggtttaccatcaccagcgccgactacgacagggtgctggagaagctgaagaagacagcaacaggctggatgaccacaattaacggcaaggagctgaaggtggagggccagattacctactacaacagatacaagagacagaacgtagtcaaggacctgtccgtcgagctggatagactgagcgaagaatctgtgaacaacgacatctcctcctggacaaagggcagaagcggagaagctctgagcctcctgaagaaaagattctcccatagacccgtgcaggagaagttcgtgtgcctgaactgcggcttcgagacacacgcagccgagcaagccgccctgaacatcgccagatcctggctgttcctgcggagccaggagtacaagaaataccagacaaacaagacaaccggcaacaccgataagagagccttcgtcgagacctggcagtccttttaccggaagaagcttaaggaggtgtggaaacctgccgtgcggtctggcggatctggcggaggctccacaagcacctgcatggtgcacaggcagaccatgagctgcagcggcgccggcggcatcaccgccttcgtggccttcagggacgtggccgtggacttcacccaggaggagtggaggctgctgagccccgcccagaggaccctgcacagggaggtgatgctggagacctacaaccacctggtgagcctggagatccccagcagcaagcccaagctgatcgcccagctggagaggggcgaggagccctggaggaccagccccaagaaaaagagaaaagtctaagctgccttctgcggggcttgccttctggccatgcccttcttctctcccttgcacctgtacctcttggtctttgaataaagcctgagtaggaaggctagcaaaaaaaaaaaaaaaaaaaaaaaaaaaaaaaaaaaaaaaaaaaaaaaaaaaaaaaaaaaaaaaaaaaaaaaaaaaaaaaa

SEQ ID NO: 6094 - RNA, 5797 nt, synthetic construct
  source 1..5797: mol_type = other RNA
aggaaataagagagaaaagaagagtaagaagaaatataagagccaccatggcccctaagaagaagcgtaaagtgagccggatggaacgcctcgtctacgaggtgcggcagaagtgcagaaacatcgaggacatctgcatctcctgcggatctctgaacgtgaccctggagcacccactgttcatcggcggcatgtgccagaactgtaaaaactgttttctggagtgtgcctatcaatacgacgatgacggctaccagagctactgcaccatctgttgcggcggaagagaggtgctgatgtgtggaaataacaactgctgccggtgcttctgcgtggaatgcgtggacctgctggtgggccccggcgccgcccaggccgctattaaggaagatccttggaactgctacatgtgcggccacaagggcacatacggcctgctgagacggagagaggactggcctagcagactgcagatgttcttcgccaataaccacgaccaggagttcgacccccctaaggtgtaccctcccgtccccgccgagaagagaaagcccatccgggtcctgagcctgttcgatggcatcgccaccggtctgctggtgctgaaggacctgggcatccaggtggataggtacattgcctccgaggtgtgcgaggactccatcaccgtgggaatggtgcgtcatcagggcaagatcatgtacgtgggcgacgtgcggagcgtgacacagaagcatatccaggagtggggccctttcgacctggtgatcggcggcagcccttgcaatgacctgagcatcgtgaacccagcccggaagggcctgtacgagggaaccggcagactgttcttcgagttttacagactgctgcacgacgcccggcctaaggaaggcgacgaccggcccttcttttggctgttcgagaatgtggtggccatgggagtcagcgacaagcgggatattagccggttcctggagagcaaccccgtgatgatcgatgccaaggaagtgagcgccgcccaccgggccagatacttctggggcaatctgcctggcatgaacagacccctggccagcaccgtgaacgacaagctggagctgcaggagtgcctggagcacggccggatcgccaagttcagcaaggtgagaaccatcaccacccgaagcaacagcatcaaacaaggcaaggaccagcactttcctgtgttcatgaacgagaaggaggacatcctgtggtgtaccgagatggagagagtgttcgggttcccagtccactacacagatgtcagcaacatgtctagactggccagacagagactgctgggaagaagctggtccgtccctgtgatcagacacctgttcgcccctctgaaggagtacttcgcctgcgtgagcagcggcaacagcaacgccaacagccggggccccagcttctctagcggcctggtgccactgtccctgagagggagccacatgggccccatggagatctacaaaaccgtgagcgcctggaagcggcagcctgtgcgcgtgctgagcctgtttcggaatatcgataaagtcctgaaaagcctgggattcctggagagcggctctggctccggcggtggcaccctgaagtacgtggaggatgtgacaaacgtggtcagacgggatgtggagaagtggggccccttcgatctggtgtacggcagcacccaacccctgggcagctcttgtgaccggtgccctggctggtacatgtttcagttccaccggatcctgcagtacgccctgccgagacaggagtcccagcggccattcttttggattttcatggacaacttgctgctgaccgaggatgaccaggaaactaccactcggttcctgcagaccgaagccgtgaccctgcaggacgtgagaggccgggactaccagaacgccatgcgggtgtggtccaacatccctggactgaaaagcaagcacgcacctctgacccctaaagaagaggagtacctgcaggcccaggtgcggagcagaagcaagctggacgcccctaaggtggatctgctggtgaagaattgcctcctgcccctgagagagtacttcaagtatttcagccagaatagtctgcccctgggcggcccaagcagcggcgcccctcctcccagcggcggcagcccagccggctccccaacctctaccgaggagggcacctctgagtccgccacccccgagagcggccctggcacctccaccgagcccagcgagggcagcgcacccggcagccctgccggcagccccacctccacagaggagggaaccagcaccgagcccagcgaaggcagcgccccaggcaccagcaccgagcctagtgagggcggctctggcggcggcagcgcccaggagattaaacggatcaacaagatcagaagaagacttgtgaaagacagcaacaccaagaaggccggcaagacaggccccatgaaaaccctgctggttagagtgatgacacccgatctgagagagcggctggaaaacctgagaaagaagcctgaaaatatcccccagcccatcagcaatacatctagagccaacctgaataagctgctgaccgattacaccgaaatgaagaaggcgatcctgcatgtgtactgggaagagttccagaaggaccctgtgggcctgatgagccgggtggcccagcctgccagcaagaagatcgatcagaacaagctgaaacctgagatggacgagaagggcaacctgaccaccgccggctttgcctgctctcagtgtggccagcccctgttcgtgtacaagctggagcaggtgtctgagaagggcaaggcttacaccaactacttcggacggtgcaatgtggccgagcacgaaaagctgatcctgctggcccagctgaagcccgagaaggatagcgacgaagccgtgacatatagcctgggaaagtttgggcagagggccctggatttctacagcattcatgtgaccaaggagtccacccaccccgtgaagcccctggcccagatcgccggaaacagatacgcctccggacctgtgggaaaggccctgagcgacgcatgtatgggcacaatcgcctccttcctgtctaagtaccaggacatcatcatcgaacaccagaaggtggtgaagggcaaccagaagagactggagagcctgcgggagctggccggcaaggaaaacctggaataccctagcgtgaccctgccacctcagcctcacaccaaggagggcgttgatgcctacaacgaagtgatcgcccgggtgcgaatgtgggtgaacctgaacctgtggcagaagctgaagctaagcagagatgatgccaagcctctgctgagactgaagggattcccttcctttcctctggtcgagagacaggccaacgaagtggactggtgggacatggtgtgtaacgtgaagaagctgatcaacgagaaaaaggaggatggcaaggtgttttggcagaatctggctggctacaagagacaggaagccctgagaccatacctgagcagcgaggaagatcggaagaagggaaagaaattcgctcggtaccagctgggcgacctgctgctgcacctggaaaagaagcacggcgaggactggggaaaggtgtacgacgaggcctgggagcggattgacaagaaagtggaaggcctgagcaagcacatcaagctggaagaggaacggagaagcgaggacgcccagagcaaggccgccctgaccgactggctgcgggctaaggccagcttcgtgatcgagggcctgaaggaggccgacaaggacgagttctgcagatgcgagctgaagctgcagaagtggtacggggacctgcggggaaagcccttcgccatcgaagccgagaacagcatcctggacatcagcggcttcagcaagcagtacaactgtgccttcatctggcagaaggacggcgtgaagaagctgaacctgtacctgatcatcaactacttcaagggcggcaagctgcggttcaagaagatcaaacctgaagccttcgaagccaacagattctacaccgtgatcaacaaaaagagcggcgagatcgtgcccatggaggtgaacttcaacttcgacgaccccaacctgatcatcctgcctctggcctttggcaagagacagggcagagaattcatctggaacgacctgctgtccctggaaaccggcagcctgaagctggccaacggaagagtgatcgagaagacactgtacaacagaagaacccggcaggatgagcctgccctgttcgtggccctgaccttcgagcggcgggaggtcctggactcctccaatatcaaaccaatgaacctgatcggcgtggcaagaggcgaaaacatccccgccgtgatcgccctgaccgaccccgagggctgcccactgagccggtttaaggatagcctgggaaacccaacccacatcctgagaatcggcgagagctataaggagaagcagcggaccatccaggccaagaaggaggtggagcagcggagagccggcggctacagccggaagtacgccagcaaagccaagaatctggcagacgatatggtgagaaacaccgctagagatctgctgtactacgccgtgacccaggatgccatgctgatcttcgccaacctgagccggggcttcggccggcagggcaagcggaccttcatggccgagagacagtacacacggatggaggactggctgaccgccaagctggcctacgagggcctgagcaagacctacctgtccaagacactggcccagtacacctccaagacatgcagcaactgtgggtttaccatcaccagcgccgactacgacagggtgctggagaagctgaagaagacagcaacaggctggatgaccacaattaacggcaaggagctgaaggtggagggccagattacctactacaacagatacaagagacagaacgtagtcaaggacctgtccgtcgagctggatagactgagcgaagaatctgtgaacaacgacatctcctcctggacaaagggcagaagcggagaagctctgagcctcctgaagaaaagattctcccatagacccgtgcaggagaagttcgtgtgcctgaactgcggcttcgagacacacgcagccgagcaagccgccctgaacatcgccagatcctggctgttcctgcggagccaggagtacaagaaataccagacaaacaagacaaccggcaacaccgataagagagccttcgtcgagacctggcagtccttttaccggaagaagcttaaggaggtgtggaaacctgccgtgcggtctggcggatctggcggaggctccacaagcagccagagcctggtgaccttcggcgacgtggccgtggacttcagccaggaggagtgggagtggctgaacagcgcccagaggaacctgtacaggagcgtgatgctggagaactacaggaacctggtgagcctgggcctgtgcgtgagcaagcccgacatgatcagcagcctggagcagaggaaggagccctggatggtgaagaggaagctgaccaggggcaggtgccccgacctgaagaccgtgaccagccccaagaaaaagagaaaagtctaagctgccttctgcggggcttgccttctggccatgcccttcttctctcccttgcacctgtacctcttggtctttgaataaagcctgagtaggaaggctagcaaaaaaaaaaaaaaaaaaaaaaaaaaaaaaaaaaaaaaaaaaaaaaaaaaaaaaaaaaaaaaaaaaaaaaaaaaaaaaaa

SEQ ID NO: 6095 - RNA, 5797 nt, synthetic construct
  source 1..5797: mol_type = other RNA
aggaaataagagagaaaagaagagtaagaagaaatataagagccaccatggcccctaagaagaagcgtaaagtgagccggatggaacgcctcgtctacgaggtgcggcagaagtgcagaaacatcgaggacatctgcatctcctgcggatctctgaacgtgaccctggagcacccactgttcatcggcggcatgtgccagaactgtaaaaactgttttctggagtgtgcctatcaatacgacgatgacggctaccagagctactgcaccatctgttgcggcggaagagaggtgctgatgtgtggaaataacaactgctgccggtgcttctgcgtggaatgcgtggacctgctggtgggccccggcgccgcccaggccgctattaaggaagatccttggaactgctacatgtgcggccacaagggcacatacggcctgctgagacggagagaggactggcctagcagactgcagatgttcttcgccaataaccacgaccaggagttcgacccccctaaggtgtaccctcccgtccccgccgagaagagaaagcccatccgggtcctgagcctgttcgatggcatcgccaccggtctgctggtgctgaaggacctgggcatccaggtggataggtacattgcctccgaggtgtgcgaggactccatcaccgtgggaatggtgcgtcatcagggcaagatcatgtacgtgggcgacgtgcggagcgtgacacagaagcatatccaggagtggggccctttcgacctggtgatcggcggcagcccttgcaatgacctgagcatcgtgaacccagcccggaagggcctgtacgagggaaccggcagactgttcttcgagttttacagactgctgcacgacgcccggcctaaggaaggcgacgaccggcccttcttttggctgttcgagaatgtggtggccatgggagtcagcgacaagcgggatattagccggttcctggagagcaaccccgtgatgatcgatgccaaggaagtgagcgccgcccaccgggccagatacttctggggcaatctgcctggcatgaacagacccctggccagcaccgtgaacgacaagctggagctgcaggagtgcctggagcacggccggatcgccaagttcagcaaggtgagaaccatcaccacccgaagcaacagcatcaaacaaggcaaggaccagcactttcctgtgttcatgaacgagaaggaggacatcctgtggtgtaccgagatggagagagtgttcgggttcccagtccactacacagatgtcagcaacatgtctagactggccagacagagactgctgggaagaagctggtccgtccctgtgatcagacacctgttcgcccctctgaaggagtacttcgcctgcgtgagcagcggcaacagcaacgccaacagccggggccccagcttctctagcggcctggtgccactgtccctgagagggagccacatgggccccatggagatctacaaaaccgtgagcgcctggaagcggcagcctgtgcgcgtgctgagcctgtttcggaatatcgataaagtcctgaaaagcctgggattcctggagagcggctctggctccggcggtggcaccctgaagtacgtggaggatgtgacaaacgtggtcagacgggatgtggagaagtggggccccttcgatctggtgtacggcagcacccaacccctgggcagctcttgtgaccggtgccctggctggtacatgtttcagttccaccggatcctgcagtacgccctgccgagacaggagtcccagcggccattcttttggattttcatggacaacttgctgctgaccgaggatgaccaggaaactaccactcggttcctgcagaccgaagccgtgaccctgcaggacgtgagaggccgggactaccagaacgccatgcgggtgtggtccaacatccctggactgaaaagcaagcacgcacctctgacccctaaagaagaggagtacctgcaggcccaggtgcggagcagaagcaagctggacgcccctaaggtggatctgctggtgaagaattgcctcctgcccctgagagagtacttcaagtatttcagccagaatagtctgcccctgggcggcccaagcagcggcgcccctcctcccagcggcggcagcccagccggctccccaacctctaccgaggagggcacctctgagtccgccacccccgagagcggccctggcacctccaccgagcccagcgagggcagcgcacccggcagccctgccggcagccccacctccacagaggagggaaccagcaccgagcccagcgaaggcagcgccccaggcaccagcaccgagcctagtgagggcggctctggcggcggcagcgcccaggagattaaacggatcaacaagatcagaagaagacttgtgaaagacagcaacaccaagaaggccggcaagacaggccccatgaaaaccctgctggttagagtgatgacacccgatctgagagagcggctggaaaacctgagaaagaagcctgaaaatatcccccagcccatcagcaatacatctagagccaacctgaataagctgctgaccgattacaccgaaatgaagaaggcgatcctgcatgtgtactgggaagagttccagaaggaccctgtgggcctgatgagccgggtggcccagcctgccagcaagaagatcgatcagaacaagctgaaacctgagatggacgagaagggcaacctgaccaccgccggctttgcctgctctcagtgtggccagcccctgttcgtgtacaagctggagcaggtgtctgagaagggcaaggcttacaccaactacttcggacggtgcaatgtggccgagcacgaaaagctgatcctgctggcccagctgaagcccgagaaggatagcgacgaagccgtgacatatagcctgggaaagtttgggcagagggccctggatttctacagcattcatgtgaccaaggagtccacccaccccgtgaagcccctggcccagatcgccggaaacagatacgcctccggacctgtgggaaaggccctgagcgacgcatgtatgggcacaatcgcctccttcctgtctaagtaccaggacatcatcatcgaacaccagaaggtggtgaagggcaaccagaagagactggagagcctgcgggagctggccggcaaggaaaacctggaataccctagcgtgaccctgccacctcagcctcacaccaaggagggcgttgatgcctacaacgaagtgatcgcccgggtgcgaatgtgggtgaacctgaacctgtggcagaagctgaagctaagcagagatgatgccaagcctctgctgagactgaagggattcccttcctttcctctggtcgagagacaggccaacgaagtggactggtgggacatggtgtgtaacgtgaagaagctgatcaacgagaaaaaggaggatggcaaggtgttttggcagaatctggctggctacaagagacaggaagccctgagaccatacctgagcagcgaggaagatcggaagaagggaaagaaattcgctcggtaccagctgggcgacctgctgctgcacctggaaaagaagcacggcgaggactggggaaaggtgtacgacgaggcctgggagcggattgacaagaaagtggaaggcctgagcaagcacatcaagctggaagaggaacggagaagcgaggacgcccagagcaaggccgccctgaccgactggctgcgggctaaggccagcttcgtgatcgagggcctgaaggaggccgacaaggacgagttctgcagatgcgagctgaagctgcagaagtggtacggggacctgcggggaaagcccttcgccatcgaagccgagaacagcatcctggacatcagcggcttcagcaagcagtacaactgtgccttcatctggcagaaggacggcgtgaagaagctgaacctgtacctgatcatcaactacttcaagggcggcaagctgcggttcaagaagatcaaacctgaagccttcgaagccaacagattctacaccgtgatcaacaaaaagagcggcgagatcgtgcccatggaggtgaacttcaacttcgacgaccccaacctgatcatcctgcctctggcctttggcaagagacagggcagagaattcatctggaacgacctgctgtccctggaaaccggcagcctgaagctggccaacggaagagtgatcgagaagacactgtacaacagaagaacccggcaggatgagcctgccctgttcgtggccctgaccttcgagcggcgggaggtcctggactcctccaatatcaaaccaatgaacctgatcggcgtggcaagaggcgaaaacatccccgccgtgatcgccctgaccgaccccgagggctgcccactgagccggtttaaggatagcctgggaaacccaacccacatcctgagaatcggcgagagctataaggagaagcagcggaccatccaggccaagaaggaggtggagcagcggagagccggcggctacagccggaagtacgccagcaaagccaagaatctggcagacgatatggtgagaaacaccgctagagatctgctgtactacgccgtgacccaggatgccatgctgatcttcgccaacctgagccggggcttcggccggcagggcaagcggaccttcatggccgagagacagtacacacggatggaggactggctgaccgccaagctggcctacgagggcctgagcaagacctacctgtccaagacactggcccagtacacctccaagacatgcagcaactgtgggtttaccatcaccagcgccgactacgacagggtgctggagaagctgaagaagacagcaacaggctggatgaccacaattaacggcaaggagctgaaggtggagggccagattacctactacaacagatacaagagacagaacgtagtcaaggacctgtccgtcgagctggatagactgagcgaagaatctgtgaacaacgacatctcctcctggacaaagggcagaagcggagaagctctgagcctcctgaagaaaagattctcccatagacccgtgcaggagaagttcgtgtgcctgaactgcggcttcgagacacacgcagccgagcaagccgccctgaacatcgccagatcctggctgttcctgcggagccaggagtacaagaaataccagacaaacaagacaaccggcaacaccgataagagagccttcgtcgagacctggcagtccttttaccggaagaagcttaaggaggtgtggaaacctgccgtgcggtctggcggatctggcggaggctccacaagcagccaggagcccgtgagcttcgccgacgtggccgtgtacttcagcagggaggagtgggccctgctggaccccgcccagagggtgctgtacagggacgtgatgctggagacctacgagtgcatcgccagcctggcctgccccgcccccaagcccgccgtgatcagcatgctggagggcgaggaggacccctggatccccgaggacatggccggcgacctgggccccggcgagcccgtgagggagaccagccccaagaaaaagagaaaagtctaagctgccttctgcggggcttgccttctggccatgcccttcttctctcccttgcacctgtacctcttggtctttgaataaagcctgagtaggaaggctagcaaaaaaaaaaaaaaaaaaaaaaaaaaaaaaaaaaaaaaaaaaaaaaaaaaaaaaaaaaaaaaaaaaaaaaaaaaaaaaaa

SEQ ID NO: 6096 - RNA, 5797 nt, synthetic construct
  source 1..5797: mol_type = other RNA
aggaaataagagagaaaagaagagtaagaagaaatataagagccaccatggcccctaagaagaagcgtaaagtgagccggatggaacgcctcgtctacgaggtgcggcagaagtgcagaaacatcgaggacatctgcatctcctgcggatctctgaacgtgaccctggagcacccactgttcatcggcggcatgtgccagaactgtaaaaactgttttctggagtgtgcctatcaatacgacgatgacggctaccagagctactgcaccatctgttgcggcggaagagaggtgctgatgtgtggaaataacaactgctgccggtgcttctgcgtggaatgcgtggacctgctggtgggccccggcgccgcccaggccgctattaaggaagatccttggaactgctacatgtgcggccacaagggcacatacggcctgctgagacggagagaggactggcctagcagactgcagatgttcttcgccaataaccacgaccaggagttcgacccccctaaggtgtaccctcccgtccccgccgagaagagaaagcccatccgggtcctgagcctgttcgatggcatcgccaccggtctgctggtgctgaaggacctgggcatccaggtggataggtacattgcctccgaggtgtgcgaggactccatcaccgtgggaatggtgcgtcatcagggcaagatcatgtacgtgggcgacgtgcggagcgtgacacagaagcatatccaggagtggggccctttcgacctggtgatcggcggcagcccttgcaatgacctgagcatcgtgaacccagcccggaagggcctgtacgagggaaccggcagactgttcttcgagttttacagactgctgcacgacgcccggcctaaggaaggcgacgaccggcccttcttttggctgttcgagaatgtggtggccatgggagtcagcgacaagcgggatattagccggttcctggagagcaaccccgtgatgatcgatgccaaggaagtgagcgccgcccaccgggccagatacttctggggcaatctgcctggcatgaacagacccctggccagcaccgtgaacgacaagctggagctgcaggagtgcctggagcacggccggatcgccaagttcagcaaggtgagaaccatcaccacccgaagcaacagcatcaaacaaggcaaggaccagcactttcctgtgttcatgaacgagaaggaggacatcctgtggtgtaccgagatggagagagtgttcgggttcccagtccactacacagatgtcagcaacatgtctagactggccagacagagactgctgggaagaagctggtccgtccctgtgatcagacacctgttcgcccctctgaaggagtacttcgcctgcgtgagcagcggcaacagcaacgccaacagccggggccccagcttctctagcggcctggtgccactgtccctgagagggagccacatgggccccatggagatctacaaaaccgtgagcgcctggaagcggcagcctgtgcgcgtgctgagcctgtttcggaatatcgataaagtcctgaaaagcctgggattcctggagagcggctctggctccggcggtggcaccctgaagtacgtggaggatgtgacaaacgtggtcagacgggatgtggagaagtggggccccttcgatctggtgtacggcagcacccaacccctgggcagctcttgtgaccggtgccctggctggtacatgtttcagttccaccggatcctgcagtacgccctgccgagacaggagtcccagcggccattcttttggattttcatggacaacttgctgctgaccgaggatgaccaggaaactaccactcggttcctgcagaccgaagccgtgaccctgcaggacgtgagaggccgggactaccagaacgccatgcgggtgtggtccaacatccctggactgaaaagcaagcacgcacctctgacccctaaagaagaggagtacctgcaggcccaggtgcggagcagaagcaagctggacgcccctaaggtggatctgctggtgaagaattgcctcctgcccctgagagagtacttcaagtatttcagccagaatagtctgcccctgggcggcccaagcagcggcgcccctcctcccagcggcggcagcccagccggctccccaacctctaccgaggagggcacctctgagtccgccacccccgagagcggccctggcacctccaccgagcccagcgagggcagcgcacccggcagccctgccggcagccccacctccacagaggagggaaccagcaccgagcccagcgaaggcagcgccccaggcaccagcaccgagcctagtgagggcggctctggcggcggcagcgcccaggagattaaacggatcaacaagatcagaagaagacttgtgaaagacagcaacaccaagaaggccggcaagacaggccccatgaaaaccctgctggttagagtgatgacacccgatctgagagagcggctggaaaacctgagaaagaagcctgaaaatatcccccagcccatcagcaatacatctagagccaacctgaataagctgctgaccgattacaccgaaatgaagaaggcgatcctgcatgtgtactgggaagagttccagaaggaccctgtgggcctgatgagccgggtggcccagcctgccagcaagaagatcgatcagaacaagctgaaacctgagatggacgagaagggcaacctgaccaccgccggctttgcctgctctcagtgtggccagcccctgttcgtgtacaagctggagcaggtgtctgagaagggcaaggcttacaccaactacttcggacggtgcaatgtggccgagcacgaaaagctgatcctgctggcccagctgaagcccgagaaggatagcgacgaagccgtgacatatagcctgggaaagtttgggcagagggccctggatttctacagcattcatgtgaccaaggagtccacccaccccgtgaagcccctggcccagatcgccggaaacagatacgcctccggacctgtgggaaaggccctgagcgacgcatgtatgggcacaatcgcctccttcctgtctaagtaccaggacatcatcatcgaacaccagaaggtggtgaagggcaaccagaagagactggagagcctgcgggagctggccggcaaggaaaacctggaataccctagcgtgaccctgccacctcagcctcacaccaaggagggcgttgatgcctacaacgaagtgatcgcccgggtgcgaatgtgggtgaacctgaacctgtggcagaagctgaagctaagcagagatgatgccaagcctctgctgagactgaagggattcccttcctttcctctggtcgagagacaggccaacgaagtggactggtgggacatggtgtgtaacgtgaagaagctgatcaacgagaaaaaggaggatggcaaggtgttttggcagaatctggctggctacaagagacaggaagccctgagaccatacctgagcagcgaggaagatcggaagaagggaaagaaattcgctcggtaccagctgggcgacctgctgctgcacctggaaaagaagcacggcgaggactggggaaaggtgtacgacgaggcctgggagcggattgacaagaaagtggaaggcctgagcaagcacatcaagctggaagaggaacggagaagcgaggacgcccagagcaaggccgccctgaccgactggctgcgggctaaggccagcttcgtgatcgagggcctgaaggaggccgacaaggacgagttctgcagatgcgagctgaagctgcagaagtggtacggggacctgcggggaaagcccttcgccatcgaagccgagaacagcatcctggacatcagcggcttcagcaagcagtacaactgtgccttcatctggcagaaggacggcgtgaagaagctgaacctgtacctgatcatcaactacttcaagggcggcaagctgcggttcaagaagatcaaacctgaagccttcgaagccaacagattctacaccgtgatcaacaaaaagagcggcgagatcgtgcccatggaggtgaacttcaacttcgacgaccccaacctgatcatcctgcctctggcctttggcaagagacagggcagagaattcatctggaacgacctgctgtccctggaaaccggcagcctgaagctggccaacggaagagtgatcgagaagacactgtacaacagaagaacccggcaggatgagcctgccctgttcgtggccctgaccttcgagcggcgggaggtcctggactcctccaatatcaaaccaatgaacctgatcggcgtggcaagaggcgaaaacatccccgccgtgatcgccctgaccgaccccgagggctgcccactgagccggtttaaggatagcctgggaaacccaacccacatcctgagaatcggcgagagctataaggagaagcagcggaccatccaggccaagaaggaggtggagcagcggagagccggcggctacagccggaagtacgccagcaaagccaagaatctggcagacgatatggtgagaaacaccgctagagatctgctgtactacgccgtgacccaggatgccatgctgatcttcgccaacctgagccggggcttcggccggcagggcaagcggaccttcatggccgagagacagtacacacggatggaggactggctgaccgccaagctggcctacgagggcctgagcaagacctacctgtccaagacactggcccagtacacctccaagacatgcagcaactgtgggtttaccatcaccagcgccgactacgacagggtgctggagaagctgaagaagacagcaacaggctggatgaccacaattaacggcaaggagctgaaggtggagggccagattacctactacaacagatacaagagacagaacgtagtcaaggacctgtccgtcgagctggatagactgagcgaagaatctgtgaacaacgacatctcctcctggacaaagggcagaagcggagaagctctgagcctcctgaagaaaagattctcccatagacccgtgcaggagaagttcgtgtgcctgaactgcggcttcgagacacacgcagccgagcaagccgccctgaacatcgccagatcctggctgttcctgcggagccaggagtacaagaaataccagacaaacaagacaaccggcaacaccgataagagagccttcgtcgagacctggcagtccttttaccggaagaagcttaaggaggtgtggaaacctgccgtgcggtctggcggatctggcggaggctccacaagcttccagggcagcgtgaccttcagggacgtggccatcgacttcagccaggaggagtgggagtggctgcagcccgcccagagggacctgtacaggcacgtgatgctggagaactacggccacctggtgagcctgggcctggacatcagcaagccctacgtggtgagcctgctggagcagggcagggagccctggctggtgaagggcgacgtgaggagggaccccttcagcgtgagcgagagcaacaccagccccaagaaaaagagaaaagtctaagctgccttctgcggggcttgccttctggccatgcccttcttctctcccttgcacctgtacctcttggtctttgaataaagcctgagtaggaaggctagcaaaaaaaaaaaaaaaaaaaaaaaaaaaaaaaaaaaaaaaaaaaaaaaaaaaaaaaaaaaaaaaaaaaaaaaaaaaaaaaa

SEQ ID NO: 6097 - RNA, 5797 nt, synthetic construct
  source 1..5797: mol_type = other RNA
aggaaataagagagaaaagaagagtaagaagaaatataagagccaccatggcccctaagaagaagcgtaaagtgagccggatggaacgcctcgtctacgaggtgcggcagaagtgcagaaacatcgaggacatctgcatctcctgcggatctctgaacgtgaccctggagcacccactgttcatcggcggcatgtgccagaactgtaaaaactgttttctggagtgtgcctatcaatacgacgatgacggctaccagagctactgcaccatctgttgcggcggaagagaggtgctgatgtgtggaaataacaactgctgccggtgcttctgcgtggaatgcgtggacctgctggtgggccccggcgccgcccaggccgctattaaggaagatccttggaactgctacatgtgcggccacaagggcacatacggcctgctgagacggagagaggactggcctagcagactgcagatgttcttcgccaataaccacgaccaggagttcgacccccctaaggtgtaccctcccgtccccgccgagaagagaaagcccatccgggtcctgagcctgttcgatggcatcgccaccggtctgctggtgctgaaggacctgggcatccaggtggataggtacattgcctccgaggtgtgcgaggactccatcaccgtgggaatggtgcgtcatcagggcaagatcatgtacgtgggcgacgtgcggagcgtgacacagaagcatatccaggagtggggccctttcgacctggtgatcggcggcagcccttgcaatgacctgagcatcgtgaacccagcccggaagggcctgtacgagggaaccggcagactgttcttcgagttttacagactgctgcacgacgcccggcctaaggaaggcgacgaccggcccttcttttggctgttcgagaatgtggtggccatgggagtcagcgacaagcgggatattagccggttcctggagagcaaccccgtgatgatcgatgccaaggaagtgagcgccgcccaccgggccagatacttctggggcaatctgcctggcatgaacagacccctggccagcaccgtgaacgacaagctggagctgcaggagtgcctggagcacggccggatcgccaagttcagcaaggtgagaaccatcaccacccgaagcaacagcatcaaacaaggcaaggaccagcactttcctgtgttcatgaacgagaaggaggacatcctgtggtgtaccgagatggagagagtgttcgggttcccagtccactacacagatgtcagcaacatgtctagactggccagacagagactgctgggaagaagctggtccgtccctgtgatcagacacctgttcgcccctctgaaggagtacttcgcctgcgtgagcagcggcaacagcaacgccaacagccggggccccagcttctctagcggcctggtgccactgtccctgagagggagccacatgggccccatggagatctacaaaaccgtgagcgcctggaagcggcagcctgtgcgcgtgctgagcctgtttcggaatatcgataaagtcctgaaaagcctgggattcctggagagcggctctggctccggcggtggcaccctgaagtacgtggaggatgtgacaaacgtggtcagacgggatgtggagaagtggggccccttcgatctggtgtacggcagcacccaacccctgggcagctcttgtgaccggtgccctggctggtacatgtttcagttccaccggatcctgcagtacgccctgccgagacaggagtcccagcggccattcttttggattttcatggacaacttgctgctgaccgaggatgaccaggaaactaccactcggttcctgcagaccgaagccgtgaccctgcaggacgtgagaggccgggactaccagaacgccatgcgggtgtggtccaacatccctggactgaaaagcaagcacgcacctctgacccctaaagaagaggagtacctgcaggcccaggtgcggagcagaagcaagctggacgcccctaaggtggatctgctggtgaagaattgcctcctgcccctgagagagtacttcaagtatttcagccagaatagtctgcccctgggcggcccaagcagcggcgcccctcctcccagcggcggcagcccagccggctccccaacctctaccgaggagggcacctctgagtccgccacccccgagagcggccctggcacctccaccgagcccagcgagggcagcgcacccggcagccctgccggcagccccacctccacagaggagggaaccagcaccgagcccagcgaaggcagcgccccaggcaccagcaccgagcctagtgagggcggctctggcggcggcagcgcccaggagattaaacggatcaacaagatcagaagaagacttgtgaaagacagcaacaccaagaaggccggcaagacaggccccatgaaaaccctgctggttagagtgatgacacccgatctgagagagcggctggaaaacctgagaaagaagcctgaaaatatcccccagcccatcagcaatacatctagagccaacctgaataagctgctgaccgattacaccgaaatgaagaaggcgatcctgcatgtgtactgggaagagttccagaaggaccctgtgggcctgatgagccgggtggcccagcctgccagcaagaagatcgatcagaacaagctgaaacctgagatggacgagaagggcaacctgaccaccgccggctttgcctgctctcagtgtggccagcccctgttcgtgtacaagctggagcaggtgtctgagaagggcaaggcttacaccaactacttcggacggtgcaatgtggccgagcacgaaaagctgatcctgctggcccagctgaagcccgagaaggatagcgacgaagccgtgacatatagcctgggaaagtttgggcagagggccctggatttctacagcattcatgtgaccaaggagtccacccaccccgtgaagcccctggcccagatcgccggaaacagatacgcctccggacctgtgggaaaggccctgagcgacgcatgtatgggcacaatcgcctccttcctgtctaagtaccaggacatcatcatcgaacaccagaaggtggtgaagggcaaccagaagagactggagagcctgcgggagctggccggcaaggaaaacctggaataccctagcgtgaccctgccacctcagcctcacaccaaggagggcgttgatgcctacaacgaagtgatcgcccgggtgcgaatgtgggtgaacctgaacctgtggcagaagctgaagctaagcagagatgatgccaagcctctgctgagactgaagggattcccttcctttcctctggtcgagagacaggccaacgaagtggactggtgggacatggtgtgtaacgtgaagaagctgatcaacgagaaaaaggaggatggcaaggtgttttggcagaatctggctggctacaagagacaggaagccctgagaccatacctgagcagcgaggaagatcggaagaagggaaagaaattcgctcggtaccagctgggcgacctgctgctgcacctggaaaagaagcacggcgaggactggggaaaggtgtacgacgaggcctgggagcggattgacaagaaagtggaaggcctgagcaagcacatcaagctggaagaggaacggagaagcgaggacgcccagagcaaggccgccctgaccgactggctgcgggctaaggccagcttcgtgatcgagggcctgaaggaggccgacaaggacgagttctgcagatgcgagctgaagctgcagaagtggtacggggacctgcggggaaagcccttcgccatcgaagccgagaacagcatcctggacatcagcggcttcagcaagcagtacaactgtgccttcatctggcagaaggacggcgtgaagaagctgaacctgtacctgatcatcaactacttcaagggcggcaagctgcggttcaagaagatcaaacctgaagccttcgaagccaacagattctacaccgtgatcaacaaaaagagcggcgagatcgtgcccatggaggtgaacttcaacttcgacgaccccaacctgatcatcctgcctctggcctttggcaagagacagggcagagaattcatctggaacgacctgctgtccctggaaaccggcagcctgaagctggccaacggaagagtgatcgagaagacactgtacaacagaagaacccggcaggatgagcctgccctgttcgtggccctgaccttcgagcggcgggaggtcctggactcctccaatatcaaaccaatgaacctgatcggcgtggcaagaggcgaaaacatccccgccgtgatcgccctgaccgaccccgagggctgcccactgagccggtttaaggatagcctgggaaacccaacccacatcctgagaatcggcgagagctataaggagaagcagcggaccatccaggccaagaaggaggtggagcagcggagagccggcggctacagccggaagtacgccagcaaagccaagaatctggcagacgatatggtgagaaacaccgctagagatctgctgtactacgccgtgacccaggatgccatgctgatcttcgccaacctgagccggggcttcggccggcagggcaagcggaccttcatggccgagagacagtacacacggatggaggactggctgaccgccaagctggcctacgagggcctgagcaagacctacctgtccaagacactggcccagtacacctccaagacatgcagcaactgtgggtttaccatcaccagcgccgactacgacagggtgctggagaagctgaagaagacagcaacaggctggatgaccacaattaacggcaaggagctgaaggtggagggccagattacctactacaacagatacaagagacagaacgtagtcaaggacctgtccgtcgagctggatagactgagcgaagaatctgtgaacaacgacatctcctcctggacaaagggcagaagcggagaagctctgagcctcctgaagaaaagattctcccatagacccgtgcaggagaagttcgtgtgcctgaactgcggcttcgagacacacgcagccgagcaagccgccctgaacatcgccagatcctggctgttcctgcggagccaggagtacaagaaataccagacaaacaagacaaccggcaacaccgataagagagccttcgtcgagacctggcagtccttttaccggaagaagcttaaggaggtgtggaaacctgccgtgcggtctggcggatctggcggaggctccacaagcagccagggcctggtgaccttcggcgacgtggccgtggtgttcagccaggaggagtgggagtggctgagcagcgagcagaggagcctgtactggagggtgatgctggacaactacaggaacctggccagcctgggcctgtgcgccagcaagcccgacatgatcgccctgctggagcagggcaaggacccctgcgtgctgaagaggaagaccgccaggggcctgaggcccgacctggaggccgtgaccagccccaagaaaaagagaaaagtctaagctgccttctgcggggcttgccttctggccatgcccttcttctctcccttgcacctgtacctcttggtctttgaataaagcctgagtaggaaggctagcaaaaaaaaaaaaaaaaaaaaaaaaaaaaaaaaaaaaaaaaaaaaaaaaaaaaaaaaaaaaaaaaaaaaaaaaaaaaaaaa

SEQ ID NO: 6098 - RNA, 5797 nt, synthetic construct
  source 1..5797: mol_type = other RNA
aggaaataagagagaaaagaagagtaagaagaaatataagagccaccatggcccctaagaagaagcgtaaagtgagccggatggaacgcctcgtctacgaggtgcggcagaagtgcagaaacatcgaggacatctgcatctcctgcggatctctgaacgtgaccctggagcacccactgttcatcggcggcatgtgccagaactgtaaaaactgttttctggagtgtgcctatcaatacgacgatgacggctaccagagctactgcaccatctgttgcggcggaagagaggtgctgatgtgtggaaataacaactgctgccggtgcttctgcgtggaatgcgtggacctgctggtgggccccggcgccgcccaggccgctattaaggaagatccttggaactgctacatgtgcggccacaagggcacatacggcctgctgagacggagagaggactggcctagcagactgcagatgttcttcgccaataaccacgaccaggagttcgacccccctaaggtgtaccctcccgtccccgccgagaagagaaagcccatccgggtcctgagcctgttcgatggcatcgccaccggtctgctggtgctgaaggacctgggcatccaggtggataggtacattgcctccgaggtgtgcgaggactccatcaccgtgggaatggtgcgtcatcagggcaagatcatgtacgtgggcgacgtgcggagcgtgacacagaagcatatccaggagtggggccctttcgacctggtgatcggcggcagcccttgcaatgacctgagcatcgtgaacccagcccggaagggcctgtacgagggaaccggcagactgttcttcgagttttacagactgctgcacgacgcccggcctaaggaaggcgacgaccggcccttcttttggctgttcgagaatgtggtggccatgggagtcagcgacaagcgggatattagccggttcctggagagcaaccccgtgatgatcgatgccaaggaagtgagcgccgcccaccgggccagatacttctggggcaatctgcctggcatgaacagacccctggccagcaccgtgaacgacaagctggagctgcaggagtgcctggagcacggccggatcgccaagttcagcaaggtgagaaccatcaccacccgaagcaacagcatcaaacaaggcaaggaccagcactttcctgtgttcatgaacgagaaggaggacatcctgtggtgtaccgagatggagagagtgttcgggttcccagtccactacacagatgtcagcaacatgtctagactggccagacagagactgctgggaagaagctggtccgtccctgtgatcagacacctgttcgcccctctgaaggagtacttcgcctgcgtgagcagcggcaacagcaacgccaacagccggggccccagcttctctagcggcctggtgccactgtccctgagagggagccacatgggccccatggagatctacaaaaccgtgagcgcctggaagcggcagcctgtgcgcgtgctgagcctgtttcggaatatcgataaagtcctgaaaagcctgggattcctggagagcggctctggctccggcggtggcaccctgaagtacgtggaggatgtgacaaacgtggtcagacgggatgtggagaagtggggccccttcgatctggtgtacggcagcacccaacccctgggcagctcttgtgaccggtgccctggctggtacatgtttcagttccaccggatcctgcagtacgccctgccgagacaggagtcccagcggccattcttttggattttcatggacaacttgctgctgaccgaggatgaccaggaaactaccactcggttcctgcagaccgaagccgtgaccctgcaggacgtgagaggccgggactaccagaacgccatgcgggtgtggtccaacatccctggactgaaaagcaagcacgcacctctgacccctaaagaagaggagtacctgcaggcccaggtgcggagcagaagcaagctggacgcccctaaggtggatctgctggtgaagaattgcctcctgcccctgagagagtacttcaagtatttcagccagaatagtctgcccctgggcggcccaagcagcggcgcccctcctcccagcggcggcagcccagccggctccccaacctctaccgaggagggcacctctgagtccgccacccccgagagcggccctggcacctccaccgagcccagcgagggcagcgcacccggcagccctgccggcagccccacctccacagaggagggaaccagcaccgagcccagcgaaggcagcgccccaggcaccagcaccgagcctagtgagggcggctctggcggcggcagcgcccaggagattaaacggatcaacaagatcagaagaagacttgtgaaagacagcaacaccaagaaggccggcaagacaggccccatgaaaaccctgctggttagagtgatgacacccgatctgagagagcggctggaaaacctgagaaagaagcctgaaaatatcccccagcccatcagcaatacatctagagccaacctgaataagctgctgaccgattacaccgaaatgaagaaggcgatcctgcatgtgtactgggaagagttccagaaggaccctgtgggcctgatgagccgggtggcccagcctgccagcaagaagatcgatcagaacaagctgaaacctgagatggacgagaagggcaacctgaccaccgccggctttgcctgctctcagtgtggccagcccctgttcgtgtacaagctggagcaggtgtctgagaagggcaaggcttacaccaactacttcggacggtgcaatgtggccgagcacgaaaagctgatcctgctggcccagctgaagcccgagaaggatagcgacgaagccgtgacatatagcctgggaaagtttgggcagagggccctggatttctacagcattcatgtgaccaaggagtccacccaccccgtgaagcccctggcccagatcgccggaaacagatacgcctccggacctgtgggaaaggccctgagcgacgcatgtatgggcacaatcgcctccttcctgtctaagtaccaggacatcatcatcgaacaccagaaggtggtgaagggcaaccagaagagactggagagcctgcgggagctggccggcaaggaaaacctggaataccctagcgtgaccctgccacctcagcctcacaccaaggagggcgttgatgcctacaacgaagtgatcgcccgggtgcgaatgtgggtgaacctgaacctgtggcagaagctgaagctaagcagagatgatgccaagcctctgctgagactgaagggattcccttcctttcctctggtcgagagacaggccaacgaagtggactggtgggacatggtgtgtaacgtgaagaagctgatcaacgagaaaaaggaggatggcaaggtgttttggcagaatctggctggctacaagagacaggaagccctgagaccatacctgagcagcgaggaagatcggaagaagggaaagaaattcgctcggtaccagctgggcgacctgctgctgcacctggaaaagaagcacggcgaggactggggaaaggtgtacgacgaggcctgggagcggattgacaagaaagtggaaggcctgagcaagcacatcaagctggaagaggaacggagaagcgaggacgcccagagcaaggccgccctgaccgactggctgcgggctaaggccagcttcgtgatcgagggcctgaaggaggccgacaaggacgagttctgcagatgcgagctgaagctgcagaagtggtacggggacctgcggggaaagcccttcgccatcgaagccgagaacagcatcctggacatcagcggcttcagcaagcagtacaactgtgccttcatctggcagaaggacggcgtgaagaagctgaacctgtacctgatcatcaactacttcaagggcggcaagctgcggttcaagaagatcaaacctgaagccttcgaagccaacagattctacaccgtgatcaacaaaaagagcggcgagatcgtgcccatggaggtgaacttcaacttcgacgaccccaacctgatcatcctgcctctggcctttggcaagagacagggcagagaattcatctggaacgacctgctgtccctggaaaccggcagcctgaagctggccaacggaagagtgatcgagaagacactgtacaacagaagaacccggcaggatgagcctgccctgttcgtggccctgaccttcgagcggcgggaggtcctggactcctccaatatcaaaccaatgaacctgatcggcgtggcaagaggcgaaaacatccccgccgtgatcgccctgaccgaccccgagggctgcccactgagccggtttaaggatagcctgggaaacccaacccacatcctgagaatcggcgagagctataaggagaagcagcggaccatccaggccaagaaggaggtggagcagcggagagccggcggctacagccggaagtacgccagcaaagccaagaatctggcagacgatatggtgagaaacaccgctagagatctgctgtactacgccgtgacccaggatgccatgctgatcttcgccaacctgagccggggcttcggccggcagggcaagcggaccttcatggccgagagacagtacacacggatggaggactggctgaccgccaagctggcctacgagggcctgagcaagacctacctgtccaagacactggcccagtacacctccaagacatgcagcaactgtgggtttaccatcaccagcgccgactacgacagggtgctggagaagctgaagaagacagcaacaggctggatgaccacaattaacggcaaggagctgaaggtggagggccagattacctactacaacagatacaagagacagaacgtagtcaaggacctgtccgtcgagctggatagactgagcgaagaatctgtgaacaacgacatctcctcctggacaaagggcagaagcggagaagctctgagcctcctgaagaaaagattctcccatagacccgtgcaggagaagttcgtgtgcctgaactgcggcttcgagacacacgcagccgagcaagccgccctgaacatcgccagatcctggctgttcctgcggagccaggagtacaagaaataccagacaaacaagacaaccggcaacaccgataagagagccttcgtcgagacctggcagtccttttaccggaagaagcttaaggaggtgtggaaacctgccgtgcggtctggcggatctggcggaggctccacaagcatgctgcagaccgcctggaggcaggagcccgtgaccttcgaggacgtggccgtgtacttcacccagaacgagtgggccagcctggacagcgtgcagagggccctgtacagggaggtgatgctggagaactacgccaacgtggccagcctggccttccccttcaccacccccgtgctggtgagccagctggagcagggcgagctgccctggggcctggacccctgggagcccatgggcagggagaccagccccaagaaaaagagaaaagtctaagctgccttctgcggggcttgccttctggccatgcccttcttctctcccttgcacctgtacctcttggtctttgaataaagcctgagtaggaaggctagcaaaaaaaaaaaaaaaaaaaaaaaaaaaaaaaaaaaaaaaaaaaaaaaaaaaaaaaaaaaaaaaaaaaaaaaaaaaaaaaa

SEQ ID NO: 6099 - RNA, 5797 nt, synthetic construct
  source 1..5797: mol_type = other RNA
aggaaataagagagaaaagaagagtaagaagaaatataagagccaccatggcccctaagaagaagcgtaaagtgagccggatggaacgcctcgtctacgaggtgcggcagaagtgcagaaacatcgaggacatctgcatctcctgcggatctctgaacgtgaccctggagcacccactgttcatcggcggcatgtgccagaactgtaaaaactgttttctggagtgtgcctatcaatacgacgatgacggctaccagagctactgcaccatctgttgcggcggaagagaggtgctgatgtgtggaaataacaactgctgccggtgcttctgcgtggaatgcgtggacctgctggtgggccccggcgccgcccaggccgctattaaggaagatccttggaactgctacatgtgcggccacaagggcacatacggcctgctgagacggagagaggactggcctagcagactgcagatgttcttcgccaataaccacgaccaggagttcgacccccctaaggtgtaccctcccgtccccgccgagaagagaaagcccatccgggtcctgagcctgttcgatggcatcgccaccggtctgctggtgctgaaggacctgggcatccaggtggataggtacattgcctccgaggtgtgcgaggactccatcaccgtgggaatggtgcgtcatcagggcaagatcatgtacgtgggcgacgtgcggagcgtgacacagaagcatatccaggagtggggccctttcgacctggtgatcggcggcagcccttgcaatgacctgagcatcgtgaacccagcccggaagggcctgtacgagggaaccggcagactgttcttcgagttttacagactgctgcacgacgcccggcctaaggaaggcgacgaccggcccttcttttggctgttcgagaatgtggtggccatgggagtcagcgacaagcgggatattagccggttcctggagagcaaccccgtgatgatcgatgccaaggaagtgagcgccgcccaccgggccagatacttctggggcaatctgcctggcatgaacagacccctggccagcaccgtgaacgacaagctggagctgcaggagtgcctggagcacggccggatcgccaagttcagcaaggtgagaaccatcaccacccgaagcaacagcatcaaacaaggcaaggaccagcactttcctgtgttcatgaacgagaaggaggacatcctgtggtgtaccgagatggagagagtgttcgggttcccagtccactacacagatgtcagcaacatgtctagactggccagacagagactgctgggaagaagctggtccgtccctgtgatcagacacctgttcgcccctctgaaggagtacttcgcctgcgtgagcagcggcaacagcaacgccaacagccggggccccagcttctctagcggcctggtgccactgtccctgagagggagccacatgggccccatggagatctacaaaaccgtgagcgcctggaagcggcagcctgtgcgcgtgctgagcctgtttcggaatatcgataaagtcctgaaaagcctgggattcctggagagcggctctggctccggcggtggcaccctgaagtacgtggaggatgtgacaaacgtggtcagacgggatgtggagaagtggggccccttcgatctggtgtacggcagcacccaacccctgggcagctcttgtgaccggtgccctggctggtacatgtttcagttccaccggatcctgcagtacgccctgccgagacaggagtcccagcggccattcttttggattttcatggacaacttgctgctgaccgaggatgaccaggaaactaccactcggttcctgcagaccgaagccgtgaccctgcaggacgtgagaggccgggactaccagaacgccatgcgggtgtggtccaacatccctggactgaaaagcaagcacgcacctctgacccctaaagaagaggagtacctgcaggcccaggtgcggagcagaagcaagctggacgcccctaaggtggatctgctggtgaagaattgcctcctgcccctgagagagtacttcaagtatttcagccagaatagtctgcccctgggcggcccaagcagcggcgcccctcctcccagcggcggcagcccagccggctccccaacctctaccgaggagggcacctctgagtccgccacccccgagagcggccctggcacctccaccgagcccagcgagggcagcgcacccggcagccctgccggcagccccacctccacagaggagggaaccagcaccgagcccagcgaaggcagcgccccaggcaccagcaccgagcctagtgagggcggctctggcggcggcagcgcccaggagattaaacggatcaacaagatcagaagaagacttgtgaaagacagcaacaccaagaaggccggcaagacaggccccatgaaaaccctgctggttagagtgatgacacccgatctgagagagcggctggaaaacctgagaaagaagcctgaaaatatcccccagcccatcagcaatacatctagagccaacctgaataagctgctgaccgattacaccgaaatgaagaaggcgatcctgcatgtgtactgggaagagttccagaaggaccctgtgggcctgatgagccgggtggcccagcctgccagcaagaagatcgatcagaacaagctgaaacctgagatggacgagaagggcaacctgaccaccgccggctttgcctgctctcagtgtggccagcccctgttcgtgtacaagctggagcaggtgtctgagaagggcaaggcttacaccaactacttcggacggtgcaatgtggccgagcacgaaaagctgatcctgctggcccagctgaagcccgagaaggatagcgacgaagccgtgacatatagcctgggaaagtttgggcagagggccctggatttctacagcattcatgtgaccaaggagtccacccaccccgtgaagcccctggcccagatcgccggaaacagatacgcctccggacctgtgggaaaggccctgagcgacgcatgtatgggcacaatcgcctccttcctgtctaagtaccaggacatcatcatcgaacaccagaaggtggtgaagggcaaccagaagagactggagagcctgcgggagctggccggcaaggaaaacctggaataccctagcgtgaccctgccacctcagcctcacaccaaggagggcgttgatgcctacaacgaagtgatcgcccgggtgcgaatgtgggtgaacctgaacctgtggcagaagctgaagctaagcagagatgatgccaagcctctgctgagactgaagggattcccttcctttcctctggtcgagagacaggccaacgaagtggactggtgggacatggtgtgtaacgtgaagaagctgatcaacgagaaaaaggaggatggcaaggtgttttggcagaatctggctggctacaagagacaggaagccctgagaccatacctgagcagcgaggaagatcggaagaagggaaagaaattcgctcggtaccagctgggcgacctgctgctgcacctggaaaagaagcacggcgaggactggggaaaggtgtacgacgaggcctgggagcggattgacaagaaagtggaaggcctgagcaagcacatcaagctggaagaggaacggagaagcgaggacgcccagagcaaggccgccctgaccgactggctgcgggctaaggccagcttcgtgatcgagggcctgaaggaggccgacaaggacgagttctgcagatgcgagctgaagctgcagaagtggtacggggacctgcggggaaagcccttcgccatcgaagccgagaacagcatcctggacatcagcggcttcagcaagcagtacaactgtgccttcatctggcagaaggacggcgtgaagaagctgaacctgtacctgatcatcaactacttcaagggcggcaagctgcggttcaagaagatcaaacctgaagccttcgaagccaacagattctacaccgtgatcaacaaaaagagcggcgagatcgtgcccatggaggtgaacttcaacttcgacgaccccaacctgatcatcctgcctctggcctttggcaagagacagggcagagaattcatctggaacgacctgctgtccctggaaaccggcagcctgaagctggccaacggaagagtgatcgagaagacactgtacaacagaagaacccggcaggatgagcctgccctgttcgtggccctgaccttcgagcggcgggaggtcctggactcctccaatatcaaaccaatgaacctgatcggcgtggcaagaggcgaaaacatccccgccgtgatcgccctgaccgaccccgagggctgcccactgagccggtttaaggatagcctgggaaacccaacccacatcctgagaatcggcgagagctataaggagaagcagcggaccatccaggccaagaaggaggtggagcagcggagagccggcggctacagccggaagtacgccagcaaagccaagaatctggcagacgatatggtgagaaacaccgctagagatctgctgtactacgccgtgacccaggatgccatgctgatcttcgccaacctgagccggggcttcggccggcagggcaagcggaccttcatggccgagagacagtacacacggatggaggactggctgaccgccaagctggcctacgagggcctgagcaagacctacctgtccaagacactggcccagtacacctccaagacatgcagcaactgtgggtttaccatcaccagcgccgactacgacagggtgctggagaagctgaagaagacagcaacaggctggatgaccacaattaacggcaaggagctgaaggtggagggccagattacctactacaacagatacaagagacagaacgtagtcaaggacctgtccgtcgagctggatagactgagcgaagaatctgtgaacaacgacatctcctcctggacaaagggcagaagcggagaagctctgagcctcctgaagaaaagattctcccatagacccgtgcaggagaagttcgtgtgcctgaactgcggcttcgagacacacgcagccgagcaagccgccctgaacatcgccagatcctggctgttcctgcggagccaggagtacaagaaataccagacaaacaagacaaccggcaacaccgataagagagccttcgtcgagacctggcagtccttttaccggaagaagcttaaggaggtgtggaaacctgccgtgcggtctggcggatctggcggaggctccacaagcaggcccagggccgtgaagttcgccgacgtggccgtgtacttcagcaccgaggagtggggctgcctgaggcccgcccagagggccctgtacagggacgtgatgagggagacctacggccacctgggcgccctgggctgcgccggccccaagcccgccctgatcagctggctggagaggaacaccgacgactgggagcccgccgccctggacccccaggagtgccccaagagggtgaccgtgcagaccagccccaagaaaaagagaaaagtctaagctgccttctgcggggcttgccttctggccatgcccttcttctctcccttgcacctgtacctcttggtctttgaataaagcctgagtaggaaggctagcaaaaaaaaaaaaaaaaaaaaaaaaaaaaaaaaaaaaaaaaaaaaaaaaaaaaaaaaaaaaaaaaaaaaaaaaaaaaaaaa

SEQ ID NO: 6100 - RNA, 5797 nt, synthetic construct
  source 1..5797: mol_type = other RNA
aggaaataagagagaaaagaagagtaagaagaaatataagagccaccatggcccctaagaagaagcgtaaagtgagccggatggaacgcctcgtctacgaggtgcggcagaagtgcagaaacatcgaggacatctgcatctcctgcggatctctgaacgtgaccctggagcacccactgttcatcggcggcatgtgccagaactgtaaaaactgttttctggagtgtgcctatcaatacgacgatgacggctaccagagctactgcaccatctgttgcggcggaagagaggtgctgatgtgtggaaataacaactgctgccggtgcttctgcgtggaatgcgtggacctgctggtgggccccggcgccgcccaggccgctattaaggaagatccttggaactgctacatgtgcggccacaagggcacatacggcctgctgagacggagagaggactggcctagcagactgcagatgttcttcgccaataaccacgaccaggagttcgacccccctaaggtgtaccctcccgtccccgccgagaagagaaagcccatccgggtcctgagcctgttcgatggcatcgccaccggtctgctggtgctgaaggacctgggcatccaggtggataggtacattgcctccgaggtgtgcgaggactccatcaccgtgggaatggtgcgtcatcagggcaagatcatgtacgtgggcgacgtgcggagcgtgacacagaagcatatccaggagtggggccctttcgacctggtgatcggcggcagcccttgcaatgacctgagcatcgtgaacccagcccggaagggcctgtacgagggaaccggcagactgttcttcgagttttacagactgctgcacgacgcccggcctaaggaaggcgacgaccggcccttcttttggctgttcgagaatgtggtggccatgggagtcagcgacaagcgggatattagccggttcctggagagcaaccccgtgatgatcgatgccaaggaagtgagcgccgcccaccgggccagatacttctggggcaatctgcctggcatgaacagacccctggccagcaccgtgaacgacaagctggagctgcaggagtgcctggagcacggccggatcgccaagttcagcaaggtgagaaccatcaccacccgaagcaacagcatcaaacaaggcaaggaccagcactttcctgtgttcatgaacgagaaggaggacatcctgtggtgtaccgagatggagagagtgttcgggttcccagtccactacacagatgtcagcaacatgtctagactggccagacagagactgctgggaagaagctggtccgtccctgtgatcagacacctgttcgcccctctgaaggagtacttcgcctgcgtgagcagcggcaacagcaacgccaacagccggggccccagcttctctagcggcctggtgccactgtccctgagagggagccacatgggccccatggagatctacaaaaccgtgagcgcctggaagcggcagcctgtgcgcgtgctgagcctgtttcggaatatcgataaagtcctgaaaagcctgggattcctggagagcggctctggctccggcggtggcaccctgaagtacgtggaggatgtgacaaacgtggtcagacgggatgtggagaagtggggccccttcgatctggtgtacggcagcacccaacccctgggcagctcttgtgaccggtgccctggctggtacatgtttcagttccaccggatcctgcagtacgccctgccgagacaggagtcccagcggccattcttttggattttcatggacaacttgctgctgaccgaggatgaccaggaaactaccactcggttcctgcagaccgaagccgtgaccctgcaggacgtgagaggccgggactaccagaacgccatgcgggtgtggtccaacatccctggactgaaaagcaagcacgcacctctgacccctaaagaagaggagtacctgcaggcccaggtgcggagcagaagcaagctggacgcccctaaggtggatctgctggtgaagaattgcctcctgcccctgagagagtacttcaagtatttcagccagaatagtctgcccctgggcggcccaagcagcggcgcccctcctcccagcggcggcagcccagccggctccccaacctctaccgaggagggcacctctgagtccgccacccccgagagcggccctggcacctccaccgagcccagcgagggcagcgcacccggcagccctgccggcagccccacctccacagaggagggaaccagcaccgagcccagcgaaggcagcgccccaggcaccagcaccgagcctagtgagggcggctctggcggcggcagcgcccaggagattaaacggatcaacaagatcagaagaagacttgtgaaagacagcaacaccaagaaggccggcaagacaggccccatgaaaaccctgctggttagagtgatgacacccgatctgagagagcggctggaaaacctgagaaagaagcctgaaaatatcccccagcccatcagcaatacatctagagccaacctgaataagctgctgaccgattacaccgaaatgaagaaggcgatcctgcatgtgtactgggaagagttccagaaggaccctgtgggcctgatgagccgggtggcccagcctgccagcaagaagatcgatcagaacaagctgaaacctgagatggacgagaagggcaacctgaccaccgccggctttgcctgctctcagtgtggccagcccctgttcgtgtacaagctggagcaggtgtctgagaagggcaaggcttacaccaactacttcggacggtgcaatgtggccgagcacgaaaagctgatcctgctggcccagctgaagcccgagaaggatagcgacgaagccgtgacatatagcctgggaaagtttgggcagagggccctggatttctacagcattcatgtgaccaaggagtccacccaccccgtgaagcccctggcccagatcgccggaaacagatacgcctccggacctgtgggaaaggccctgagcgacgcatgtatgggcacaatcgcctccttcctgtctaagtaccaggacatcatcatcgaacaccagaaggtggtgaagggcaaccagaagagactggagagcctgcgggagctggccggcaaggaaaacctggaataccctagcgtgaccctgccacctcagcctcacaccaaggagggcgttgatgcctacaacgaagtgatcgcccgggtgcgaatgtgggtgaacctgaacctgtggcagaagctgaagctaagcagagatgatgccaagcctctgctgagactgaagggattcccttcctttcctctggtcgagagacaggccaacgaagtggactggtgggacatggtgtgtaacgtgaagaagctgatcaacgagaaaaaggaggatggcaaggtgttttggcagaatctggctggctacaagagacaggaagccctgagaccatacctgagcagcgaggaagatcggaagaagggaaagaaattcgctcggtaccagctgggcgacctgctgctgcacctggaaaagaagcacggcgaggactggggaaaggtgtacgacgaggcctgggagcggattgacaagaaagtggaaggcctgagcaagcacatcaagctggaagaggaacggagaagcgaggacgcccagagcaaggccgccctgaccgactggctgcgggctaaggccagcttcgtgatcgagggcctgaaggaggccgacaaggacgagttctgcagatgcgagctgaagctgcagaagtggtacggggacctgcggggaaagcccttcgccatcgaagccgagaacagcatcctggacatcagcggcttcagcaagcagtacaactgtgccttcatctggcagaaggacggcgtgaagaagctgaacctgtacctgatcatcaactacttcaagggcggcaagctgcggttcaagaagatcaaacctgaagccttcgaagccaacagattctacaccgtgatcaacaaaaagagcggcgagatcgtgcccatggaggtgaacttcaacttcgacgaccccaacctgatcatcctgcctctggcctttggcaagagacagggcagagaattcatctggaacgacctgctgtccctggaaaccggcagcctgaagctggccaacggaagagtgatcgagaagacactgtacaacagaagaacccggcaggatgagcctgccctgttcgtggccctgaccttcgagcggcgggaggtcctggactcctccaatatcaaaccaatgaacctgatcggcgtggcaagaggcgaaaacatccccgccgtgatcgccctgaccgaccccgagggctgcccactgagccggtttaaggatagcctgggaaacccaacccacatcctgagaatcggcgagagctataaggagaagcagcggaccatccaggccaagaaggaggtggagcagcggagagccggcggctacagccggaagtacgccagcaaagccaagaatctggcagacgatatggtgagaaacaccgctagagatctgctgtactacgccgtgacccaggatgccatgctgatcttcgccaacctgagccggggcttcggccggcagggcaagcggaccttcatggccgagagacagtacacacggatggaggactggctgaccgccaagctggcctacgagggcctgagcaagacctacctgtccaagacactggcccagtacacctccaagacatgcagcaactgtgggtttaccatcaccagcgccgactacgacagggtgctggagaagctgaagaagacagcaacaggctggatgaccacaattaacggcaaggagctgaaggtggagggccagattacctactacaacagatacaagagacagaacgtagtcaaggacctgtccgtcgagctggatagactgagcgaagaatctgtgaacaacgacatctcctcctggacaaagggcagaagcggagaagctctgagcctcctgaagaaaagattctcccatagacccgtgcaggagaagttcgtgtgcctgaactgcggcttcgagacacacgcagccgagcaagccgccctgaacatcgccagatcctggctgttcctgcggagccaggagtacaagaaataccagacaaacaagacaaccggcaacaccgataagagagccttcgtcgagacctggcagtccttttaccggaagaagcttaaggaggtgtggaaacctgccgtgcggtctggcggatctggcggaggctccacaagcttccaggaggccgtgaccttcaacgacgtggccgtggtgttcagcgaggaggagctgggcctgctggacagcacccagaggaagctgtacagggacgtgatgctggagaacttcaggaacctggtgagcctgggccacagcagcagcaagcccgacatgatcagccagctggagagggaggaggagaagctgtgcatgaaggagatcaggaccgagaggggcggcaggaaccccaacgaggccaccagccccaagaaaaagagaaaagtctaagctgccttctgcggggcttgccttctggccatgcccttcttctctcccttgcacctgtacctcttggtctttgaataaagcctgagtaggaaggctagcaaaaaaaaaaaaaaaaaaaaaaaaaaaaaaaaaaaaaaaaaaaaaaaaaaaaaaaaaaaaaaaaaaaaaaaaaaaaaaaa

SEQ ID NO: 6101 - RNA, 5797 nt, synthetic construct
  source 1..5797: mol_type = other RNA
aggaaataagagagaaaagaagagtaagaagaaatataagagccaccatggcccctaagaagaagcgtaaagtgagccggatggaacgcctcgtctacgaggtgcggcagaagtgcagaaacatcgaggacatctgcatctcctgcggatctctgaacgtgaccctggagcacccactgttcatcggcggcatgtgccagaactgtaaaaactgttttctggagtgtgcctatcaatacgacgatgacggctaccagagctactgcaccatctgttgcggcggaagagaggtgctgatgtgtggaaataacaactgctgccggtgcttctgcgtggaatgcgtggacctgctggtgggccccggcgccgcccaggccgctattaaggaagatccttggaactgctacatgtgcggccacaagggcacatacggcctgctgagacggagagaggactggcctagcagactgcagatgttcttcgccaataaccacgaccaggagttcgacccccctaaggtgtaccctcccgtccccgccgagaagagaaagcccatccgggtcctgagcctgttcgatggcatcgccaccggtctgctggtgctgaaggacctgggcatccaggtggataggtacattgcctccgaggtgtgcgaggactccatcaccgtgggaatggtgcgtcatcagggcaagatcatgtacgtgggcgacgtgcggagcgtgacacagaagcatatccaggagtggggccctttcgacctggtgatcggcggcagcccttgcaatgacctgagcatcgtgaacccagcccggaagggcctgtacgagggaaccggcagactgttcttcgagttttacagactgctgcacgacgcccggcctaaggaaggcgacgaccggcccttcttttggctgttcgagaatgtggtggccatgggagtcagcgacaagcgggatattagccggttcctggagagcaaccccgtgatgatcgatgccaaggaagtgagcgccgcccaccgggccagatacttctggggcaatctgcctggcatgaacagacccctggccagcaccgtgaacgacaagctggagctgcaggagtgcctggagcacggccggatcgccaagttcagcaaggtgagaaccatcaccacccgaagcaacagcatcaaacaaggcaaggaccagcactttcctgtgttcatgaacgagaaggaggacatcctgtggtgtaccgagatggagagagtgttcgggttcccagtccactacacagatgtcagcaacatgtctagactggccagacagagactgctgggaagaagctggtccgtccctgtgatcagacacctgttcgcccctctgaaggagtacttcgcctgcgtgagcagcggcaacagcaacgccaacagccggggccccagcttctctagcggcctggtgccactgtccctgagagggagccacatgggccccatggagatctacaaaaccgtgagcgcctggaagcggcagcctgtgcgcgtgctgagcctgtttcggaatatcgataaagtcctgaaaagcctgggattcctggagagcggctctggctccggcggtggcaccctgaagtacgtggaggatgtgacaaacgtggtcagacgggatgtggagaagtggggccccttcgatctggtgtacggcagcacccaacccctgggcagctcttgtgaccggtgccctggctggtacatgtttcagttccaccggatcctgcagtacgccctgccgagacaggagtcccagcggccattcttttggattttcatggacaacttgctgctgaccgaggatgaccaggaaactaccactcggttcctgcagaccgaagccgtgaccctgcaggacgtgagaggccgggactaccagaacgccatgcgggtgtggtccaacatccctggactgaaaagcaagcacgcacctctgacccctaaagaagaggagtacctgcaggcccaggtgcggagcagaagcaagctggacgcccctaaggtggatctgctggtgaagaattgcctcctgcccctgagagagtacttcaagtatttcagccagaatagtctgcccctgggcggcccaagcagcggcgcccctcctcccagcggcggcagcccagccggctccccaacctctaccgaggagggcacctctgagtccgccacccccgagagcggccctggcacctccaccgagcccagcgagggcagcgcacccggcagccctgccggcagccccacctccacagaggagggaaccagcaccgagcccagcgaaggcagcgccccaggcaccagcaccgagcctagtgagggcggctctggcggcggcagcgcccaggagattaaacggatcaacaagatcagaagaagacttgtgaaagacagcaacaccaagaaggccggcaagacaggccccatgaaaaccctgctggttagagtgatgacacccgatctgagagagcggctggaaaacctgagaaagaagcctgaaaatatcccccagcccatcagcaatacatctagagccaacctgaataagctgctgaccgattacaccgaaatgaagaaggcgatcctgcatgtgtactgggaagagttccagaaggaccctgtgggcctgatgagccgggtggcccagcctgccagcaagaagatcgatcagaacaagctgaaacctgagatggacgagaagggcaacctgaccaccgccggctttgcctgctctcagtgtggccagcccctgttcgtgtacaagctggagcaggtgtctgagaagggcaaggcttacaccaactacttcggacggtgcaatgtggccgagcacgaaaagctgatcctgctggcccagctgaagcccgagaaggatagcgacgaagccgtgacatatagcctgggaaagtttgggcagagggccctggatttctacagcattcatgtgaccaaggagtccacccaccccgtgaagcccctggcccagatcgccggaaacagatacgcctccggacctgtgggaaaggccctgagcgacgcatgtatgggcacaatcgcctccttcctgtctaagtaccaggacatcatcatcgaacaccagaaggtggtgaagggcaaccagaagagactggagagcctgcgggagctggccggcaaggaaaacctggaataccctagcgtgaccctgccacctcagcctcacaccaaggagggcgttgatgcctacaacgaagtgatcgcccgggtgcgaatgtgggtgaacctgaacctgtggcagaagctgaagctaagcagagatgatgccaagcctctgctgagactgaagggattcccttcctttcctctggtcgagagacaggccaacgaagtggactggtgggacatggtgtgtaacgtgaagaagctgatcaacgagaaaaaggaggatggcaaggtgttttggcagaatctggctggctacaagagacaggaagccctgagaccatacctgagcagcgaggaagatcggaagaagggaaagaaattcgctcggtaccagctgggcgacctgctgctgcacctggaaaagaagcacggcgaggactggggaaaggtgtacgacgaggcctgggagcggattgacaagaaagtggaaggcctgagcaagcacatcaagctggaagaggaacggagaagcgaggacgcccagagcaaggccgccctgaccgactggctgcgggctaaggccagcttcgtgatcgagggcctgaaggaggccgacaaggacgagttctgcagatgcgagctgaagctgcagaagtggtacggggacctgcggggaaagcccttcgccatcgaagccgagaacagcatcctggacatcagcggcttcagcaagcagtacaactgtgccttcatctggcagaaggacggcgtgaagaagctgaacctgtacctgatcatcaactacttcaagggcggcaagctgcggttcaagaagatcaaacctgaagccttcgaagccaacagattctacaccgtgatcaacaaaaagagcggcgagatcgtgcccatggaggtgaacttcaacttcgacgaccccaacctgatcatcctgcctctggcctttggcaagagacagggcagagaattcatctggaacgacctgctgtccctggaaaccggcagcctgaagctggccaacggaagagtgatcgagaagacactgtacaacagaagaacccggcaggatgagcctgccctgttcgtggccctgaccttcgagcggcgggaggtcctggactcctccaatatcaaaccaatgaacctgatcggcgtggcaagaggcgaaaacatccccgccgtgatcgccctgaccgaccccgagggctgcccactgagccggtttaaggatagcctgggaaacccaacccacatcctgagaatcggcgagagctataaggagaagcagcggaccatccaggccaagaaggaggtggagcagcggagagccggcggctacagccggaagtacgccagcaaagccaagaatctggcagacgatatggtgagaaacaccgctagagatctgctgtactacgccgtgacccaggatgccatgctgatcttcgccaacctgagccggggcttcggccggcagggcaagcggaccttcatggccgagagacagtacacacggatggaggactggctgaccgccaagctggcctacgagggcctgagcaagacctacctgtccaagacactggcccagtacacctccaagacatgcagcaactgtgggtttaccatcaccagcgccgactacgacagggtgctggagaagctgaagaagacagcaacaggctggatgaccacaattaacggcaaggagctgaaggtggagggccagattacctactacaacagatacaagagacagaacgtagtcaaggacctgtccgtcgagctggatagactgagcgaagaatctgtgaacaacgacatctcctcctggacaaagggcagaagcggagaagctctgagcctcctgaagaaaagattctcccatagacccgtgcaggagaagttcgtgtgcctgaactgcggcttcgagacacacgcagccgagcaagccgccctgaacatcgccagatcctggctgttcctgcggagccaggagtacaagaaataccagacaaacaagacaaccggcaacaccgataagagagccttcgtcgagacctggcagtccttttaccggaagaagcttaaggaggtgtggaaacctgccgtgcggtctggcggatctggcggaggctccacaagcgcccacggcagcgtgatgttcagcgacgtgagcgtggtgttcagccaggaggagtgggactacctggacgtggagcagagggacctgtacagggacgtgatgctggagaactacaacaacctggtgagcctgggctgcttcatcagcaagcccgacgtgatcagcctgctggagcagggcaaggagccctggaaggtggtgaggaaggagaggaggaggtaccccgacctggagaccaggcacaccagccccaagaaaaagagaaaagtctaagctgccttctgcggggcttgccttctggccatgcccttcttctctcccttgcacctgtacctcttggtctttgaataaagcctgagtaggaaggctagcaaaaaaaaaaaaaaaaaaaaaaaaaaaaaaaaaaaaaaaaaaaaaaaaaaaaaaaaaaaaaaaaaaaaaaaaaaaaaaaa

SEQ ID NO: 6102 - RNA, 5797 nt, synthetic construct
  source 1..5797: mol_type = other RNA
aggaaataagagagaaaagaagagtaagaagaaatataagagccaccatggcccctaagaagaagcgtaaagtgagccggatggaacgcctcgtctacgaggtgcggcagaagtgcagaaacatcgaggacatctgcatctcctgcggatctctgaacgtgaccctggagcacccactgttcatcggcggcatgtgccagaactgtaaaaactgttttctggagtgtgcctatcaatacgacgatgacggctaccagagctactgcaccatctgttgcggcggaagagaggtgctgatgtgtggaaataacaactgctgccggtgcttctgcgtggaatgcgtggacctgctggtgggccccggcgccgcccaggccgctattaaggaagatccttggaactgctacatgtgcggccacaagggcacatacggcctgctgagacggagagaggactggcctagcagactgcagatgttcttcgccaataaccacgaccaggagttcgacccccctaaggtgtaccctcccgtccccgccgagaagagaaagcccatccgggtcctgagcctgttcgatggcatcgccaccggtctgctggtgctgaaggacctgggcatccaggtggataggtacattgcctccgaggtgtgcgaggactccatcaccgtgggaatggtgcgtcatcagggcaagatcatgtacgtgggcgacgtgcggagcgtgacacagaagcatatccaggagtggggccctttcgacctggtgatcggcggcagcccttgcaatgacctgagcatcgtgaacccagcccggaagggcctgtacgagggaaccggcagactgttcttcgagttttacagactgctgcacgacgcccggcctaaggaaggcgacgaccggcccttcttttggctgttcgagaatgtggtggccatgggagtcagcgacaagcgggatattagccggttcctggagagcaaccccgtgatgatcgatgccaaggaagtgagcgccgcccaccgggccagatacttctggggcaatctgcctggcatgaacagacccctggccagcaccgtgaacgacaagctggagctgcaggagtgcctggagcacggccggatcgccaagttcagcaaggtgagaaccatcaccacccgaagcaacagcatcaaacaaggcaaggaccagcactttcctgtgttcatgaacgagaaggaggacatcctgtggtgtaccgagatggagagagtgttcgggttcccagtccactacacagatgtcagcaacatgtctagactggccagacagagactgctgggaagaagctggtccgtccctgtgatcagacacctgttcgcccctctgaaggagtacttcgcctgcgtgagcagcggcaacagcaacgccaacagccggggccccagcttctctagcggcctggtgccactgtccctgagagggagccacatgggccccatggagatctacaaaaccgtgagcgcctggaagcggcagcctgtgcgcgtgctgagcctgtttcggaatatcgataaagtcctgaaaagcctgggattcctggagagcggctctggctccggcggtggcaccctgaagtacgtggaggatgtgacaaacgtggtcagacgggatgtggagaagtggggccccttcgatctggtgtacggcagcacccaacccctgggcagctcttgtgaccggtgccctggctggtacatgtttcagttccaccggatcctgcagtacgccctgccgagacaggagtcccagcggccattcttttggattttcatggacaacttgctgctgaccgaggatgaccaggaaactaccactcggttcctgcagaccgaagccgtgaccctgcaggacgtgagaggccgggactaccagaacgccatgcgggtgtggtccaacatccctggactgaaaagcaagcacgcacctctgacccctaaagaagaggagtacctgcaggcccaggtgcggagcagaagcaagctggacgcccctaaggtggatctgctggtgaagaattgcctcctgcccctgagagagtacttcaagtatttcagccagaatagtctgcccctgggcggcccaagcagcggcgcccctcctcccagcggcggcagcccagccggctccccaacctctaccgaggagggcacctctgagtccgccacccccgagagcggccctggcacctccaccgagcccagcgagggcagcgcacccggcagccctgccggcagccccacctccacagaggagggaaccagcaccgagcccagcgaaggcagcgccccaggcaccagcaccgagcctagtgagggcggctctggcggcggcagcgcccaggagattaaacggatcaacaagatcagaagaagacttgtgaaagacagcaacaccaagaaggccggcaagacaggccccatgaaaaccctgctggttagagtgatgacacccgatctgagagagcggctggaaaacctgagaaagaagcctgaaaatatcccccagcccatcagcaatacatctagagccaacctgaataagctgctgaccgattacaccgaaatgaagaaggcgatcctgcatgtgtactgggaagagttccagaaggaccctgtgggcctgatgagccgggtggcccagcctgccagcaagaagatcgatcagaacaagctgaaacctgagatggacgagaagggcaacctgaccaccgccggctttgcctgctctcagtgtggccagcccctgttcgtgtacaagctggagcaggtgtctgagaagggcaaggcttacaccaactacttcggacggtgcaatgtggccgagcacgaaaagctgatcctgctggcccagctgaagcccgagaaggatagcgacgaagccgtgacatatagcctgggaaagtttgggcagagggccctggatttctacagcattcatgtgaccaaggagtccacccaccccgtgaagcccctggcccagatcgccggaaacagatacgcctccggacctgtgggaaaggccctgagcgacgcatgtatgggcacaatcgcctccttcctgtctaagtaccaggacatcatcatcgaacaccagaaggtggtgaagggcaaccagaagagactggagagcctgcgggagctggccggcaaggaaaacctggaataccctagcgtgaccctgccacctcagcctcacaccaaggagggcgttgatgcctacaacgaagtgatcgcccgggtgcgaatgtgggtgaacctgaacctgtggcagaagctgaagctaagcagagatgatgccaagcctctgctgagactgaagggattcccttcctttcctctggtcgagagacaggccaacgaagtggactggtgggacatggtgtgtaacgtgaagaagctgatcaacgagaaaaaggaggatggcaaggtgttttggcagaatctggctggctacaagagacaggaagccctgagaccatacctgagcagcgaggaagatcggaagaagggaaagaaattcgctcggtaccagctgggcgacctgctgctgcacctggaaaagaagcacggcgaggactggggaaaggtgtacgacgaggcctgggagcggattgacaagaaagtggaaggcctgagcaagcacatcaagctggaagaggaacggagaagcgaggacgcccagagcaaggccgccctgaccgactggctgcgggctaaggccagcttcgtgatcgagggcctgaaggaggccgacaaggacgagttctgcagatgcgagctgaagctgcagaagtggtacggggacctgcggggaaagcccttcgccatcgaagccgagaacagcatcctggacatcagcggcttcagcaagcagtacaactgtgccttcatctggcagaaggacggcgtgaagaagctgaacctgtacctgatcatcaactacttcaagggcggcaagctgcggttcaagaagatcaaacctgaagccttcgaagccaacagattctacaccgtgatcaacaaaaagagcggcgagatcgtgcccatggaggtgaacttcaacttcgacgaccccaacctgatcatcctgcctctggcctttggcaagagacagggcagagaattcatctggaacgacctgctgtccctggaaaccggcagcctgaagctggccaacggaagagtgatcgagaagacactgtacaacagaagaacccggcaggatgagcctgccctgttcgtggccctgaccttcgagcggcgggaggtcctggactcctccaatatcaaaccaatgaacctgatcggcgtggcaagaggcgaaaacatccccgccgtgatcgccctgaccgaccccgagggctgcccactgagccggtttaaggatagcctgggaaacccaacccacatcctgagaatcggcgagagctataaggagaagcagcggaccatccaggccaagaaggaggtggagcagcggagagccggcggctacagccggaagtacgccagcaaagccaagaatctggcagacgatatggtgagaaacaccgctagagatctgctgtactacgccgtgacccaggatgccatgctgatcttcgccaacctgagccggggcttcggccggcagggcaagcggaccttcatggccgagagacagtacacacggatggaggactggctgaccgccaagctggcctacgagggcctgagcaagacctacctgtccaagacactggcccagtacacctccaagacatgcagcaactgtgggtttaccatcaccagcgccgactacgacagggtgctggagaagctgaagaagacagcaacaggctggatgaccacaattaacggcaaggagctgaaggtggagggccagattacctactacaacagatacaagagacagaacgtagtcaaggacctgtccgtcgagctggatagactgagcgaagaatctgtgaacaacgacatctcctcctggacaaagggcagaagcggagaagctctgagcctcctgaagaaaagattctcccatagacccgtgcaggagaagttcgtgtgcctgaactgcggcttcgagacacacgcagccgagcaagccgccctgaacatcgccagatcctggctgttcctgcggagccaggagtacaagaaataccagacaaacaagacaaccggcaacaccgataagagagccttcgtcgagacctggcagtccttttaccggaagaagcttaaggaggtgtggaaacctgccgtgcggtctggcggatctggcggaggctccacaagcgtgcagggcagcgtgagcttcgaggacgtggccgtgggcttcagccaggaggagtggcagatcctgggccccagccagaaggccctgtactgggacgtgatgctggagaactactgcaacctggtgagcgtgggctaccaggcccccacccccaacagcctgttccagctggagcagggcggccccccctggaccgtggagggcgccgccctgagccccacctgcagcggcaagaagctgtacaccagccccaagaaaaagagaaaagtctaagctgccttctgcggggcttgccttctggccatgcccttcttctctcccttgcacctgtacctcttggtctttgaataaagcctgagtaggaaggctagcaaaaaaaaaaaaaaaaaaaaaaaaaaaaaaaaaaaaaaaaaaaaaaaaaaaaaaaaaaaaaaaaaaaaaaaaaaaaaaaa

SEQ ID NO: 6103 - RNA, 5797 nt, synthetic construct
  source 1..5797: mol_type = other RNA
aggaaataagagagaaaagaagagtaagaagaaatataagagccaccatggcccctaagaagaagcgtaaagtgagccggatggaacgcctcgtctacgaggtgcggcagaagtgcagaaacatcgaggacatctgcatctcctgcggatctctgaacgtgaccctggagcacccactgttcatcggcggcatgtgccagaactgtaaaaactgttttctggagtgtgcctatcaatacgacgatgacggctaccagagctactgcaccatctgttgcggcggaagagaggtgctgatgtgtggaaataacaactgctgccggtgcttctgcgtggaatgcgtggacctgctggtgggccccggcgccgcccaggccgctattaaggaagatccttggaactgctacatgtgcggccacaagggcacatacggcctgctgagacggagagaggactggcctagcagactgcagatgttcttcgccaataaccacgaccaggagttcgacccccctaaggtgtaccctcccgtccccgccgagaagagaaagcccatccgggtcctgagcctgttcgatggcatcgccaccggtctgctggtgctgaaggacctgggcatccaggtggataggtacattgcctccgaggtgtgcgaggactccatcaccgtgggaatggtgcgtcatcagggcaagatcatgtacgtgggcgacgtgcggagcgtgacacagaagcatatccaggagtggggccctttcgacctggtgatcggcggcagcccttgcaatgacctgagcatcgtgaacccagcccggaagggcctgtacgagggaaccggcagactgttcttcgagttttacagactgctgcacgacgcccggcctaaggaaggcgacgaccggcccttcttttggctgttcgagaatgtggtggccatgggagtcagcgacaagcgggatattagccggttcctggagagcaaccccgtgatgatcgatgccaaggaagtgagcgccgcccaccgggccagatacttctggggcaatctgcctggcatgaacagacccctggccagcaccgtgaacgacaagctggagctgcaggagtgcctggagcacggccggatcgccaagttcagcaaggtgagaaccatcaccacccgaagcaacagcatcaaacaaggcaaggaccagcactttcctgtgttcatgaacgagaaggaggacatcctgtggtgtaccgagatggagagagtgttcgggttcccagtccactacacagatgtcagcaacatgtctagactggccagacagagactgctgggaagaagctggtccgtccctgtgatcagacacctgttcgcccctctgaaggagtacttcgcctgcgtgagcagcggcaacagcaacgccaacagccggggccccagcttctctagcggcctggtgccactgtccctgagagggagccacatgggccccatggagatctacaaaaccgtgagcgcctggaagcggcagcctgtgcgcgtgctgagcctgtttcggaatatcgataaagtcctgaaaagcctgggattcctggagagcggctctggctccggcggtggcaccctgaagtacgtggaggatgtgacaaacgtggtcagacgggatgtggagaagtggggccccttcgatctggtgtacggcagcacccaacccctgggcagctcttgtgaccggtgccctggctggtacatgtttcagttccaccggatcctgcagtacgccctgccgagacaggagtcccagcggccattcttttggattttcatggacaacttgctgctgaccgaggatgaccaggaaactaccactcggttcctgcagaccgaagccgtgaccctgcaggacgtgagaggccgggactaccagaacgccatgcgggtgtggtccaacatccctggactgaaaagcaagcacgcacctctgacccctaaagaagaggagtacctgcaggcccaggtgcggagcagaagcaagctggacgcccctaaggtggatctgctggtgaagaattgcctcctgcccctgagagagtacttcaagtatttcagccagaatagtctgcccctgggcggcccaagcagcggcgcccctcctcccagcggcggcagcccagccggctccccaacctctaccgaggagggcacctctgagtccgccacccccgagagcggccctggcacctccaccgagcccagcgagggcagcgcacccggcagccctgccggcagccccacctccacagaggagggaaccagcaccgagcccagcgaaggcagcgccccaggcaccagcaccgagcctagtgagggcggctctggcggcggcagcgcccaggagattaaacggatcaacaagatcagaagaagacttgtgaaagacagcaacaccaagaaggccggcaagacaggccccatgaaaaccctgctggttagagtgatgacacccgatctgagagagcggctggaaaacctgagaaagaagcctgaaaatatcccccagcccatcagcaatacatctagagccaacctgaataagctgctgaccgattacaccgaaatgaagaaggcgatcctgcatgtgtactgggaagagttccagaaggaccctgtgggcctgatgagccgggtggcccagcctgccagcaagaagatcgatcagaacaagctgaaacctgagatggacgagaagggcaacctgaccaccgccggctttgcctgctctcagtgtggccagcccctgttcgtgtacaagctggagcaggtgtctgagaagggcaaggcttacaccaactacttcggacggtgcaatgtggccgagcacgaaaagctgatcctgctggcccagctgaagcccgagaaggatagcgacgaagccgtgacatatagcctgggaaagtttgggcagagggccctggatttctacagcattcatgtgaccaaggagtccacccaccccgtgaagcccctggcccagatcgccggaaacagatacgcctccggacctgtgggaaaggccctgagcgacgcatgtatgggcacaatcgcctccttcctgtctaagtaccaggacatcatcatcgaacaccagaaggtggtgaagggcaaccagaagagactggagagcctgcgggagctggccggcaaggaaaacctggaataccctagcgtgaccctgccacctcagcctcacaccaaggagggcgttgatgcctacaacgaagtgatcgcccgggtgcgaatgtgggtgaacctgaacctgtggcagaagctgaagctaagcagagatgatgccaagcctctgctgagactgaagggattcccttcctttcctctggtcgagagacaggccaacgaagtggactggtgggacatggtgtgtaacgtgaagaagctgatcaacgagaaaaaggaggatggcaaggtgttttggcagaatctggctggctacaagagacaggaagccctgagaccatacctgagcagcgaggaagatcggaagaagggaaagaaattcgctcggtaccagctgggcgacctgctgctgcacctggaaaagaagcacggcgaggactggggaaaggtgtacgacgaggcctgggagcggattgacaagaaagtggaaggcctgagcaagcacatcaagctggaagaggaacggagaagcgaggacgcccagagcaaggccgccctgaccgactggctgcgggctaaggccagcttcgtgatcgagggcctgaaggaggccgacaaggacgagttctgcagatgcgagctgaagctgcagaagtggtacggggacctgcggggaaagcccttcgccatcgaagccgagaacagcatcctggacatcagcggcttcagcaagcagtacaactgtgccttcatctggcagaaggacggcgtgaagaagctgaacctgtacctgatcatcaactacttcaagggcggcaagctgcggttcaagaagatcaaacctgaagccttcgaagccaacagattctacaccgtgatcaacaaaaagagcggcgagatcgtgcccatggaggtgaacttcaacttcgacgaccccaacctgatcatcctgcctctggcctttggcaagagacagggcagagaattcatctggaacgacctgctgtccctggaaaccggcagcctgaagctggccaacggaagagtgatcgagaagacactgtacaacagaagaacccggcaggatgagcctgccctgttcgtggccctgaccttcgagcggcgggaggtcctggactcctccaatatcaaaccaatgaacctgatcggcgtggcaagaggcgaaaacatccccgccgtgatcgccctgaccgaccccgagggctgcccactgagccggtttaaggatagcctgggaaacccaacccacatcctgagaatcggcgagagctataaggagaagcagcggaccatccaggccaagaaggaggtggagcagcggagagccggcggctacagccggaagtacgccagcaaagccaagaatctggcagacgatatggtgagaaacaccgctagagatctgctgtactacgccgtgacccaggatgccatgctgatcttcgccaacctgagccggggcttcggccggcagggcaagcggaccttcatggccgagagacagtacacacggatggaggactggctgaccgccaagctggcctacgagggcctgagcaagacctacctgtccaagacactggcccagtacacctccaagacatgcagcaactgtgggtttaccatcaccagcgccgactacgacagggtgctggagaagctgaagaagacagcaacaggctggatgaccacaattaacggcaaggagctgaaggtggagggccagattacctactacaacagatacaagagacagaacgtagtcaaggacctgtccgtcgagctggatagactgagcgaagaatctgtgaacaacgacatctcctcctggacaaagggcagaagcggagaagctctgagcctcctgaagaaaagattctcccatagacccgtgcaggagaagttcgtgtgcctgaactgcggcttcgagacacacgcagccgagcaagccgccctgaacatcgccagatcctggctgttcctgcggagccaggagtacaagaaataccagacaaacaagacaaccggcaacaccgataagagagccttcgtcgagacctggcagtccttttaccggaagaagcttaaggaggtgtggaaacctgccgtgcggtctggcggatctggcggaggctccacaagcctggtgcccgtgaccttcgaggacgtggccgtgtacttcagcagggaggagtggggcctgctggacgacatgcagaggaccttctacagggacgtgatgaaggagaactaccagaccgtggtgagcctgcccggcagcagcatccccaagcccgacgtgatcagccagatggagaggggcgaggagccctgggtgcccgacctgcagaagctgggcccccaccagacccccgagaaccccctgaccagccccaagaaaaagagaaaagtctaagctgccttctgcggggcttgccttctggccatgcccttcttctctcccttgcacctgtacctcttggtctttgaataaagcctgagtaggaaggctagcaaaaaaaaaaaaaaaaaaaaaaaaaaaaaaaaaaaaaaaaaaaaaaaaaaaaaaaaaaaaaaaaaaaaaaaaaaaaaaaa

SEQ ID NO: 6104 - RNA, 5797 nt, synthetic construct
  source 1..5797: mol_type = other RNA
aggaaataagagagaaaagaagagtaagaagaaatataagagccaccatggcccctaagaagaagcgtaaagtgagccggatggaacgcctcgtctacgaggtgcggcagaagtgcagaaacatcgaggacatctgcatctcctgcggatctctgaacgtgaccctggagcacccactgttcatcggcggcatgtgccagaactgtaaaaactgttttctggagtgtgcctatcaatacgacgatgacggctaccagagctactgcaccatctgttgcggcggaagagaggtgctgatgtgtggaaataacaactgctgccggtgcttctgcgtggaatgcgtggacctgctggtgggccccggcgccgcccaggccgctattaaggaagatccttggaactgctacatgtgcggccacaagggcacatacggcctgctgagacggagagaggactggcctagcagactgcagatgttcttcgccaataaccacgaccaggagttcgacccccctaaggtgtaccctcccgtccccgccgagaagagaaagcccatccgggtcctgagcctgttcgatggcatcgccaccggtctgctggtgctgaaggacctgggcatccaggtggataggtacattgcctccgaggtgtgcgaggactccatcaccgtgggaatggtgcgtcatcagggcaagatcatgtacgtgggcgacgtgcggagcgtgacacagaagcatatccaggagtggggccctttcgacctggtgatcggcggcagcccttgcaatgacctgagcatcgtgaacccagcccggaagggcctgtacgagggaaccggcagactgttcttcgagttttacagactgctgcacgacgcccggcctaaggaaggcgacgaccggcccttcttttggctgttcgagaatgtggtggccatgggagtcagcgacaagcgggatattagccggttcctggagagcaaccccgtgatgatcgatgccaaggaagtgagcgccgcccaccgggccagatacttctggggcaatctgcctggcatgaacagacccctggccagcaccgtgaacgacaagctggagctgcaggagtgcctggagcacggccggatcgccaagttcagcaaggtgagaaccatcaccacccgaagcaacagcatcaaacaaggcaaggaccagcactttcctgtgttcatgaacgagaaggaggacatcctgtggtgtaccgagatggagagagtgttcgggttcccagtccactacacagatgtcagcaacatgtctagactggccagacagagactgctgggaagaagctggtccgtccctgtgatcagacacctgttcgcccctctgaaggagtacttcgcctgcgtgagcagcggcaacagcaacgccaacagccggggccccagcttctctagcggcctggtgccactgtccctgagagggagccacatgggccccatggagatctacaaaaccgtgagcgcctggaagcggcagcctgtgcgcgtgctgagcctgtttcggaatatcgataaagtcctgaaaagcctgggattcctggagagcggctctggctccggcggtggcaccctgaagtacgtggaggatgtgacaaacgtggtcagacgggatgtggagaagtggggccccttcgatctggtgtacggcagcacccaacccctgggcagctcttgtgaccggtgccctggctggtacatgtttcagttccaccggatcctgcagtacgccctgccgagacaggagtcccagcggccattcttttggattttcatggacaacttgctgctgaccgaggatgaccaggaaactaccactcggttcctgcagaccgaagccgtgaccctgcaggacgtgagaggccgggactaccagaacgccatgcgggtgtggtccaacatccctggactgaaaagcaagcacgcacctctgacccctaaagaagaggagtacctgcaggcccaggtgcggagcagaagcaagctggacgcccctaaggtggatctgctggtgaagaattgcctcctgcccctgagagagtacttcaagtatttcagccagaatagtctgcccctgggcggcccaagcagcggcgcccctcctcccagcggcggcagcccagccggctccccaacctctaccgaggagggcacctctgagtccgccacccccgagagcggccctggcacctccaccgagcccagcgagggcagcgcacccggcagccctgccggcagccccacctccacagaggagggaaccagcaccgagcccagcgaaggcagcgccccaggcaccagcaccgagcctagtgagggcggctctggcggcggcagcgcccaggagattaaacggatcaacaagatcagaagaagacttgtgaaagacagcaacaccaagaaggccggcaagacaggccccatgaaaaccctgctggttagagtgatgacacccgatctgagagagcggctggaaaacctgagaaagaagcctgaaaatatcccccagcccatcagcaatacatctagagccaacctgaataagctgctgaccgattacaccgaaatgaagaaggcgatcctgcatgtgtactgggaagagttccagaaggaccctgtgggcctgatgagccgggtggcccagcctgccagcaagaagatcgatcagaacaagctgaaacctgagatggacgagaagggcaacctgaccaccgccggctttgcctgctctcagtgtggccagcccctgttcgtgtacaagctggagcaggtgtctgagaagggcaaggcttacaccaactacttcggacggtgcaatgtggccgagcacgaaaagctgatcctgctggcccagctgaagcccgagaaggatagcgacgaagccgtgacatatagcctgggaaagtttgggcagagggccctggatttctacagcattcatgtgaccaaggagtccacccaccccgtgaagcccctggcccagatcgccggaaacagatacgcctccggacctgtgggaaaggccctgagcgacgcatgtatgggcacaatcgcctccttcctgtctaagtaccaggacatcatcatcgaacaccagaaggtggtgaagggcaaccagaagagactggagagcctgcgggagctggccggcaaggaaaacctggaataccctagcgtgaccctgccacctcagcctcacaccaaggagggcgttgatgcctacaacgaagtgatcgcccgggtgcgaatgtgggtgaacctgaacctgtggcagaagctgaagctaagcagagatgatgccaagcctctgctgagactgaagggattcccttcctttcctctggtcgagagacaggccaacgaagtggactggtgggacatggtgtgtaacgtgaagaagctgatcaacgagaaaaaggaggatggcaaggtgttttggcagaatctggctggctacaagagacaggaagccctgagaccatacctgagcagcgaggaagatcggaagaagggaaagaaattcgctcggtaccagctgggcgacctgctgctgcacctggaaaagaagcacggcgaggactggggaaaggtgtacgacgaggcctgggagcggattgacaagaaagtggaaggcctgagcaagcacatcaagctggaagaggaacggagaagcgaggacgcccagagcaaggccgccctgaccgactggctgcgggctaaggccagcttcgtgatcgagggcctgaaggaggccgacaaggacgagttctgcagatgcgagctgaagctgcagaagtggtacggggacctgcggggaaagcccttcgccatcgaagccgagaacagcatcctggacatcagcggcttcagcaagcagtacaactgtgccttcatctggcagaaggacggcgtgaagaagctgaacctgtacctgatcatcaactacttcaagggcggcaagctgcggttcaagaagatcaaacctgaagccttcgaagccaacagattctacaccgtgatcaacaaaaagagcggcgagatcgtgcccatggaggtgaacttcaacttcgacgaccccaacctgatcatcctgcctctggcctttggcaagagacagggcagagaattcatctggaacgacctgctgtccctggaaaccggcagcctgaagctggccaacggaagagtgatcgagaagacactgtacaacagaagaacccggcaggatgagcctgccctgttcgtggccctgaccttcgagcggcgggaggtcctggactcctccaatatcaaaccaatgaacctgatcggcgtggcaagaggcgaaaacatccccgccgtgatcgccctgaccgaccccgagggctgcccactgagccggtttaaggatagcctgggaaacccaacccacatcctgagaatcggcgagagctataaggagaagcagcggaccatccaggccaagaaggaggtggagcagcggagagccggcggctacagccggaagtacgccagcaaagccaagaatctggcagacgatatggtgagaaacaccgctagagatctgctgtactacgccgtgacccaggatgccatgctgatcttcgccaacctgagccggggcttcggccggcagggcaagcggaccttcatggccgagagacagtacacacggatggaggactggctgaccgccaagctggcctacgagggcctgagcaagacctacctgtccaagacactggcccagtacacctccaagacatgcagcaactgtgggtttaccatcaccagcgccgactacgacagggtgctggagaagctgaagaagacagcaacaggctggatgaccacaattaacggcaaggagctgaaggtggagggccagattacctactacaacagatacaagagacagaacgtagtcaaggacctgtccgtcgagctggatagactgagcgaagaatctgtgaacaacgacatctcctcctggacaaagggcagaagcggagaagctctgagcctcctgaagaaaagattctcccatagacccgtgcaggagaagttcgtgtgcctgaactgcggcttcgagacacacgcagccgagcaagccgccctgaacatcgccagatcctggctgttcctgcggagccaggagtacaagaaataccagacaaacaagacaaccggcaacaccgataagagagccttcgtcgagacctggcagtccttttaccggaagaagcttaaggaggtgtggaaacctgccgtgcggtctggcggatctggcggaggctccacaagcatggtgaccttcgaggacgtggccgtgcacttcaccaagaccgagtggaccggcctgagccccgcccagagggccctgtacaggagcgtgatgctggagaacttcggcaacctgaccgccctgggctaccccgtgcccaagcccgccctgatcagcctgctggagggcggcgacatggcctggggcctggaggcccaggacgaccccctggccgagaccaccaagaacgtgtgcaaggacgtgaccagccccaagaaaaagagaaaagtctaagctgccttctgcggggcttgccttctggccatgcccttcttctctcccttgcacctgtacctcttggtctttgaataaagcctgagtaggaaggctagcaaaaaaaaaaaaaaaaaaaaaaaaaaaaaaaaaaaaaaaaaaaaaaaaaaaaaaaaaaaaaaaaaaaaaaaaaaaaaaaa

SEQ ID NO: 6105 - RNA, 5797 nt, synthetic construct
  source 1..5797: mol_type = other RNA
aggaaataagagagaaaagaagagtaagaagaaatataagagccaccatggcccctaagaagaagcgtaaagtgagccggatggaacgcctcgtctacgaggtgcggcagaagtgcagaaacatcgaggacatctgcatctcctgcggatctctgaacgtgaccctggagcacccactgttcatcggcggcatgtgccagaactgtaaaaactgttttctggagtgtgcctatcaatacgacgatgacggctaccagagctactgcaccatctgttgcggcggaagagaggtgctgatgtgtggaaataacaactgctgccggtgcttctgcgtggaatgcgtggacctgctggtgggccccggcgccgcccaggccgctattaaggaagatccttggaactgctacatgtgcggccacaagggcacatacggcctgctgagacggagagaggactggcctagcagactgcagatgttcttcgccaataaccacgaccaggagttcgacccccctaaggtgtaccctcccgtccccgccgagaagagaaagcccatccgggtcctgagcctgttcgatggcatcgccaccggtctgctggtgctgaaggacctgggcatccaggtggataggtacattgcctccgaggtgtgcgaggactccatcaccgtgggaatggtgcgtcatcagggcaagatcatgtacgtgggcgacgtgcggagcgtgacacagaagcatatccaggagtggggccctttcgacctggtgatcggcggcagcccttgcaatgacctgagcatcgtgaacccagcccggaagggcctgtacgagggaaccggcagactgttcttcgagttttacagactgctgcacgacgcccggcctaaggaaggcgacgaccggcccttcttttggctgttcgagaatgtggtggccatgggagtcagcgacaagcgggatattagccggttcctggagagcaaccccgtgatgatcgatgccaaggaagtgagcgccgcccaccgggccagatacttctggggcaatctgcctggcatgaacagacccctggccagcaccgtgaacgacaagctggagctgcaggagtgcctggagcacggccggatcgccaagttcagcaaggtgagaaccatcaccacccgaagcaacagcatcaaacaaggcaaggaccagcactttcctgtgttcatgaacgagaaggaggacatcctgtggtgtaccgagatggagagagtgttcgggttcccagtccactacacagatgtcagcaacatgtctagactggccagacagagactgctgggaagaagctggtccgtccctgtgatcagacacctgttcgcccctctgaaggagtacttcgcctgcgtgagcagcggcaacagcaacgccaacagccggggccccagcttctctagcggcctggtgccactgtccctgagagggagccacatgggccccatggagatctacaaaaccgtgagcgcctggaagcggcagcctgtgcgcgtgctgagcctgtttcggaatatcgataaagtcctgaaaagcctgggattcctggagagcggctctggctccggcggtggcaccctgaagtacgtggaggatgtgacaaacgtggtcagacgggatgtggagaagtggggccccttcgatctggtgtacggcagcacccaacccctgggcagctcttgtgaccggtgccctggctggtacatgtttcagttccaccggatcctgcagtacgccctgccgagacaggagtcccagcggccattcttttggattttcatggacaacttgctgctgaccgaggatgaccaggaaactaccactcggttcctgcagaccgaagccgtgaccctgcaggacgtgagaggccgggactaccagaacgccatgcgggtgtggtccaacatccctggactgaaaagcaagcacgcacctctgacccctaaagaagaggagtacctgcaggcccaggtgcggagcagaagcaagctggacgcccctaaggtggatctgctggtgaagaattgcctcctgcccctgagagagtacttcaagtatttcagccagaatagtctgcccctgggcggcccaagcagcggcgcccctcctcccagcggcggcagcccagccggctccccaacctctaccgaggagggcacctctgagtccgccacccccgagagcggccctggcacctccaccgagcccagcgagggcagcgcacccggcagccctgccggcagccccacctccacagaggagggaaccagcaccgagcccagcgaaggcagcgccccaggcaccagcaccgagcctagtgagggcggctctggcggcggcagcgcccaggagattaaacggatcaacaagatcagaagaagacttgtgaaagacagcaacaccaagaaggccggcaagacaggccccatgaaaaccctgctggttagagtgatgacacccgatctgagagagcggctggaaaacctgagaaagaagcctgaaaatatcccccagcccatcagcaatacatctagagccaacctgaataagctgctgaccgattacaccgaaatgaagaaggcgatcctgcatgtgtactgggaagagttccagaaggaccctgtgggcctgatgagccgggtggcccagcctgccagcaagaagatcgatcagaacaagctgaaacctgagatggacgagaagggcaacctgaccaccgccggctttgcctgctctcagtgtggccagcccctgttcgtgtacaagctggagcaggtgtctgagaagggcaaggcttacaccaactacttcggacggtgcaatgtggccgagcacgaaaagctgatcctgctggcccagctgaagcccgagaaggatagcgacgaagccgtgacatatagcctgggaaagtttgggcagagggccctggatttctacagcattcatgtgaccaaggagtccacccaccccgtgaagcccctggcccagatcgccggaaacagatacgcctccggacctgtgggaaaggccctgagcgacgcatgtatgggcacaatcgcctccttcctgtctaagtaccaggacatcatcatcgaacaccagaaggtggtgaagggcaaccagaagagactggagagcctgcgggagctggccggcaaggaaaacctggaataccctagcgtgaccctgccacctcagcctcacaccaaggagggcgttgatgcctacaacgaagtgatcgcccgggtgcgaatgtgggtgaacctgaacctgtggcagaagctgaagctaagcagagatgatgccaagcctctgctgagactgaagggattcccttcctttcctctggtcgagagacaggccaacgaagtggactggtgggacatggtgtgtaacgtgaagaagctgatcaacgagaaaaaggaggatggcaaggtgttttggcagaatctggctggctacaagagacaggaagccctgagaccatacctgagcagcgaggaagatcggaagaagggaaagaaattcgctcggtaccagctgggcgacctgctgctgcacctggaaaagaagcacggcgaggactggggaaaggtgtacgacgaggcctgggagcggattgacaagaaagtggaaggcctgagcaagcacatcaagctggaagaggaacggagaagcgaggacgcccagagcaaggccgccctgaccgactggctgcgggctaaggccagcttcgtgatcgagggcctgaaggaggccgacaaggacgagttctgcagatgcgagctgaagctgcagaagtggtacggggacctgcggggaaagcccttcgccatcgaagccgagaacagcatcctggacatcagcggcttcagcaagcagtacaactgtgccttcatctggcagaaggacggcgtgaagaagctgaacctgtacctgatcatcaactacttcaagggcggcaagctgcggttcaagaagatcaaacctgaagccttcgaagccaacagattctacaccgtgatcaacaaaaagagcggcgagatcgtgcccatggaggtgaacttcaacttcgacgaccccaacctgatcatcctgcctctggcctttggcaagagacagggcagagaattcatctggaacgacctgctgtccctggaaaccggcagcctgaagctggccaacggaagagtgatcgagaagacactgtacaacagaagaacccggcaggatgagcctgccctgttcgtggccctgaccttcgagcggcgggaggtcctggactcctccaatatcaaaccaatgaacctgatcggcgtggcaagaggcgaaaacatccccgccgtgatcgccctgaccgaccccgagggctgcccactgagccggtttaaggatagcctgggaaacccaacccacatcctgagaatcggcgagagctataaggagaagcagcggaccatccaggccaagaaggaggtggagcagcggagagccggcggctacagccggaagtacgccagcaaagccaagaatctggcagacgatatggtgagaaacaccgctagagatctgctgtactacgccgtgacccaggatgccatgctgatcttcgccaacctgagccggggcttcggccggcagggcaagcggaccttcatggccgagagacagtacacacggatggaggactggctgaccgccaagctggcctacgagggcctgagcaagacctacctgtccaagacactggcccagtacacctccaagacatgcagcaactgtgggtttaccatcaccagcgccgactacgacagggtgctggagaagctgaagaagacagcaacaggctggatgaccacaattaacggcaaggagctgaaggtggagggccagattacctactacaacagatacaagagacagaacgtagtcaaggacctgtccgtcgagctggatagactgagcgaagaatctgtgaacaacgacatctcctcctggacaaagggcagaagcggagaagctctgagcctcctgaagaaaagattctcccatagacccgtgcaggagaagttcgtgtgcctgaactgcggcttcgagacacacgcagccgagcaagccgccctgaacatcgccagatcctggctgttcctgcggagccaggagtacaagaaataccagacaaacaagacaaccggcaacaccgataagagagccttcgtcgagacctggcagtccttttaccggaagaagcttaaggaggtgtggaaacctgccgtgcggtctggcggatctggcggaggctccacaagcaacagccagggcctgctgaccttcagggacgtggccatcgagttcagccaggaggagctgaggtgcctgaaccacagccagtgggagctgtacagggacgtgatgttcgagaactacggccacctgctgttcctgggcctggtggtgagcaagcccgacctggtgatcttcctggagcagaagaaggacgtgtgggccgtgaagaggaaggagaccgtggccacccaccccggcaggtgggagaccagccccaagaaaaagagaaaagtctaagctgccttctgcggggcttgccttctggccatgcccttcttctctcccttgcacctgtacctcttggtctttgaataaagcctgagtaggaaggctagcaaaaaaaaaaaaaaaaaaaaaaaaaaaaaaaaaaaaaaaaaaaaaaaaaaaaaaaaaaaaaaaaaaaaaaaaaaaaaaaa

SEQ ID NO: 6106 - RNA, 5797 nt, synthetic construct
  source 1..5797: mol_type = other RNA
aggaaataagagagaaaagaagagtaagaagaaatataagagccaccatggcccctaagaagaagcgtaaagtgagccggatggaacgcctcgtctacgaggtgcggcagaagtgcagaaacatcgaggacatctgcatctcctgcggatctctgaacgtgaccctggagcacccactgttcatcggcggcatgtgccagaactgtaaaaactgttttctggagtgtgcctatcaatacgacgatgacggctaccagagctactgcaccatctgttgcggcggaagagaggtgctgatgtgtggaaataacaactgctgccggtgcttctgcgtggaatgcgtggacctgctggtgggccccggcgccgcccaggccgctattaaggaagatccttggaactgctacatgtgcggccacaagggcacatacggcctgctgagacggagagaggactggcctagcagactgcagatgttcttcgccaataaccacgaccaggagttcgacccccctaaggtgtaccctcccgtccccgccgagaagagaaagcccatccgggtcctgagcctgttcgatggcatcgccaccggtctgctggtgctgaaggacctgggcatccaggtggataggtacattgcctccgaggtgtgcgaggactccatcaccgtgggaatggtgcgtcatcagggcaagatcatgtacgtgggcgacgtgcggagcgtgacacagaagcatatccaggagtggggccctttcgacctggtgatcggcggcagcccttgcaatgacctgagcatcgtgaacccagcccggaagggcctgtacgagggaaccggcagactgttcttcgagttttacagactgctgcacgacgcccggcctaaggaaggcgacgaccggcccttcttttggctgttcgagaatgtggtggccatgggagtcagcgacaagcgggatattagccggttcctggagagcaaccccgtgatgatcgatgccaaggaagtgagcgccgcccaccgggccagatacttctggggcaatctgcctggcatgaacagacccctggccagcaccgtgaacgacaagctggagctgcaggagtgcctggagcacggccggatcgccaagttcagcaaggtgagaaccatcaccacccgaagcaacagcatcaaacaaggcaaggaccagcactttcctgtgttcatgaacgagaaggaggacatcctgtggtgtaccgagatggagagagtgttcgggttcccagtccactacacagatgtcagcaacatgtctagactggccagacagagactgctgggaagaagctggtccgtccctgtgatcagacacctgttcgcccctctgaaggagtacttcgcctgcgtgagcagcggcaacagcaacgccaacagccggggccccagcttctctagcggcctggtgccactgtccctgagagggagccacatgggccccatggagatctacaaaaccgtgagcgcctggaagcggcagcctgtgcgcgtgctgagcctgtttcggaatatcgataaagtcctgaaaagcctgggattcctggagagcggctctggctccggcggtggcaccctgaagtacgtggaggatgtgacaaacgtggtcagacgggatgtggagaagtggggccccttcgatctggtgtacggcagcacccaacccctgggcagctcttgtgaccggtgccctggctggtacatgtttcagttccaccggatcctgcagtacgccctgccgagacaggagtcccagcggccattcttttggattttcatggacaacttgctgctgaccgaggatgaccaggaaactaccactcggttcctgcagaccgaagccgtgaccctgcaggacgtgagaggccgggactaccagaacgccatgcgggtgtggtccaacatccctggactgaaaagcaagcacgcacctctgacccctaaagaagaggagtacctgcaggcccaggtgcggagcagaagcaagctggacgcccctaaggtggatctgctggtgaagaattgcctcctgcccctgagagagtacttcaagtatttcagccagaatagtctgcccctgggcggcccaagcagcggcgcccctcctcccagcggcggcagcccagccggctccccaacctctaccgaggagggcacctctgagtccgccacccccgagagcggccctggcacctccaccgagcccagcgagggcagcgcacccggcagccctgccggcagccccacctccacagaggagggaaccagcaccgagcccagcgaaggcagcgccccaggcaccagcaccgagcctagtgagggcggctctggcggcggcagcgcccaggagattaaacggatcaacaagatcagaagaagacttgtgaaagacagcaacaccaagaaggccggcaagacaggccccatgaaaaccctgctggttagagtgatgacacccgatctgagagagcggctggaaaacctgagaaagaagcctgaaaatatcccccagcccatcagcaatacatctagagccaacctgaataagctgctgaccgattacaccgaaatgaagaaggcgatcctgcatgtgtactgggaagagttccagaaggaccctgtgggcctgatgagccgggtggcccagcctgccagcaagaagatcgatcagaacaagctgaaacctgagatggacgagaagggcaacctgaccaccgccggctttgcctgctctcagtgtggccagcccctgttcgtgtacaagctggagcaggtgtctgagaagggcaaggcttacaccaactacttcggacggtgcaatgtggccgagcacgaaaagctgatcctgctggcccagctgaagcccgagaaggatagcgacgaagccgtgacatatagcctgggaaagtttgggcagagggccctggatttctacagcattcatgtgaccaaggagtccacccaccccgtgaagcccctggcccagatcgccggaaacagatacgcctccggacctgtgggaaaggccctgagcgacgcatgtatgggcacaatcgcctccttcctgtctaagtaccaggacatcatcatcgaacaccagaaggtggtgaagggcaaccagaagagactggagagcctgcgggagctggccggcaaggaaaacctggaataccctagcgtgaccctgccacctcagcctcacaccaaggagggcgttgatgcctacaacgaagtgatcgcccgggtgcgaatgtgggtgaacctgaacctgtggcagaagctgaagctaagcagagatgatgccaagcctctgctgagactgaagggattcccttcctttcctctggtcgagagacaggccaacgaagtggactggtgggacatggtgtgtaacgtgaagaagctgatcaacgagaaaaaggaggatggcaaggtgttttggcagaatctggctggctacaagagacaggaagccctgagaccatacctgagcagcgaggaagatcggaagaagggaaagaaattcgctcggtaccagctgggcgacctgctgctgcacctggaaaagaagcacggcgaggactggggaaaggtgtacgacgaggcctgggagcggattgacaagaaagtggaaggcctgagcaagcacatcaagctggaagaggaacggagaagcgaggacgcccagagcaaggccgccctgaccgactggctgcgggctaaggccagcttcgtgatcgagggcctgaaggaggccgacaaggacgagttctgcagatgcgagctgaagctgcagaagtggtacggggacctgcggggaaagcccttcgccatcgaagccgagaacagcatcctggacatcagcggcttcagcaagcagtacaactgtgccttcatctggcagaaggacggcgtgaagaagctgaacctgtacctgatcatcaactacttcaagggcggcaagctgcggttcaagaagatcaaacctgaagccttcgaagccaacagattctacaccgtgatcaacaaaaagagcggcgagatcgtgcccatggaggtgaacttcaacttcgacgaccccaacctgatcatcctgcctctggcctttggcaagagacagggcagagaattcatctggaacgacctgctgtccctggaaaccggcagcctgaagctggccaacggaagagtgatcgagaagacactgtacaacagaagaacccggcaggatgagcctgccctgttcgtggccctgaccttcgagcggcgggaggtcctggactcctccaatatcaaaccaatgaacctgatcggcgtggcaagaggcgaaaacatccccgccgtgatcgccctgaccgaccccgagggctgcccactgagccggtttaaggatagcctgggaaacccaacccacatcctgagaatcggcgagagctataaggagaagcagcggaccatccaggccaagaaggaggtggagcagcggagagccggcggctacagccggaagtacgccagcaaagccaagaatctggcagacgatatggtgagaaacaccgctagagatctgctgtactacgccgtgacccaggatgccatgctgatcttcgccaacctgagccggggcttcggccggcagggcaagcggaccttcatggccgagagacagtacacacggatggaggactggctgaccgccaagctggcctacgagggcctgagcaagacctacctgtccaagacactggcccagtacacctccaagacatgcagcaactgtgggtttaccatcaccagcgccgactacgacagggtgctggagaagctgaagaagacagcaacaggctggatgaccacaattaacggcaaggagctgaaggtggagggccagattacctactacaacagatacaagagacagaacgtagtcaaggacctgtccgtcgagctggatagactgagcgaagaatctgtgaacaacgacatctcctcctggacaaagggcagaagcggagaagctctgagcctcctgaagaaaagattctcccatagacccgtgcaggagaagttcgtgtgcctgaactgcggcttcgagacacacgcagccgagcaagccgccctgaacatcgccagatcctggctgttcctgcggagccaggagtacaagaaataccagacaaacaagacaaccggcaacaccgataagagagccttcgtcgagacctggcagtccttttaccggaagaagcttaaggaggtgtggaaacctgccgtgcggtctggcggatctggcggaggctccacaagcatgatccaggcccaggagagcatcaccctggaggacgtggccgtggacttcacctgggaggagtggcagctgctgggcgccgcccagaaggacctgtacagggacgtgatgctggagaactacagcaacctggtggccgtgggctaccaggccagcaagcccgacgccctgttcaagctggagcagggcgagcagccctggaccaccgaggacggcatccacagcggcgcctgcagcgacatgaccagccccaagaaaaagagaaaagtctaagctgccttctgcggggcttgccttctggccatgcccttcttctctcccttgcacctgtacctcttggtctttgaataaagcctgagtaggaaggctagcaaaaaaaaaaaaaaaaaaaaaaaaaaaaaaaaaaaaaaaaaaaaaaaaaaaaaaaaaaaaaaaaaaaaaaaaaaaaaaaa

SEQ ID NO: 6107 - RNA, 5797 nt, synthetic construct
  source 1..5797: mol_type = other RNA
aggaaataagagagaaaagaagagtaagaagaaatataagagccaccatggcccctaagaagaagcgtaaagtgagccggatggaacgcctcgtctacgaggtgcggcagaagtgcagaaacatcgaggacatctgcatctcctgcggatctctgaacgtgaccctggagcacccactgttcatcggcggcatgtgccagaactgtaaaaactgttttctggagtgtgcctatcaatacgacgatgacggctaccagagctactgcaccatctgttgcggcggaagagaggtgctgatgtgtggaaataacaactgctgccggtgcttctgcgtggaatgcgtggacctgctggtgggccccggcgccgcccaggccgctattaaggaagatccttggaactgctacatgtgcggccacaagggcacatacggcctgctgagacggagagaggactggcctagcagactgcagatgttcttcgccaataaccacgaccaggagttcgacccccctaaggtgtaccctcccgtccccgccgagaagagaaagcccatccgggtcctgagcctgttcgatggcatcgccaccggtctgctggtgctgaaggacctgggcatccaggtggataggtacattgcctccgaggtgtgcgaggactccatcaccgtgggaatggtgcgtcatcagggcaagatcatgtacgtgggcgacgtgcggagcgtgacacagaagcatatccaggagtggggccctttcgacctggtgatcggcggcagcccttgcaatgacctgagcatcgtgaacccagcccggaagggcctgtacgagggaaccggcagactgttcttcgagttttacagactgctgcacgacgcccggcctaaggaaggcgacgaccggcccttcttttggctgttcgagaatgtggtggccatgggagtcagcgacaagcgggatattagccggttcctggagagcaaccccgtgatgatcgatgccaaggaagtgagcgccgcccaccgggccagatacttctggggcaatctgcctggcatgaacagacccctggccagcaccgtgaacgacaagctggagctgcaggagtgcctggagcacggccggatcgccaagttcagcaaggtgagaaccatcaccacccgaagcaacagcatcaaacaaggcaaggaccagcactttcctgtgttcatgaacgagaaggaggacatcctgtggtgtaccgagatggagagagtgttcgggttcccagtccactacacagatgtcagcaacatgtctagactggccagacagagactgctgggaagaagctggtccgtccctgtgatcagacacctgttcgcccctctgaaggagtacttcgcctgcgtgagcagcggcaacagcaacgccaacagccggggccccagcttctctagcggcctggtgccactgtccctgagagggagccacatgggccccatggagatctacaaaaccgtgagcgcctggaagcggcagcctgtgcgcgtgctgagcctgtttcggaatatcgataaagtcctgaaaagcctgggattcctggagagcggctctggctccggcggtggcaccctgaagtacgtggaggatgtgacaaacgtggtcagacgggatgtggagaagtggggccccttcgatctggtgtacggcagcacccaacccctgggcagctcttgtgaccggtgccctggctggtacatgtttcagttccaccggatcctgcagtacgccctgccgagacaggagtcccagcggccattcttttggattttcatggacaacttgctgctgaccgaggatgaccaggaaactaccactcggttcctgcagaccgaagccgtgaccctgcaggacgtgagaggccgggactaccagaacgccatgcgggtgtggtccaacatccctggactgaaaagcaagcacgcacctctgacccctaaagaagaggagtacctgcaggcccaggtgcggagcagaagcaagctggacgcccctaaggtggatctgctggtgaagaattgcctcctgcccctgagagagtacttcaagtatttcagccagaatagtctgcccctgggcggcccaagcagcggcgcccctcctcccagcggcggcagcccagccggctccccaacctctaccgaggagggcacctctgagtccgccacccccgagagcggccctggcacctccaccgagcccagcgagggcagcgcacccggcagccctgccggcagccccacctccacagaggagggaaccagcaccgagcccagcgaaggcagcgccccaggcaccagcaccgagcctagtgagggcggctctggcggcggcagcgcccaggagattaaacggatcaacaagatcagaagaagacttgtgaaagacagcaacaccaagaaggccggcaagacaggccccatgaaaaccctgctggttagagtgatgacacccgatctgagagagcggctggaaaacctgagaaagaagcctgaaaatatcccccagcccatcagcaatacatctagagccaacctgaataagctgctgaccgattacaccgaaatgaagaaggcgatcctgcatgtgtactgggaagagttccagaaggaccctgtgggcctgatgagccgggtggcccagcctgccagcaagaagatcgatcagaacaagctgaaacctgagatggacgagaagggcaacctgaccaccgccggctttgcctgctctcagtgtggccagcccctgttcgtgtacaagctggagcaggtgtctgagaagggcaaggcttacaccaactacttcggacggtgcaatgtggccgagcacgaaaagctgatcctgctggcccagctgaagcccgagaaggatagcgacgaagccgtgacatatagcctgggaaagtttgggcagagggccctggatttctacagcattcatgtgaccaaggagtccacccaccccgtgaagcccctggcccagatcgccggaaacagatacgcctccggacctgtgggaaaggccctgagcgacgcatgtatgggcacaatcgcctccttcctgtctaagtaccaggacatcatcatcgaacaccagaaggtggtgaagggcaaccagaagagactggagagcctgcgggagctggccggcaaggaaaacctggaataccctagcgtgaccctgccacctcagcctcacaccaaggagggcgttgatgcctacaacgaagtgatcgcccgggtgcgaatgtgggtgaacctgaacctgtggcagaagctgaagctaagcagagatgatgccaagcctctgctgagactgaagggattcccttcctttcctctggtcgagagacaggccaacgaagtggactggtgggacatggtgtgtaacgtgaagaagctgatcaacgagaaaaaggaggatggcaaggtgttttggcagaatctggctggctacaagagacaggaagccctgagaccatacctgagcagcgaggaagatcggaagaagggaaagaaattcgctcggtaccagctgggcgacctgctgctgcacctggaaaagaagcacggcgaggactggggaaaggtgtacgacgaggcctgggagcggattgacaagaaagtggaaggcctgagcaagcacatcaagctggaagaggaacggagaagcgaggacgcccagagcaaggccgccctgaccgactggctgcgggctaaggccagcttcgtgatcgagggcctgaaggaggccgacaaggacgagttctgcagatgcgagctgaagctgcagaagtggtacggggacctgcggggaaagcccttcgccatcgaagccgagaacagcatcctggacatcagcggcttcagcaagcagtacaactgtgccttcatctggcagaaggacggcgtgaagaagctgaacctgtacctgatcatcaactacttcaagggcggcaagctgcggttcaagaagatcaaacctgaagccttcgaagccaacagattctacaccgtgatcaacaaaaagagcggcgagatcgtgcccatggaggtgaacttcaacttcgacgaccccaacctgatcatcctgcctctggcctttggcaagagacagggcagagaattcatctggaacgacctgctgtccctggaaaccggcagcctgaagctggccaacggaagagtgatcgagaagacactgtacaacagaagaacccggcaggatgagcctgccctgttcgtggccctgaccttcgagcggcgggaggtcctggactcctccaatatcaaaccaatgaacctgatcggcgtggcaagaggcgaaaacatccccgccgtgatcgccctgaccgaccccgagggctgcccactgagccggtttaaggatagcctgggaaacccaacccacatcctgagaatcggcgagagctataaggagaagcagcggaccatccaggccaagaaggaggtggagcagcggagagccggcggctacagccggaagtacgccagcaaagccaagaatctggcagacgatatggtgagaaacaccgctagagatctgctgtactacgccgtgacccaggatgccatgctgatcttcgccaacctgagccggggcttcggccggcagggcaagcggaccttcatggccgagagacagtacacacggatggaggactggctgaccgccaagctggcctacgagggcctgagcaagacctacctgtccaagacactggcccagtacacctccaagacatgcagcaactgtgggtttaccatcaccagcgccgactacgacagggtgctggagaagctgaagaagacagcaacaggctggatgaccacaattaacggcaaggagctgaaggtggagggccagattacctactacaacagatacaagagacagaacgtagtcaaggacctgtccgtcgagctggatagactgagcgaagaatctgtgaacaacgacatctcctcctggacaaagggcagaagcggagaagctctgagcctcctgaagaaaagattctcccatagacccgtgcaggagaagttcgtgtgcctgaactgcggcttcgagacacacgcagccgagcaagccgccctgaacatcgccagatcctggctgttcctgcggagccaggagtacaagaaataccagacaaacaagacaaccggcaacaccgataagagagccttcgtcgagacctggcagtccttttaccggaagaagcttaaggaggtgtggaaacctgccgtgcggtctggcggatctggcggaggctccacaagcgagccctgggccatcaccttcgccgacgtggccgtgtacttcagccccgaggagtggggctgcctgcagcccacccagagggccctgtacagggacgtgatgagggacacctacgtgctgctgagcgccctgggcggcggcggcgccaagcccgccctgatcagctgggtggagagggaggccgagctgtgggaccccgacgcccaggaccccgaggtgcccaagtggcccaccgaggccgacaccagccccaagaaaaagagaaaagtctaagctgccttctgcggggcttgccttctggccatgcccttcttctctcccttgcacctgtacctcttggtctttgaataaagcctgagtaggaaggctagcaaaaaaaaaaaaaaaaaaaaaaaaaaaaaaaaaaaaaaaaaaaaaaaaaaaaaaaaaaaaaaaaaaaaaaaaaaaaaaaa

SEQ ID NO: 6108 - RNA, 5797 nt, synthetic construct
  source 1..5797: mol_type = other RNA
aggaaataagagagaaaagaagagtaagaagaaatataagagccaccatggcccctaagaagaagcgtaaagtgagccggatggaacgcctcgtctacgaggtgcggcagaagtgcagaaacatcgaggacatctgcatctcctgcggatctctgaacgtgaccctggagcacccactgttcatcggcggcatgtgccagaactgtaaaaactgttttctggagtgtgcctatcaatacgacgatgacggctaccagagctactgcaccatctgttgcggcggaagagaggtgctgatgtgtggaaataacaactgctgccggtgcttctgcgtggaatgcgtggacctgctggtgggccccggcgccgcccaggccgctattaaggaagatccttggaactgctacatgtgcggccacaagggcacatacggcctgctgagacggagagaggactggcctagcagactgcagatgttcttcgccaataaccacgaccaggagttcgacccccctaaggtgtaccctcccgtccccgccgagaagagaaagcccatccgggtcctgagcctgttcgatggcatcgccaccggtctgctggtgctgaaggacctgggcatccaggtggataggtacattgcctccgaggtgtgcgaggactccatcaccgtgggaatggtgcgtcatcagggcaagatcatgtacgtgggcgacgtgcggagcgtgacacagaagcatatccaggagtggggccctttcgacctggtgatcggcggcagcccttgcaatgacctgagcatcgtgaacccagcccggaagggcctgtacgagggaaccggcagactgttcttcgagttttacagactgctgcacgacgcccggcctaaggaaggcgacgaccggcccttcttttggctgttcgagaatgtggtggccatgggagtcagcgacaagcgggatattagccggttcctggagagcaaccccgtgatgatcgatgccaaggaagtgagcgccgcccaccgggccagatacttctggggcaatctgcctggcatgaacagacccctggccagcaccgtgaacgacaagctggagctgcaggagtgcctggagcacggccggatcgccaagttcagcaaggtgagaaccatcaccacccgaagcaacagcatcaaacaaggcaaggaccagcactttcctgtgttcatgaacgagaaggaggacatcctgtggtgtaccgagatggagagagtgttcgggttcccagtccactacacagatgtcagcaacatgtctagactggccagacagagactgctgggaagaagctggtccgtccctgtgatcagacacctgttcgcccctctgaaggagtacttcgcctgcgtgagcagcggcaacagcaacgccaacagccggggccccagcttctctagcggcctggtgccactgtccctgagagggagccacatgggccccatggagatctacaaaaccgtgagcgcctggaagcggcagcctgtgcgcgtgctgagcctgtttcggaatatcgataaagtcctgaaaagcctgggattcctggagagcggctctggctccggcggtggcaccctgaagtacgtggaggatgtgacaaacgtggtcagacgggatgtggagaagtggggccccttcgatctggtgtacggcagcacccaacccctgggcagctcttgtgaccggtgccctggctggtacatgtttcagttccaccggatcctgcagtacgccctgccgagacaggagtcccagcggccattcttttggattttcatggacaacttgctgctgaccgaggatgaccaggaaactaccactcggttcctgcagaccgaagccgtgaccctgcaggacgtgagaggccgggactaccagaacgccatgcgggtgtggtccaacatccctggactgaaaagcaagcacgcacctctgacccctaaagaagaggagtacctgcaggcccaggtgcggagcagaagcaagctggacgcccctaaggtggatctgctggtgaagaattgcctcctgcccctgagagagtacttcaagtatttcagccagaatagtctgcccctgggcggcccaagcagcggcgcccctcctcccagcggcggcagcccagccggctccccaacctctaccgaggagggcacctctgagtccgccacccccgagagcggccctggcacctccaccgagcccagcgagggcagcgcacccggcagccctgccggcagccccacctccacagaggagggaaccagcaccgagcccagcgaaggcagcgccccaggcaccagcaccgagcctagtgagggcggctctggcggcggcagcgcccaggagattaaacggatcaacaagatcagaagaagacttgtgaaagacagcaacaccaagaaggccggcaagacaggccccatgaaaaccctgctggttagagtgatgacacccgatctgagagagcggctggaaaacctgagaaagaagcctgaaaatatcccccagcccatcagcaatacatctagagccaacctgaataagctgctgaccgattacaccgaaatgaagaaggcgatcctgcatgtgtactgggaagagttccagaaggaccctgtgggcctgatgagccgggtggcccagcctgccagcaagaagatcgatcagaacaagctgaaacctgagatggacgagaagggcaacctgaccaccgccggctttgcctgctctcagtgtggccagcccctgttcgtgtacaagctggagcaggtgtctgagaagggcaaggcttacaccaactacttcggacggtgcaatgtggccgagcacgaaaagctgatcctgctggcccagctgaagcccgagaaggatagcgacgaagccgtgacatatagcctgggaaagtttgggcagagggccctggatttctacagcattcatgtgaccaaggagtccacccaccccgtgaagcccctggcccagatcgccggaaacagatacgcctccggacctgtgggaaaggccctgagcgacgcatgtatgggcacaatcgcctccttcctgtctaagtaccaggacatcatcatcgaacaccagaaggtggtgaagggcaaccagaagagactggagagcctgcgggagctggccggcaaggaaaacctggaataccctagcgtgaccctgccacctcagcctcacaccaaggagggcgttgatgcctacaacgaagtgatcgcccgggtgcgaatgtgggtgaacctgaacctgtggcagaagctgaagctaagcagagatgatgccaagcctctgctgagactgaagggattcccttcctttcctctggtcgagagacaggccaacgaagtggactggtgggacatggtgtgtaacgtgaagaagctgatcaacgagaaaaaggaggatggcaaggtgttttggcagaatctggctggctacaagagacaggaagccctgagaccatacctgagcagcgaggaagatcggaagaagggaaagaaattcgctcggtaccagctgggcgacctgctgctgcacctggaaaagaagcacggcgaggactggggaaaggtgtacgacgaggcctgggagcggattgacaagaaagtggaaggcctgagcaagcacatcaagctggaagaggaacggagaagcgaggacgcccagagcaaggccgccctgaccgactggctgcgggctaaggccagcttcgtgatcgagggcctgaaggaggccgacaaggacgagttctgcagatgcgagctgaagctgcagaagtggtacggggacctgcggggaaagcccttcgccatcgaagccgagaacagcatcctggacatcagcggcttcagcaagcagtacaactgtgccttcatctggcagaaggacggcgtgaagaagctgaacctgtacctgatcatcaactacttcaagggcggcaagctgcggttcaagaagatcaaacctgaagccttcgaagccaacagattctacaccgtgatcaacaaaaagagcggcgagatcgtgcccatggaggtgaacttcaacttcgacgaccccaacctgatcatcctgcctctggcctttggcaagagacagggcagagaattcatctggaacgacctgctgtccctggaaaccggcagcctgaagctggccaacggaagagtgatcgagaagacactgtacaacagaagaacccggcaggatgagcctgccctgttcgtggccctgaccttcgagcggcgggaggtcctggactcctccaatatcaaaccaatgaacctgatcggcgtggcaagaggcgaaaacatccccgccgtgatcgccctgaccgaccccgagggctgcccactgagccggtttaaggatagcctgggaaacccaacccacatcctgagaatcggcgagagctataaggagaagcagcggaccatccaggccaagaaggaggtggagcagcggagagccggcggctacagccggaagtacgccagcaaagccaagaatctggcagacgatatggtgagaaacaccgctagagatctgctgtactacgccgtgacccaggatgccatgctgatcttcgccaacctgagccggggcttcggccggcagggcaagcggaccttcatggccgagagacagtacacacggatggaggactggctgaccgccaagctggcctacgagggcctgagcaagacctacctgtccaagacactggcccagtacacctccaagacatgcagcaactgtgggtttaccatcaccagcgccgactacgacagggtgctggagaagctgaagaagacagcaacaggctggatgaccacaattaacggcaaggagctgaaggtggagggccagattacctactacaacagatacaagagacagaacgtagtcaaggacctgtccgtcgagctggatagactgagcgaagaatctgtgaacaacgacatctcctcctggacaaagggcagaagcggagaagctctgagcctcctgaagaaaagattctcccatagacccgtgcaggagaagttcgtgtgcctgaactgcggcttcgagacacacgcagccgagcaagccgccctgaacatcgccagatcctggctgttcctgcggagccaggagtacaagaaataccagacaaacaagacaaccggcaacaccgataagagagccttcgtcgagacctggcagtccttttaccggaagaagcttaaggaggtgtggaaacctgccgtgcggtctggcggatctggcggaggctccacaagcagccaggagcccgtgagcttcgaggaggtggccgtgtacttcagcagggaggagtgggccctgctggaccccgcccagagggccctgtacagggacgtgatgctggagacctacgagtgcgtggccagcctggcccccctgcccgcccccaagcccatggtgatcagcctgctggaggagggcgaggagccctggatccccgacgtgggcagccccgaggccgtggccggcgacgtgagccccaccagccccaagaaaaagagaaaagtctaagctgccttctgcggggcttgccttctggccatgcccttcttctctcccttgcacctgtacctcttggtctttgaataaagcctgagtaggaaggctagcaaaaaaaaaaaaaaaaaaaaaaaaaaaaaaaaaaaaaaaaaaaaaaaaaaaaaaaaaaaaaaaaaaaaaaaaaaaaaaaa

SEQ ID NO: 6109 - RNA, 5797 nt, synthetic construct
  source 1..5797: mol_type = other RNA
aggaaataagagagaaaagaagagtaagaagaaatataagagccaccatggcccctaagaagaagcgtaaagtgagccggatggaacgcctcgtctacgaggtgcggcagaagtgcagaaacatcgaggacatctgcatctcctgcggatctctgaacgtgaccctggagcacccactgttcatcggcggcatgtgccagaactgtaaaaactgttttctggagtgtgcctatcaatacgacgatgacggctaccagagctactgcaccatctgttgcggcggaagagaggtgctgatgtgtggaaataacaactgctgccggtgcttctgcgtggaatgcgtggacctgctggtgggccccggcgccgcccaggccgctattaaggaagatccttggaactgctacatgtgcggccacaagggcacatacggcctgctgagacggagagaggactggcctagcagactgcagatgttcttcgccaataaccacgaccaggagttcgacccccctaaggtgtaccctcccgtccccgccgagaagagaaagcccatccgggtcctgagcctgttcgatggcatcgccaccggtctgctggtgctgaaggacctgggcatccaggtggataggtacattgcctccgaggtgtgcgaggactccatcaccgtgggaatggtgcgtcatcagggcaagatcatgtacgtgggcgacgtgcggagcgtgacacagaagcatatccaggagtggggccctttcgacctggtgatcggcggcagcccttgcaatgacctgagcatcgtgaacccagcccggaagggcctgtacgagggaaccggcagactgttcttcgagttttacagactgctgcacgacgcccggcctaaggaaggcgacgaccggcccttcttttggctgttcgagaatgtggtggccatgggagtcagcgacaagcgggatattagccggttcctggagagcaaccccgtgatgatcgatgccaaggaagtgagcgccgcccaccgggccagatacttctggggcaatctgcctggcatgaacagacccctggccagcaccgtgaacgacaagctggagctgcaggagtgcctggagcacggccggatcgccaagttcagcaaggtgagaaccatcaccacccgaagcaacagcatcaaacaaggcaaggaccagcactttcctgtgttcatgaacgagaaggaggacatcctgtggtgtaccgagatggagagagtgttcgggttcccagtccactacacagatgtcagcaacatgtctagactggccagacagagactgctgggaagaagctggtccgtccctgtgatcagacacctgttcgcccctctgaaggagtacttcgcctgcgtgagcagcggcaacagcaacgccaacagccggggccccagcttctctagcggcctggtgccactgtccctgagagggagccacatgggccccatggagatctacaaaaccgtgagcgcctggaagcggcagcctgtgcgcgtgctgagcctgtttcggaatatcgataaagtcctgaaaagcctgggattcctggagagcggctctggctccggcggtggcaccctgaagtacgtggaggatgtgacaaacgtggtcagacgggatgtggagaagtggggccccttcgatctggtgtacggcagcacccaacccctgggcagctcttgtgaccggtgccctggctggtacatgtttcagttccaccggatcctgcagtacgccctgccgagacaggagtcccagcggccattcttttggattttcatggacaacttgctgctgaccgaggatgaccaggaaactaccactcggttcctgcagaccgaagccgtgaccctgcaggacgtgagaggccgggactaccagaacgccatgcgggtgtggtccaacatccctggactgaaaagcaagcacgcacctctgacccctaaagaagaggagtacctgcaggcccaggtgcggagcagaagcaagctggacgcccctaaggtggatctgctggtgaagaattgcctcctgcccctgagagagtacttcaagtatttcagccagaatagtctgcccctgggcggcccaagcagcggcgcccctcctcccagcggcggcagcccagccggctccccaacctctaccgaggagggcacctctgagtccgccacccccgagagcggccctggcacctccaccgagcccagcgagggcagcgcacccggcagccctgccggcagccccacctccacagaggagggaaccagcaccgagcccagcgaaggcagcgccccaggcaccagcaccgagcctagtgagggcggctctggcggcggcagcgcccaggagattaaacggatcaacaagatcagaagaagacttgtgaaagacagcaacaccaagaaggccggcaagacaggccccatgaaaaccctgctggttagagtgatgacacccgatctgagagagcggctggaaaacctgagaaagaagcctgaaaatatcccccagcccatcagcaatacatctagagccaacctgaataagctgctgaccgattacaccgaaatgaagaaggcgatcctgcatgtgtactgggaagagttccagaaggaccctgtgggcctgatgagccgggtggcccagcctgccagcaagaagatcgatcagaacaagctgaaacctgagatggacgagaagggcaacctgaccaccgccggctttgcctgctctcagtgtggccagcccctgttcgtgtacaagctggagcaggtgtctgagaagggcaaggcttacaccaactacttcggacggtgcaatgtggccgagcacgaaaagctgatcctgctggcccagctgaagcccgagaaggatagcgacgaagccgtgacatatagcctgggaaagtttgggcagagggccctggatttctacagcattcatgtgaccaaggagtccacccaccccgtgaagcccctggcccagatcgccggaaacagatacgcctccggacctgtgggaaaggccctgagcgacgcatgtatgggcacaatcgcctccttcctgtctaagtaccaggacatcatcatcgaacaccagaaggtggtgaagggcaaccagaagagactggagagcctgcgggagctggccggcaaggaaaacctggaataccctagcgtgaccctgccacctcagcctcacaccaaggagggcgttgatgcctacaacgaagtgatcgcccgggtgcgaatgtgggtgaacctgaacctgtggcagaagctgaagctaagcagagatgatgccaagcctctgctgagactgaagggattcccttcctttcctctggtcgagagacaggccaacgaagtggactggtgggacatggtgtgtaacgtgaagaagctgatcaacgagaaaaaggaggatggcaaggtgttttggcagaatctggctggctacaagagacaggaagccctgagaccatacctgagcagcgaggaagatcggaagaagggaaagaaattcgctcggtaccagctgggcgacctgctgctgcacctggaaaagaagcacggcgaggactggggaaaggtgtacgacgaggcctgggagcggattgacaagaaagtggaaggcctgagcaagcacatcaagctggaagaggaacggagaagcgaggacgcccagagcaaggccgccctgaccgactggctgcgggctaaggccagcttcgtgatcgagggcctgaaggaggccgacaaggacgagttctgcagatgcgagctgaagctgcagaagtggtacggggacctgcggggaaagcccttcgccatcgaagccgagaacagcatcctggacatcagcggcttcagcaagcagtacaactgtgccttcatctggcagaaggacggcgtgaagaagctgaacctgtacctgatcatcaactacttcaagggcggcaagctgcggttcaagaagatcaaacctgaagccttcgaagccaacagattctacaccgtgatcaacaaaaagagcggcgagatcgtgcccatggaggtgaacttcaacttcgacgaccccaacctgatcatcctgcctctggcctttggcaagagacagggcagagaattcatctggaacgacctgctgtccctggaaaccggcagcctgaagctggccaacggaagagtgatcgagaagacactgtacaacagaagaacccggcaggatgagcctgccctgttcgtggccctgaccttcgagcggcgggaggtcctggactcctccaatatcaaaccaatgaacctgatcggcgtggcaagaggcgaaaacatccccgccgtgatcgccctgaccgaccccgagggctgcccactgagccggtttaaggatagcctgggaaacccaacccacatcctgagaatcggcgagagctataaggagaagcagcggaccatccaggccaagaaggaggtggagcagcggagagccggcggctacagccggaagtacgccagcaaagccaagaatctggcagacgatatggtgagaaacaccgctagagatctgctgtactacgccgtgacccaggatgccatgctgatcttcgccaacctgagccggggcttcggccggcagggcaagcggaccttcatggccgagagacagtacacacggatggaggactggctgaccgccaagctggcctacgagggcctgagcaagacctacctgtccaagacactggcccagtacacctccaagacatgcagcaactgtgggtttaccatcaccagcgccgactacgacagggtgctggagaagctgaagaagacagcaacaggctggatgaccacaattaacggcaaggagctgaaggtggagggccagattacctactacaacagatacaagagacagaacgtagtcaaggacctgtccgtcgagctggatagactgagcgaagaatctgtgaacaacgacatctcctcctggacaaagggcagaagcggagaagctctgagcctcctgaagaaaagattctcccatagacccgtgcaggagaagttcgtgtgcctgaactgcggcttcgagacacacgcagccgagcaagccgccctgaacatcgccagatcctggctgttcctgcggagccaggagtacaagaaataccagacaaacaagacaaccggcaacaccgataagagagccttcgtcgagacctggcagtccttttaccggaagaagcttaaggaggtgtggaaacctgccgtgcggtctggcggatctggcggaggctccacaagcgcccaggcccccctgagcttcgaggacgtggccgtgagcttcagcagggaggagtggaggctgctggtgcccgcccagaaggacctgtacagggacgtgatgctggagaactacaggaacctggtgagcgtgggctaccaggccagcgagcccggcagcctgttccagctggagcacgccggccccctgagggccgtggagggcgccgcccccaggcccccctgccccgaggagatctgggagaccagccccaagaaaaagagaaaagtctaagctgccttctgcggggcttgccttctggccatgcccttcttctctcccttgcacctgtacctcttggtctttgaataaagcctgagtaggaaggctagcaaaaaaaaaaaaaaaaaaaaaaaaaaaaaaaaaaaaaaaaaaaaaaaaaaaaaaaaaaaaaaaaaaaaaaaaaaaaaaaa

SEQ ID NO: 6110 - RNA, 5797 nt, synthetic construct
  source 1..5797: mol_type = other RNA
aggaaataagagagaaaagaagagtaagaagaaatataagagccaccatggcccctaagaagaagcgtaaagtgagccggatggaacgcctcgtctacgaggtgcggcagaagtgcagaaacatcgaggacatctgcatctcctgcggatctctgaacgtgaccctggagcacccactgttcatcggcggcatgtgccagaactgtaaaaactgttttctggagtgtgcctatcaatacgacgatgacggctaccagagctactgcaccatctgttgcggcggaagagaggtgctgatgtgtggaaataacaactgctgccggtgcttctgcgtggaatgcgtggacctgctggtgggccccggcgccgcccaggccgctattaaggaagatccttggaactgctacatgtgcggccacaagggcacatacggcctgctgagacggagagaggactggcctagcagactgcagatgttcttcgccaataaccacgaccaggagttcgacccccctaaggtgtaccctcccgtccccgccgagaagagaaagcccatccgggtcctgagcctgttcgatggcatcgccaccggtctgctggtgctgaaggacctgggcatccaggtggataggtacattgcctccgaggtgtgcgaggactccatcaccgtgggaatggtgcgtcatcagggcaagatcatgtacgtgggcgacgtgcggagcgtgacacagaagcatatccaggagtggggccctttcgacctggtgatcggcggcagcccttgcaatgacctgagcatcgtgaacccagcccggaagggcctgtacgagggaaccggcagactgttcttcgagttttacagactgctgcacgacgcccggcctaaggaaggcgacgaccggcccttcttttggctgttcgagaatgtggtggccatgggagtcagcgacaagcgggatattagccggttcctggagagcaaccccgtgatgatcgatgccaaggaagtgagcgccgcccaccgggccagatacttctggggcaatctgcctggcatgaacagacccctggccagcaccgtgaacgacaagctggagctgcaggagtgcctggagcacggccggatcgccaagttcagcaaggtgagaaccatcaccacccgaagcaacagcatcaaacaaggcaaggaccagcactttcctgtgttcatgaacgagaaggaggacatcctgtggtgtaccgagatggagagagtgttcgggttcccagtccactacacagatgtcagcaacatgtctagactggccagacagagactgctgggaagaagctggtccgtccctgtgatcagacacctgttcgcccctctgaaggagtacttcgcctgcgtgagcagcggcaacagcaacgccaacagccggggccccagcttctctagcggcctggtgccactgtccctgagagggagccacatgggccccatggagatctacaaaaccgtgagcgcctggaagcggcagcctgtgcgcgtgctgagcctgtttcggaatatcgataaagtcctgaaaagcctgggattcctggagagcggctctggctccggcggtggcaccctgaagtacgtggaggatgtgacaaacgtggtcagacgggatgtggagaagtggggccccttcgatctggtgtacggcagcacccaacccctgggcagctcttgtgaccggtgccctggctggtacatgtttcagttccaccggatcctgcagtacgccctgccgagacaggagtcccagcggccattcttttggattttcatggacaacttgctgctgaccgaggatgaccaggaaactaccactcggttcctgcagaccgaagccgtgaccctgcaggacgtgagaggccgggactaccagaacgccatgcgggtgtggtccaacatccctggactgaaaagcaagcacgcacctctgacccctaaagaagaggagtacctgcaggcccaggtgcggagcagaagcaagctggacgcccctaaggtggatctgctggtgaagaattgcctcctgcccctgagagagtacttcaagtatttcagccagaatagtctgcccctgggcggcccaagcagcggcgcccctcctcccagcggcggcagcccagccggctccccaacctctaccgaggagggcacctctgagtccgccacccccgagagcggccctggcacctccaccgagcccagcgagggcagcgcacccggcagccctgccggcagccccacctccacagaggagggaaccagcaccgagcccagcgaaggcagcgccccaggcaccagcaccgagcctagtgagggcggctctggcggcggcagcgcccaggagattaaacggatcaacaagatcagaagaagacttgtgaaagacagcaacaccaagaaggccggcaagacaggccccatgaaaaccctgctggttagagtgatgacacccgatctgagagagcggctggaaaacctgagaaagaagcctgaaaatatcccccagcccatcagcaatacatctagagccaacctgaataagctgctgaccgattacaccgaaatgaagaaggcgatcctgcatgtgtactgggaagagttccagaaggaccctgtgggcctgatgagccgggtggcccagcctgccagcaagaagatcgatcagaacaagctgaaacctgagatggacgagaagggcaacctgaccaccgccggctttgcctgctctcagtgtggccagcccctgttcgtgtacaagctggagcaggtgtctgagaagggcaaggcttacaccaactacttcggacggtgcaatgtggccgagcacgaaaagctgatcctgctggcccagctgaagcccgagaaggatagcgacgaagccgtgacatatagcctgggaaagtttgggcagagggccctggatttctacagcattcatgtgaccaaggagtccacccaccccgtgaagcccctggcccagatcgccggaaacagatacgcctccggacctgtgggaaaggccctgagcgacgcatgtatgggcacaatcgcctccttcctgtctaagtaccaggacatcatcatcgaacaccagaaggtggtgaagggcaaccagaagagactggagagcctgcgggagctggccggcaaggaaaacctggaataccctagcgtgaccctgccacctcagcctcacaccaaggagggcgttgatgcctacaacgaagtgatcgcccgggtgcgaatgtgggtgaacctgaacctgtggcagaagctgaagctaagcagagatgatgccaagcctctgctgagactgaagggattcccttcctttcctctggtcgagagacaggccaacgaagtggactggtgggacatggtgtgtaacgtgaagaagctgatcaacgagaaaaaggaggatggcaaggtgttttggcagaatctggctggctacaagagacaggaagccctgagaccatacctgagcagcgaggaagatcggaagaagggaaagaaattcgctcggtaccagctgggcgacctgctgctgcacctggaaaagaagcacggcgaggactggggaaaggtgtacgacgaggcctgggagcggattgacaagaaagtggaaggcctgagcaagcacatcaagctggaagaggaacggagaagcgaggacgcccagagcaaggccgccctgaccgactggctgcgggctaaggccagcttcgtgatcgagggcctgaaggaggccgacaaggacgagttctgcagatgcgagctgaagctgcagaagtggtacggggacctgcggggaaagcccttcgccatcgaagccgagaacagcatcctggacatcagcggcttcagcaagcagtacaactgtgccttcatctggcagaaggacggcgtgaagaagctgaacctgtacctgatcatcaactacttcaagggcggcaagctgcggttcaagaagatcaaacctgaagccttcgaagccaacagattctacaccgtgatcaacaaaaagagcggcgagatcgtgcccatggaggtgaacttcaacttcgacgaccccaacctgatcatcctgcctctggcctttggcaagagacagggcagagaattcatctggaacgacctgctgtccctggaaaccggcagcctgaagctggccaacggaagagtgatcgagaagacactgtacaacagaagaacccggcaggatgagcctgccctgttcgtggccctgaccttcgagcggcgggaggtcctggactcctccaatatcaaaccaatgaacctgatcggcgtggcaagaggcgaaaacatccccgccgtgatcgccctgaccgaccccgagggctgcccactgagccggtttaaggatagcctgggaaacccaacccacatcctgagaatcggcgagagctataaggagaagcagcggaccatccaggccaagaaggaggtggagcagcggagagccggcggctacagccggaagtacgccagcaaagccaagaatctggcagacgatatggtgagaaacaccgctagagatctgctgtactacgccgtgacccaggatgccatgctgatcttcgccaacctgagccggggcttcggccggcagggcaagcggaccttcatggccgagagacagtacacacggatggaggactggctgaccgccaagctggcctacgagggcctgagcaagacctacctgtccaagacactggcccagtacacctccaagacatgcagcaactgtgggtttaccatcaccagcgccgactacgacagggtgctggagaagctgaagaagacagcaacaggctggatgaccacaattaacggcaaggagctgaaggtggagggccagattacctactacaacagatacaagagacagaacgtagtcaaggacctgtccgtcgagctggatagactgagcgaagaatctgtgaacaacgacatctcctcctggacaaagggcagaagcggagaagctctgagcctcctgaagaaaagattctcccatagacccgtgcaggagaagttcgtgtgcctgaactgcggcttcgagacacacgcagccgagcaagccgccctgaacatcgccagatcctggctgttcctgcggagccaggagtacaagaaataccagacaaacaagacaaccggcaacaccgataagagagccttcgtcgagacctggcagtccttttaccggaagaagcttaaggaggtgtggaaacctgccgtgcggtctggcggatctggcggaggctccacaagcccccaggagcccgtgaccttcgccgacgtggccgtgctgttcacccccgaggagtggctgttcctggacagcgcccagaagagcctgtacagggacgtgatgctggagaactacaggaacctggccagcgtgggcgaccagctgtgcaagaccaagatgagcagccacatggagcagagggaggagctgtgcgtgaccgagaggggcgtgttccccggcgcccacctgggcccccacctgcagaccagccccaagaaaaagagaaaagtctaagctgccttctgcggggcttgccttctggccatgcccttcttctctcccttgcacctgtacctcttggtctttgaataaagcctgagtaggaaggctagcaaaaaaaaaaaaaaaaaaaaaaaaaaaaaaaaaaaaaaaaaaaaaaaaaaaaaaaaaaaaaaaaaaaaaaaaaaaaaaaa

SEQ ID NO: 6111 - RNA, 5797 nt, synthetic construct
  source 1..5797: mol_type = other RNA
aggaaataagagagaaaagaagagtaagaagaaatataagagccaccatggcccctaagaagaagcgtaaagtgagccggatggaacgcctcgtctacgaggtgcggcagaagtgcagaaacatcgaggacatctgcatctcctgcggatctctgaacgtgaccctggagcacccactgttcatcggcggcatgtgccagaactgtaaaaactgttttctggagtgtgcctatcaatacgacgatgacggctaccagagctactgcaccatctgttgcggcggaagagaggtgctgatgtgtggaaataacaactgctgccggtgcttctgcgtggaatgcgtggacctgctggtgggccccggcgccgcccaggccgctattaaggaagatccttggaactgctacatgtgcggccacaagggcacatacggcctgctgagacggagagaggactggcctagcagactgcagatgttcttcgccaataaccacgaccaggagttcgacccccctaaggtgtaccctcccgtccccgccgagaagagaaagcccatccgggtcctgagcctgttcgatggcatcgccaccggtctgctggtgctgaaggacctgggcatccaggtggataggtacattgcctccgaggtgtgcgaggactccatcaccgtgggaatggtgcgtcatcagggcaagatcatgtacgtgggcgacgtgcggagcgtgacacagaagcatatccaggagtggggccctttcgacctggtgatcggcggcagcccttgcaatgacctgagcatcgtgaacccagcccggaagggcctgtacgagggaaccggcagactgttcttcgagttttacagactgctgcacgacgcccggcctaaggaaggcgacgaccggcccttcttttggctgttcgagaatgtggtggccatgggagtcagcgacaagcgggatattagccggttcctggagagcaaccccgtgatgatcgatgccaaggaagtgagcgccgcccaccgggccagatacttctggggcaatctgcctggcatgaacagacccctggccagcaccgtgaacgacaagctggagctgcaggagtgcctggagcacggccggatcgccaagttcagcaaggtgagaaccatcaccacccgaagcaacagcatcaaacaaggcaaggaccagcactttcctgtgttcatgaacgagaaggaggacatcctgtggtgtaccgagatggagagagtgttcgggttcccagtccactacacagatgtcagcaacatgtctagactggccagacagagactgctgggaagaagctggtccgtccctgtgatcagacacctgttcgcccctctgaaggagtacttcgcctgcgtgagcagcggcaacagcaacgccaacagccggggccccagcttctctagcggcctggtgccactgtccctgagagggagccacatgggccccatggagatctacaaaaccgtgagcgcctggaagcggcagcctgtgcgcgtgctgagcctgtttcggaatatcgataaagtcctgaaaagcctgggattcctggagagcggctctggctccggcggtggcaccctgaagtacgtggaggatgtgacaaacgtggtcagacgggatgtggagaagtggggccccttcgatctggtgtacggcagcacccaacccctgggcagctcttgtgaccggtgccctggctggtacatgtttcagttccaccggatcctgcagtacgccctgccgagacaggagtcccagcggccattcttttggattttcatggacaacttgctgctgaccgaggatgaccaggaaactaccactcggttcctgcagaccgaagccgtgaccctgcaggacgtgagaggccgggactaccagaacgccatgcgggtgtggtccaacatccctggactgaaaagcaagcacgcacctctgacccctaaagaagaggagtacctgcaggcccaggtgcggagcagaagcaagctggacgcccctaaggtggatctgctggtgaagaattgcctcctgcccctgagagagtacttcaagtatttcagccagaatagtctgcccctgggcggcccaagcagcggcgcccctcctcccagcggcggcagcccagccggctccccaacctctaccgaggagggcacctctgagtccgccacccccgagagcggccctggcacctccaccgagcccagcgagggcagcgcacccggcagccctgccggcagccccacctccacagaggagggaaccagcaccgagcccagcgaaggcagcgccccaggcaccagcaccgagcctagtgagggcggctctggcggcggcagcgcccaggagattaaacggatcaacaagatcagaagaagacttgtgaaagacagcaacaccaagaaggccggcaagacaggccccatgaaaaccctgctggttagagtgatgacacccgatctgagagagcggctggaaaacctgagaaagaagcctgaaaatatcccccagcccatcagcaatacatctagagccaacctgaataagctgctgaccgattacaccgaaatgaagaaggcgatcctgcatgtgtactgggaagagttccagaaggaccctgtgggcctgatgagccgggtggcccagcctgccagcaagaagatcgatcagaacaagctgaaacctgagatggacgagaagggcaacctgaccaccgccggctttgcctgctctcagtgtggccagcccctgttcgtgtacaagctggagcaggtgtctgagaagggcaaggcttacaccaactacttcggacggtgcaatgtggccgagcacgaaaagctgatcctgctggcccagctgaagcccgagaaggatagcgacgaagccgtgacatatagcctgggaaagtttgggcagagggccctggatttctacagcattcatgtgaccaaggagtccacccaccccgtgaagcccctggcccagatcgccggaaacagatacgcctccggacctgtgggaaaggccctgagcgacgcatgtatgggcacaatcgcctccttcctgtctaagtaccaggacatcatcatcgaacaccagaaggtggtgaagggcaaccagaagagactggagagcctgcgggagctggccggcaaggaaaacctggaataccctagcgtgaccctgccacctcagcctcacaccaaggagggcgttgatgcctacaacgaagtgatcgcccgggtgcgaatgtgggtgaacctgaacctgtggcagaagctgaagctaagcagagatgatgccaagcctctgctgagactgaagggattcccttcctttcctctggtcgagagacaggccaacgaagtggactggtgggacatggtgtgtaacgtgaagaagctgatcaacgagaaaaaggaggatggcaaggtgttttggcagaatctggctggctacaagagacaggaagccctgagaccatacctgagcagcgaggaagatcggaagaagggaaagaaattcgctcggtaccagctgggcgacctgctgctgcacctggaaaagaagcacggcgaggactggggaaaggtgtacgacgaggcctgggagcggattgacaagaaagtggaaggcctgagcaagcacatcaagctggaagaggaacggagaagcgaggacgcccagagcaaggccgccctgaccgactggctgcgggctaaggccagcttcgtgatcgagggcctgaaggaggccgacaaggacgagttctgcagatgcgagctgaagctgcagaagtggtacggggacctgcggggaaagcccttcgccatcgaagccgagaacagcatcctggacatcagcggcttcagcaagcagtacaactgtgccttcatctggcagaaggacggcgtgaagaagctgaacctgtacctgatcatcaactacttcaagggcggcaagctgcggttcaagaagatcaaacctgaagccttcgaagccaacagattctacaccgtgatcaacaaaaagagcggcgagatcgtgcccatggaggtgaacttcaacttcgacgaccccaacctgatcatcctgcctctggcctttggcaagagacagggcagagaattcatctggaacgacctgctgtccctggaaaccggcagcctgaagctggccaacggaagagtgatcgagaagacactgtacaacagaagaacccggcaggatgagcctgccctgttcgtggccctgaccttcgagcggcgggaggtcctggactcctccaatatcaaaccaatgaacctgatcggcgtggcaagaggcgaaaacatccccgccgtgatcgccctgaccgaccccgagggctgcccactgagccggtttaaggatagcctgggaaacccaacccacatcctgagaatcggcgagagctataaggagaagcagcggaccatccaggccaagaaggaggtggagcagcggagagccggcggctacagccggaagtacgccagcaaagccaagaatctggcagacgatatggtgagaaacaccgctagagatctgctgtactacgccgtgacccaggatgccatgctgatcttcgccaacctgagccggggcttcggccggcagggcaagcggaccttcatggccgagagacagtacacacggatggaggactggctgaccgccaagctggcctacgagggcctgagcaagacctacctgtccaagacactggcccagtacacctccaagacatgcagcaactgtgggtttaccatcaccagcgccgactacgacagggtgctggagaagctgaagaagacagcaacaggctggatgaccacaattaacggcaaggagctgaaggtggagggccagattacctactacaacagatacaagagacagaacgtagtcaaggacctgtccgtcgagctggatagactgagcgaagaatctgtgaacaacgacatctcctcctggacaaagggcagaagcggagaagctctgagcctcctgaagaaaagattctcccatagacccgtgcaggagaagttcgtgtgcctgaactgcggcttcgagacacacgcagccgagcaagccgccctgaacatcgccagatcctggctgttcctgcggagccaggagtacaagaaataccagacaaacaagacaaccggcaacaccgataagagagccttcgtcgagacctggcagtccttttaccggaagaagcttaaggaggtgtggaaacctgccgtgcggtctggcggatctggcggaggctccacaagcatggccttcgaggacgtggccgtgtacttcagccaggaggagtggggcctgctggacaccgcccagagggccctgtacaggcacgtgatgctggagaacttcaccctggtgagcagcctgggcctgagcaccagcaggcccagggtggtggtgcagctggagaggggcgaggagccctgggtgcccagcaggatcgacagcacccccgccaggaacgcccagggcaggaggaaccccggcagcaccagccccaagaaaaagagaaaagtctaagctgccttctgcggggcttgccttctggccatgcccttcttctctcccttgcacctgtacctcttggtctttgaataaagcctgagtaggaaggctagcaaaaaaaaaaaaaaaaaaaaaaaaaaaaaaaaaaaaaaaaaaaaaaaaaaaaaaaaaaaaaaaaaaaaaaaaaaaaaaaa

SEQ ID NO: 6112 - RNA, 5797 nt, synthetic construct
  source 1..5797: mol_type = other RNA
aggaaataagagagaaaagaagagtaagaagaaatataagagccaccatggcccctaagaagaagcgtaaagtgagccggatggaacgcctcgtctacgaggtgcggcagaagtgcagaaacatcgaggacatctgcatctcctgcggatctctgaacgtgaccctggagcacccactgttcatcggcggcatgtgccagaactgtaaaaactgttttctggagtgtgcctatcaatacgacgatgacggctaccagagctactgcaccatctgttgcggcggaagagaggtgctgatgtgtggaaataacaactgctgccggtgcttctgcgtggaatgcgtggacctgctggtgggccccggcgccgcccaggccgctattaaggaagatccttggaactgctacatgtgcggccacaagggcacatacggcctgctgagacggagagaggactggcctagcagactgcagatgttcttcgccaataaccacgaccaggagttcgacccccctaaggtgtaccctcccgtccccgccgagaagagaaagcccatccgggtcctgagcctgttcgatggcatcgccaccggtctgctggtgctgaaggacctgggcatccaggtggataggtacattgcctccgaggtgtgcgaggactccatcaccgtgggaatggtgcgtcatcagggcaagatcatgtacgtgggcgacgtgcggagcgtgacacagaagcatatccaggagtggggccctttcgacctggtgatcggcggcagcccttgcaatgacctgagcatcgtgaacccagcccggaagggcctgtacgagggaaccggcagactgttcttcgagttttacagactgctgcacgacgcccggcctaaggaaggcgacgaccggcccttcttttggctgttcgagaatgtggtggccatgggagtcagcgacaagcgggatattagccggttcctggagagcaaccccgtgatgatcgatgccaaggaagtgagcgccgcccaccgggccagatacttctggggcaatctgcctggcatgaacagacccctggccagcaccgtgaacgacaagctggagctgcaggagtgcctggagcacggccggatcgccaagttcagcaaggtgagaaccatcaccacccgaagcaacagcatcaaacaaggcaaggaccagcactttcctgtgttcatgaacgagaaggaggacatcctgtggtgtaccgagatggagagagtgttcgggttcccagtccactacacagatgtcagcaacatgtctagactggccagacagagactgctgggaagaagctggtccgtccctgtgatcagacacctgttcgcccctctgaaggagtacttcgcctgcgtgagcagcggcaacagcaacgccaacagccggggccccagcttctctagcggcctggtgccactgtccctgagagggagccacatgggccccatggagatctacaaaaccgtgagcgcctggaagcggcagcctgtgcgcgtgctgagcctgtttcggaatatcgataaagtcctgaaaagcctgggattcctggagagcggctctggctccggcggtggcaccctgaagtacgtggaggatgtgacaaacgtggtcagacgggatgtggagaagtggggccccttcgatctggtgtacggcagcacccaacccctgggcagctcttgtgaccggtgccctggctggtacatgtttcagttccaccggatcctgcagtacgccctgccgagacaggagtcccagcggccattcttttggattttcatggacaacttgctgctgaccgaggatgaccaggaaactaccactcggttcctgcagaccgaagccgtgaccctgcaggacgtgagaggccgggactaccagaacgccatgcgggtgtggtccaacatccctggactgaaaagcaagcacgcacctctgacccctaaagaagaggagtacctgcaggcccaggtgcggagcagaagcaagctggacgcccctaaggtggatctgctggtgaagaattgcctcctgcccctgagagagtacttcaagtatttcagccagaatagtctgcccctgggcggcccaagcagcggcgcccctcctcccagcggcggcagcccagccggctccccaacctctaccgaggagggcacctctgagtccgccacccccgagagcggccctggcacctccaccgagcccagcgagggcagcgcacccggcagccctgccggcagccccacctccacagaggagggaaccagcaccgagcccagcgaaggcagcgccccaggcaccagcaccgagcctagtgagggcggctctggcggcggcagcgcccaggagattaaacggatcaacaagatcagaagaagacttgtgaaagacagcaacaccaagaaggccggcaagacaggccccatgaaaaccctgctggttagagtgatgacacccgatctgagagagcggctggaaaacctgagaaagaagcctgaaaatatcccccagcccatcagcaatacatctagagccaacctgaataagctgctgaccgattacaccgaaatgaagaaggcgatcctgcatgtgtactgggaagagttccagaaggaccctgtgggcctgatgagccgggtggcccagcctgccagcaagaagatcgatcagaacaagctgaaacctgagatggacgagaagggcaacctgaccaccgccggctttgcctgctctcagtgtggccagcccctgttcgtgtacaagctggagcaggtgtctgagaagggcaaggcttacaccaactacttcggacggtgcaatgtggccgagcacgaaaagctgatcctgctggcccagctgaagcccgagaaggatagcgacgaagccgtgacatatagcctgggaaagtttgggcagagggccctggatttctacagcattcatgtgaccaaggagtccacccaccccgtgaagcccctggcccagatcgccggaaacagatacgcctccggacctgtgggaaaggccctgagcgacgcatgtatgggcacaatcgcctccttcctgtctaagtaccaggacatcatcatcgaacaccagaaggtggtgaagggcaaccagaagagactggagagcctgcgggagctggccggcaaggaaaacctggaataccctagcgtgaccctgccacctcagcctcacaccaaggagggcgttgatgcctacaacgaagtgatcgcccgggtgcgaatgtgggtgaacctgaacctgtggcagaagctgaagctaagcagagatgatgccaagcctctgctgagactgaagggattcccttcctttcctctggtcgagagacaggccaacgaagtggactggtgggacatggtgtgtaacgtgaagaagctgatcaacgagaaaaaggaggatggcaaggtgttttggcagaatctggctggctacaagagacaggaagccctgagaccatacctgagcagcgaggaagatcggaagaagggaaagaaattcgctcggtaccagctgggcgacctgctgctgcacctggaaaagaagcacggcgaggactggggaaaggtgtacgacgaggcctgggagcggattgacaagaaagtggaaggcctgagcaagcacatcaagctggaagaggaacggagaagcgaggacgcccagagcaaggccgccctgaccgactggctgcgggctaaggccagcttcgtgatcgagggcctgaaggaggccgacaaggacgagttctgcagatgcgagctgaagctgcagaagtggtacggggacctgcggggaaagcccttcgccatcgaagccgagaacagcatcctggacatcagcggcttcagcaagcagtacaactgtgccttcatctggcagaaggacggcgtgaagaagctgaacctgtacctgatcatcaactacttcaagggcggcaagctgcggttcaagaagatcaaacctgaagccttcgaagccaacagattctacaccgtgatcaacaaaaagagcggcgagatcgtgcccatggaggtgaacttcaacttcgacgaccccaacctgatcatcctgcctctggcctttggcaagagacagggcagagaattcatctggaacgacctgctgtccctggaaaccggcagcctgaagctggccaacggaagagtgatcgagaagacactgtacaacagaagaacccggcaggatgagcctgccctgttcgtggccctgaccttcgagcggcgggaggtcctggactcctccaatatcaaaccaatgaacctgatcggcgtggcaagaggcgaaaacatccccgccgtgatcgccctgaccgaccccgagggctgcccactgagccggtttaaggatagcctgggaaacccaacccacatcctgagaatcggcgagagctataaggagaagcagcggaccatccaggccaagaaggaggtggagcagcggagagccggcggctacagccggaagtacgccagcaaagccaagaatctggcagacgatatggtgagaaacaccgctagagatctgctgtactacgccgtgacccaggatgccatgctgatcttcgccaacctgagccggggcttcggccggcagggcaagcggaccttcatggccgagagacagtacacacggatggaggactggctgaccgccaagctggcctacgagggcctgagcaagacctacctgtccaagacactggcccagtacacctccaagacatgcagcaactgtgggtttaccatcaccagcgccgactacgacagggtgctggagaagctgaagaagacagcaacaggctggatgaccacaattaacggcaaggagctgaaggtggagggccagattacctactacaacagatacaagagacagaacgtagtcaaggacctgtccgtcgagctggatagactgagcgaagaatctgtgaacaacgacatctcctcctggacaaagggcagaagcggagaagctctgagcctcctgaagaaaagattctcccatagacccgtgcaggagaagttcgtgtgcctgaactgcggcttcgagacacacgcagccgagcaagccgccctgaacatcgccagatcctggctgttcctgcggagccaggagtacaagaaataccagacaaacaagacaaccggcaacaccgataagagagccttcgtcgagacctggcagtccttttaccggaagaagcttaaggaggtgtggaaacctgccgtgcggtctggcggatctggcggaggctccacaagcagccaggccagcgtgagcttcaaggacgtgaacgtggagttcacccaggacgagtggcagcagatgggccccgcccagaggaacctgtacagggacgtgatgctggagaactacagcaacctggtgagcgtgggctactgcatcttcaagcccaaggtgatcttcaggctggagcagggcgaggagccctggagcagcgaggaggagttcagcagccagaggaggcccaagaactacagggacaccagccccaagaaaaagagaaaagtctaagctgccttctgcggggcttgccttctggccatgcccttcttctctcccttgcacctgtacctcttggtctttgaataaagcctgagtaggaaggctagcaaaaaaaaaaaaaaaaaaaaaaaaaaaaaaaaaaaaaaaaaaaaaaaaaaaaaaaaaaaaaaaaaaaaaaaaaaaaaaaa

SEQ ID NO: 6113 - RNA, 5797 nt, synthetic construct
  source 1..5797: mol_type = other RNA
aggaaataagagagaaaagaagagtaagaagaaatataagagccaccatggcccctaagaagaagcgtaaagtgagccggatggaacgcctcgtctacgaggtgcggcagaagtgcagaaacatcgaggacatctgcatctcctgcggatctctgaacgtgaccctggagcacccactgttcatcggcggcatgtgccagaactgtaaaaactgttttctggagtgtgcctatcaatacgacgatgacggctaccagagctactgcaccatctgttgcggcggaagagaggtgctgatgtgtggaaataacaactgctgccggtgcttctgcgtggaatgcgtggacctgctggtgggccccggcgccgcccaggccgctattaaggaagatccttggaactgctacatgtgcggccacaagggcacatacggcctgctgagacggagagaggactggcctagcagactgcagatgttcttcgccaataaccacgaccaggagttcgacccccctaaggtgtaccctcccgtccccgccgagaagagaaagcccatccgggtcctgagcctgttcgatggcatcgccaccggtctgctggtgctgaaggacctgggcatccaggtggataggtacattgcctccgaggtgtgcgaggactccatcaccgtgggaatggtgcgtcatcagggcaagatcatgtacgtgggcgacgtgcggagcgtgacacagaagcatatccaggagtggggccctttcgacctggtgatcggcggcagcccttgcaatgacctgagcatcgtgaacccagcccggaagggcctgtacgagggaaccggcagactgttcttcgagttttacagactgctgcacgacgcccggcctaaggaaggcgacgaccggcccttcttttggctgttcgagaatgtggtggccatgggagtcagcgacaagcgggatattagccggttcctggagagcaaccccgtgatgatcgatgccaaggaagtgagcgccgcccaccgggccagatacttctggggcaatctgcctggcatgaacagacccctggccagcaccgtgaacgacaagctggagctgcaggagtgcctggagcacggccggatcgccaagttcagcaaggtgagaaccatcaccacccgaagcaacagcatcaaacaaggcaaggaccagcactttcctgtgttcatgaacgagaaggaggacatcctgtggtgtaccgagatggagagagtgttcgggttcccagtccactacacagatgtcagcaacatgtctagactggccagacagagactgctgggaagaagctggtccgtccctgtgatcagacacctgttcgcccctctgaaggagtacttcgcctgcgtgagcagcggcaacagcaacgccaacagccggggccccagcttctctagcggcctggtgccactgtccctgagagggagccacatgggccccatggagatctacaaaaccgtgagcgcctggaagcggcagcctgtgcgcgtgctgagcctgtttcggaatatcgataaagtcctgaaaagcctgggattcctggagagcggctctggctccggcggtggcaccctgaagtacgtggaggatgtgacaaacgtggtcagacgggatgtggagaagtggggccccttcgatctggtgtacggcagcacccaacccctgggcagctcttgtgaccggtgccctggctggtacatgtttcagttccaccggatcctgcagtacgccctgccgagacaggagtcccagcggccattcttttggattttcatggacaacttgctgctgaccgaggatgaccaggaaactaccactcggttcctgcagaccgaagccgtgaccctgcaggacgtgagaggccgggactaccagaacgccatgcgggtgtggtccaacatccctggactgaaaagcaagcacgcacctctgacccctaaagaagaggagtacctgcaggcccaggtgcggagcagaagcaagctggacgcccctaaggtggatctgctggtgaagaattgcctcctgcccctgagagagtacttcaagtatttcagccagaatagtctgcccctgggcggcccaagcagcggcgcccctcctcccagcggcggcagcccagccggctccccaacctctaccgaggagggcacctctgagtccgccacccccgagagcggccctggcacctccaccgagcccagcgagggcagcgcacccggcagccctgccggcagccccacctccacagaggagggaaccagcaccgagcccagcgaaggcagcgccccaggcaccagcaccgagcctagtgagggcggctctggcggcggcagcgcccaggagattaaacggatcaacaagatcagaagaagacttgtgaaagacagcaacaccaagaaggccggcaagacaggccccatgaaaaccctgctggttagagtgatgacacccgatctgagagagcggctggaaaacctgagaaagaagcctgaaaatatcccccagcccatcagcaatacatctagagccaacctgaataagctgctgaccgattacaccgaaatgaagaaggcgatcctgcatgtgtactgggaagagttccagaaggaccctgtgggcctgatgagccgggtggcccagcctgccagcaagaagatcgatcagaacaagctgaaacctgagatggacgagaagggcaacctgaccaccgccggctttgcctgctctcagtgtggccagcccctgttcgtgtacaagctggagcaggtgtctgagaagggcaaggcttacaccaactacttcggacggtgcaatgtggccgagcacgaaaagctgatcctgctggcccagctgaagcccgagaaggatagcgacgaagccgtgacatatagcctgggaaagtttgggcagagggccctggatttctacagcattcatgtgaccaaggagtccacccaccccgtgaagcccctggcccagatcgccggaaacagatacgcctccggacctgtgggaaaggccctgagcgacgcatgtatgggcacaatcgcctccttcctgtctaagtaccaggacatcatcatcgaacaccagaaggtggtgaagggcaaccagaagagactggagagcctgcgggagctggccggcaaggaaaacctggaataccctagcgtgaccctgccacctcagcctcacaccaaggagggcgttgatgcctacaacgaagtgatcgcccgggtgcgaatgtgggtgaacctgaacctgtggcagaagctgaagctaagcagagatgatgccaagcctctgctgagactgaagggattcccttcctttcctctggtcgagagacaggccaacgaagtggactggtgggacatggtgtgtaacgtgaagaagctgatcaacgagaaaaaggaggatggcaaggtgttttggcagaatctggctggctacaagagacaggaagccctgagaccatacctgagcagcgaggaagatcggaagaagggaaagaaattcgctcggtaccagctgggcgacctgctgctgcacctggaaaagaagcacggcgaggactggggaaaggtgtacgacgaggcctgggagcggattgacaagaaagtggaaggcctgagcaagcacatcaagctggaagaggaacggagaagcgaggacgcccagagcaaggccgccctgaccgactggctgcgggctaaggccagcttcgtgatcgagggcctgaaggaggccgacaaggacgagttctgcagatgcgagctgaagctgcagaagtggtacggggacctgcggggaaagcccttcgccatcgaagccgagaacagcatcctggacatcagcggcttcagcaagcagtacaactgtgccttcatctggcagaaggacggcgtgaagaagctgaacctgtacctgatcatcaactacttcaagggcggcaagctgcggttcaagaagatcaaacctgaagccttcgaagccaacagattctacaccgtgatcaacaaaaagagcggcgagatcgtgcccatggaggtgaacttcaacttcgacgaccccaacctgatcatcctgcctctggcctttggcaagagacagggcagagaattcatctggaacgacctgctgtccctggaaaccggcagcctgaagctggccaacggaagagtgatcgagaagacactgtacaacagaagaacccggcaggatgagcctgccctgttcgtggccctgaccttcgagcggcgggaggtcctggactcctccaatatcaaaccaatgaacctgatcggcgtggcaagaggcgaaaacatccccgccgtgatcgccctgaccgaccccgagggctgcccactgagccggtttaaggatagcctgggaaacccaacccacatcctgagaatcggcgagagctataaggagaagcagcggaccatccaggccaagaaggaggtggagcagcggagagccggcggctacagccggaagtacgccagcaaagccaagaatctggcagacgatatggtgagaaacaccgctagagatctgctgtactacgccgtgacccaggatgccatgctgatcttcgccaacctgagccggggcttcggccggcagggcaagcggaccttcatggccgagagacagtacacacggatggaggactggctgaccgccaagctggcctacgagggcctgagcaagacctacctgtccaagacactggcccagtacacctccaagacatgcagcaactgtgggtttaccatcaccagcgccgactacgacagggtgctggagaagctgaagaagacagcaacaggctggatgaccacaattaacggcaaggagctgaaggtggagggccagattacctactacaacagatacaagagacagaacgtagtcaaggacctgtccgtcgagctggatagactgagcgaagaatctgtgaacaacgacatctcctcctggacaaagggcagaagcggagaagctctgagcctcctgaagaaaagattctcccatagacccgtgcaggagaagttcgtgtgcctgaactgcggcttcgagacacacgcagccgagcaagccgccctgaacatcgccagatcctggctgttcctgcggagccaggagtacaagaaataccagacaaacaagacaaccggcaacaccgataagagagccttcgtcgagacctggcagtccttttaccggaagaagcttaaggaggtgtggaaacctgccgtgcggtctggcggatctggcggaggctccacaagcggccaggagagcgtgaccttcaccgacgtggccgtggacttcaccctggaggagtgggcctacctggaccacttccagaaggagctgtacaaggacgtgatgctggagaactacaggaacctgctgtgcctgggcctggccgtgagcaagcccgacgtgatcagccagctggagcagggcgacgccccctggatgagcgagggcggcgtgcccaggagcatctacagcgactgggagaccaggaccagccccaagaaaaagagaaaagtctaagctgccttctgcggggcttgccttctggccatgcccttcttctctcccttgcacctgtacctcttggtctttgaataaagcctgagtaggaaggctagcaaaaaaaaaaaaaaaaaaaaaaaaaaaaaaaaaaaaaaaaaaaaaaaaaaaaaaaaaaaaaaaaaaaaaaaaaaaaaaaa

SEQ ID NO: 6114 - RNA, 5806 nt, synthetic construct
  source 1..5806: mol_type = other RNA
aggaaataagagagaaaagaagagtaagaagaaatataagagccaccatggcccctaagaagaagcgtaaagtgagccggatggaacgcctcgtctacgaggtgcggcagaagtgcagaaacatcgaggacatctgcatctcctgcggatctctgaacgtgaccctggagcacccactgttcatcggcggcatgtgccagaactgtaaaaactgttttctggagtgtgcctatcaatacgacgatgacggctaccagagctactgcaccatctgttgcggcggaagagaggtgctgatgtgtggaaataacaactgctgccggtgcttctgcgtggaatgcgtggacctgctggtgggccccggcgccgcccaggccgctattaaggaagatccttggaactgctacatgtgcggccacaagggcacatacggcctgctgagacggagagaggactggcctagcagactgcagatgttcttcgccaataaccacgaccaggagttcgacccccctaaggtgtaccctcccgtccccgccgagaagagaaagcccatccgggtcctgagcctgttcgatggcatcgccaccggtctgctggtgctgaaggacctgggcatccaggtggataggtacattgcctccgaggtgtgcgaggactccatcaccgtgggaatggtgcgtcatcagggcaagatcatgtacgtgggcgacgtgcggagcgtgacacagaagcatatccaggagtggggccctttcgacctggtgatcggcggcagcccttgcaatgacctgagcatcgtgaacccagcccggaagggcctgtacgagggaaccggcagactgttcttcgagttttacagactgctgcacgacgcccggcctaaggaaggcgacgaccggcccttcttttggctgttcgagaatgtggtggccatgggagtcagcgacaagcgggatattagccggttcctggagagcaaccccgtgatgatcgatgccaaggaagtgagcgccgcccaccgggccagatacttctggggcaatctgcctggcatgaacagacccctggccagcaccgtgaacgacaagctggagctgcaggagtgcctggagcacggccggatcgccaagttcagcaaggtgagaaccatcaccacccgaagcaacagcatcaaacaaggcaaggaccagcactttcctgtgttcatgaacgagaaggaggacatcctgtggtgtaccgagatggagagagtgttcgggttcccagtccactacacagatgtcagcaacatgtctagactggccagacagagactgctgggaagaagctggtccgtccctgtgatcagacacctgttcgcccctctgaaggagtacttcgcctgcgtgagcagcggcaacagcaacgccaacagccggggccccagcttctctagcggcctggtgccactgtccctgagagggagccacatgggccccatggagatctacaaaaccgtgagcgcctggaagcggcagcctgtgcgcgtgctgagcctgtttcggaatatcgataaagtcctgaaaagcctgggattcctggagagcggctctggctccggcggtggcaccctgaagtacgtggaggatgtgacaaacgtggtcagacgggatgtggagaagtggggccccttcgatctggtgtacggcagcacccaacccctgggcagctcttgtgaccggtgccctggctggtacatgtttcagttccaccggatcctgcagtacgccctgccgagacaggagtcccagcggccattcttttggattttcatggacaacttgctgctgaccgaggatgaccaggaaactaccactcggttcctgcagaccgaagccgtgaccctgcaggacgtgagaggccgggactaccagaacgccatgcgggtgtggtccaacatccctggactgaaaagcaagcacgcacctctgacccctaaagaagaggagtacctgcaggcccaggtgcggagcagaagcaagctggacgcccctaaggtggatctgctggtgaagaattgcctcctgcccctgagagagtacttcaagtatttcagccagaatagtctgcccctgggcggcccaagcagcggcgcccctcctcccagcggcggcagcccagccggctccccaacctctaccgaggagggcacctctgagtccgccacccccgagagcggccctggcacctccaccgagcccagcgagggcagcgcacccggcagccctgccggcagccccacctccacagaggagggaaccagcaccgagcccagcgaaggcagcgccccaggcaccagcaccgagcctagtgagggcggctctggcggcggcagcgcccaggagattaaacggatcaacaagatcagaagaagacttgtgaaagacagcaacaccaagaaggccggcaagacaggccccatgaaaaccctgctggttagagtgatgacacccgatctgagagagcggctggaaaacctgagaaagaagcctgaaaatatcccccagcccatcagcaatacatctagagccaacctgaataagctgctgaccgattacaccgaaatgaagaaggcgatcctgcatgtgtactgggaagagttccagaaggaccctgtgggcctgatgagccgggtggcccagcctgccagcaagaagatcgatcagaacaagctgaaacctgagatggacgagaagggcaacctgaccaccgccggctttgcctgctctcagtgtggccagcccctgttcgtgtacaagctggagcaggtgtctgagaagggcaaggcttacaccaactacttcggacggtgcaatgtggccgagcacgaaaagctgatcctgctggcccagctgaagcccgagaaggatagcgacgaagccgtgacatatagcctgggaaagtttgggcagagggccctggatttctacagcattcatgtgaccaaggagtccacccaccccgtgaagcccctggcccagatcgccggaaacagatacgcctccggacctgtgggaaaggccctgagcgacgcatgtatgggcacaatcgcctccttcctgtctaagtaccaggacatcatcatcgaacaccagaaggtggtgaagggcaaccagaagagactggagagcctgcgggagctggccggcaaggaaaacctggaataccctagcgtgaccctgccacctcagcctcacaccaaggagggcgttgatgcctacaacgaagtgatcgcccgggtgcgaatgtgggtgaacctgaacctgtggcagaagctgaagctaagcagagatgatgccaagcctctgctgagactgaagggattcccttcctttcctctggtcgagagacaggccaacgaagtggactggtgggacatggtgtgtaacgtgaagaagctgatcaacgagaaaaaggaggatggcaaggtgttttggcagaatctggctggctacaagagacaggaagccctgagaccatacctgagcagcgaggaagatcggaagaagggaaagaaattcgctcggtaccagctgggcgacctgctgctgcacctggaaaagaagcacggcgaggactggggaaaggtgtacgacgaggcctgggagcggattgacaagaaagtggaaggcctgagcaagcacatcaagctggaagaggaacggagaagcgaggacgcccagagcaaggccgccctgaccgactggctgcgggctaaggccagcttcgtgatcgagggcctgaaggaggccgacaaggacgagttctgcagatgcgagctgaagctgcagaagtggtacggggacctgcggggaaagcccttcgccatcgaagccgagaacagcatcctggacatcagcggcttcagcaagcagtacaactgtgccttcatctggcagaaggacggcgtgaagaagctgaacctgtacctgatcatcaactacttcaagggcggcaagctgcggttcaagaagatcaaacctgaagccttcgaagccaacagattctacaccgtgatcaacaaaaagagcggcgagatcgtgcccatggaggtgaacttcaacttcgacgaccccaacctgatcatcctgcctctggcctttggcaagagacagggcagagaattcatctggaacgacctgctgtccctggaaaccggcagcctgaagctggccaacggaagagtgatcgagaagacactgtacaacagaagaacccggcaggatgagcctgccctgttcgtggccctgaccttcgagcggcgggaggtcctggactcctccaatatcaaaccaatgaacctgatcggcgtggcaagaggcgaaaacatccccgccgtgatcgccctgaccgaccccgagggctgcccactgagccggtttaaggatagcctgggaaacccaacccacatcctgagaatcggcgagagctataaggagaagcagcggaccatccaggccaagaaggaggtggagcagcggagagccggcggctacagccggaagtacgccagcaaagccaagaatctggcagacgatatggtgagaaacaccgctagagatctgctgtactacgccgtgacccaggatgccatgctgatcttcgccaacctgagccggggcttcggccggcagggcaagcggaccttcatggccgagagacagtacacacggatggaggactggctgaccgccaagctggcctacgagggcctgagcaagacctacctgtccaagacactggcccagtacacctccaagacatgcagcaactgtgggtttaccatcaccagcgccgactacgacagggtgctggagaagctgaagaagacagcaacaggctggatgaccacaattaacggcaaggagctgaaggtggagggccagattacctactacaacagatacaagagacagaacgtagtcaaggacctgtccgtcgagctggatagactgagcgaagaatctgtgaacaacgacatctcctcctggacaaagggcagaagcggagaagctctgagcctcctgaagaaaagattctcccatagacccgtgcaggagaagttcgtgtgcctgaactgcggcttcgagacacacgcagccgagcaagccgccctgaacatcgccagatcctggctgttcctgcggagccaggagtacaagaaataccagacaaacaagacaaccggcaacaccgataagagagccttcgtcgagacctggcagtccttttaccggaagaagcttaaggaggtgtggaaacctgccgtgcggtctggcggatctggcggaggctccacaagcgtgacctacgacgacgtgcacatcgacttcacctgggaggagtggaccctgctggaccccagccagaagaacctgtacaaggacgtgatgctggagacctacaggaacctgaccaccgtgggctacagctgggaggaccacctgatcgaggagcactgcaagagcagcaggaagcacgagaggcacgagaggatccccaccggcgagcagcccagcgagagcacccagagcttcagggccttcgcccaccacaccagccccaagaaaaagagaaaagtctaagctgccttctgcggggcttgccttctggccatgcccttcttctctcccttgcacctgtacctcttggtctttgaataaagcctgagtaggaaggctagcaaaaaaaaaaaaaaaaaaaaaaaaaaaaaaaaaaaaaaaaaaaaaaaaaaaaaaaaaaaaaaaaaaaaaaaaaaaaaaaa

SEQ ID NO: 6115 - RNA, 5797 nt, synthetic construct
  source 1..5797: mol_type = other RNA
aggaaataagagagaaaagaagagtaagaagaaatataagagccaccatggcccctaagaagaagcgtaaagtgagccggatggaacgcctcgtctacgaggtgcggcagaagtgcagaaacatcgaggacatctgcatctcctgcggatctctgaacgtgaccctggagcacccactgttcatcggcggcatgtgccagaactgtaaaaactgttttctggagtgtgcctatcaatacgacgatgacggctaccagagctactgcaccatctgttgcggcggaagagaggtgctgatgtgtggaaataacaactgctgccggtgcttctgcgtggaatgcgtggacctgctggtgggccccggcgccgcccaggccgctattaaggaagatccttggaactgctacatgtgcggccacaagggcacatacggcctgctgagacggagagaggactggcctagcagactgcagatgttcttcgccaataaccacgaccaggagttcgacccccctaaggtgtaccctcccgtccccgccgagaagagaaagcccatccgggtcctgagcctgttcgatggcatcgccaccggtctgctggtgctgaaggacctgggcatccaggtggataggtacattgcctccgaggtgtgcgaggactccatcaccgtgggaatggtgcgtcatcagggcaagatcatgtacgtgggcgacgtgcggagcgtgacacagaagcatatccaggagtggggccctttcgacctggtgatcggcggcagcccttgcaatgacctgagcatcgtgaacccagcccggaagggcctgtacgagggaaccggcagactgttcttcgagttttacagactgctgcacgacgcccggcctaaggaaggcgacgaccggcccttcttttggctgttcgagaatgtggtggccatgggagtcagcgacaagcgggatattagccggttcctggagagcaaccccgtgatgatcgatgccaaggaagtgagcgccgcccaccgggccagatacttctggggcaatctgcctggcatgaacagacccctggccagcaccgtgaacgacaagctggagctgcaggagtgcctggagcacggccggatcgccaagttcagcaaggtgagaaccatcaccacccgaagcaacagcatcaaacaaggcaaggaccagcactttcctgtgttcatgaacgagaaggaggacatcctgtggtgtaccgagatggagagagtgttcgggttcccagtccactacacagatgtcagcaacatgtctagactggccagacagagactgctgggaagaagctggtccgtccctgtgatcagacacctgttcgcccctctgaaggagtacttcgcctgcgtgagcagcggcaacagcaacgccaacagccggggccccagcttctctagcggcctggtgccactgtccctgagagggagccacatgggccccatggagatctacaaaaccgtgagcgcctggaagcggcagcctgtgcgcgtgctgagcctgtttcggaatatcgataaagtcctgaaaagcctgggattcctggagagcggctctggctccggcggtggcaccctgaagtacgtggaggatgtgacaaacgtggtcagacgggatgtggagaagtggggccccttcgatctggtgtacggcagcacccaacccctgggcagctcttgtgaccggtgccctggctggtacatgtttcagttccaccggatcctgcagtacgccctgccgagacaggagtcccagcggccattcttttggattttcatggacaacttgctgctgaccgaggatgaccaggaaactaccactcggttcctgcagaccgaagccgtgaccctgcaggacgtgagaggccgggactaccagaacgccatgcgggtgtggtccaacatccctggactgaaaagcaagcacgcacctctgacccctaaagaagaggagtacctgcaggcccaggtgcggagcagaagcaagctggacgcccctaaggtggatctgctggtgaagaattgcctcctgcccctgagagagtacttcaagtatttcagccagaatagtctgcccctgggcggcccaagcagcggcgcccctcctcccagcggcggcagcccagccggctccccaacctctaccgaggagggcacctctgagtccgccacccccgagagcggccctggcacctccaccgagcccagcgagggcagcgcacccggcagccctgccggcagccccacctccacagaggagggaaccagcaccgagcccagcgaaggcagcgccccaggcaccagcaccgagcctagtgagggcggctctggcggcggcagcgcccaggagattaaacggatcaacaagatcagaagaagacttgtgaaagacagcaacaccaagaaggccggcaagacaggccccatgaaaaccctgctggttagagtgatgacacccgatctgagagagcggctggaaaacctgagaaagaagcctgaaaatatcccccagcccatcagcaatacatctagagccaacctgaataagctgctgaccgattacaccgaaatgaagaaggcgatcctgcatgtgtactgggaagagttccagaaggaccctgtgggcctgatgagccgggtggcccagcctgccagcaagaagatcgatcagaacaagctgaaacctgagatggacgagaagggcaacctgaccaccgccggctttgcctgctctcagtgtggccagcccctgttcgtgtacaagctggagcaggtgtctgagaagggcaaggcttacaccaactacttcggacggtgcaatgtggccgagcacgaaaagctgatcctgctggcccagctgaagcccgagaaggatagcgacgaagccgtgacatatagcctgggaaagtttgggcagagggccctggatttctacagcattcatgtgaccaaggagtccacccaccccgtgaagcccctggcccagatcgccggaaacagatacgcctccggacctgtgggaaaggccctgagcgacgcatgtatgggcacaatcgcctccttcctgtctaagtaccaggacatcatcatcgaacaccagaaggtggtgaagggcaaccagaagagactggagagcctgcgggagctggccggcaaggaaaacctggaataccctagcgtgaccctgccacctcagcctcacaccaaggagggcgttgatgcctacaacgaagtgatcgcccgggtgcgaatgtgggtgaacctgaacctgtggcagaagctgaagctaagcagagatgatgccaagcctctgctgagactgaagggattcccttcctttcctctggtcgagagacaggccaacgaagtggactggtgggacatggtgtgtaacgtgaagaagctgatcaacgagaaaaaggaggatggcaaggtgttttggcagaatctggctggctacaagagacaggaagccctgagaccatacctgagcagcgaggaagatcggaagaagggaaagaaattcgctcggtaccagctgggcgacctgctgctgcacctggaaaagaagcacggcgaggactggggaaaggtgtacgacgaggcctgggagcggattgacaagaaagtggaaggcctgagcaagcacatcaagctggaagaggaacggagaagcgaggacgcccagagcaaggccgccctgaccgactggctgcgggctaaggccagcttcgtgatcgagggcctgaaggaggccgacaaggacgagttctgcagatgcgagctgaagctgcagaagtggtacggggacctgcggggaaagcccttcgccatcgaagccgagaacagcatcctggacatcagcggcttcagcaagcagtacaactgtgccttcatctggcagaaggacggcgtgaagaagctgaacctgtacctgatcatcaactacttcaagggcggcaagctgcggttcaagaagatcaaacctgaagccttcgaagccaacagattctacaccgtgatcaacaaaaagagcggcgagatcgtgcccatggaggtgaacttcaacttcgacgaccccaacctgatcatcctgcctctggcctttggcaagagacagggcagagaattcatctggaacgacctgctgtccctggaaaccggcagcctgaagctggccaacggaagagtgatcgagaagacactgtacaacagaagaacccggcaggatgagcctgccctgttcgtggccctgaccttcgagcggcgggaggtcctggactcctccaatatcaaaccaatgaacctgatcggcgtggcaagaggcgaaaacatccccgccgtgatcgccctgaccgaccccgagggctgcccactgagccggtttaaggatagcctgggaaacccaacccacatcctgagaatcggcgagagctataaggagaagcagcggaccatccaggccaagaaggaggtggagcagcggagagccggcggctacagccggaagtacgccagcaaagccaagaatctggcagacgatatggtgagaaacaccgctagagatctgctgtactacgccgtgacccaggatgccatgctgatcttcgccaacctgagccggggcttcggccggcagggcaagcggaccttcatggccgagagacagtacacacggatggaggactggctgaccgccaagctggcctacgagggcctgagcaagacctacctgtccaagacactggcccagtacacctccaagacatgcagcaactgtgggtttaccatcaccagcgccgactacgacagggtgctggagaagctgaagaagacagcaacaggctggatgaccacaattaacggcaaggagctgaaggtggagggccagattacctactacaacagatacaagagacagaacgtagtcaaggacctgtccgtcgagctggatagactgagcgaagaatctgtgaacaacgacatctcctcctggacaaagggcagaagcggagaagctctgagcctcctgaagaaaagattctcccatagacccgtgcaggagaagttcgtgtgcctgaactgcggcttcgagacacacgcagccgagcaagccgccctgaacatcgccagatcctggctgttcctgcggagccaggagtacaagaaataccagacaaacaagacaaccggcaacaccgataagagagccttcgtcgagacctggcagtccttttaccggaagaagcttaaggaggtgtggaaacctgccgtgcggtctggcggatctggcggaggctccacaagcagccaggagctgctgaccttcaaggacatcagcatcgacttcacccaggaggagtggggccagctgacccccgcccaccagaacctgtacagggaggtgatgctggagaactacagcaacctggtgagcgtggccggctaccagctgagcaagcccgtggtgatcagccagctggagaagggcgaggagccctggatgaccgagaaggagggccccggcgaccccagcagcgacctgaagagcaccagccccaagaaaaagagaaaagtctaagctgccttctgcggggcttgccttctggccatgcccttcttctctcccttgcacctgtacctcttggtctttgaataaagcctgagtaggaaggctagcaaaaaaaaaaaaaaaaaaaaaaaaaaaaaaaaaaaaaaaaaaaaaaaaaaaaaaaaaaaaaaaaaaaaaaaaaaaaaaaa

SEQ ID NO: 6116 - RNA, 5797 nt, synthetic construct
  source 1..5797: mol_type = other RNA
aggaaataagagagaaaagaagagtaagaagaaatataagagccaccatggcccctaagaagaagcgtaaagtgagccggatggaacgcctcgtctacgaggtgcggcagaagtgcagaaacatcgaggacatctgcatctcctgcggatctctgaacgtgaccctggagcacccactgttcatcggcggcatgtgccagaactgtaaaaactgttttctggagtgtgcctatcaatacgacgatgacggctaccagagctactgcaccatctgttgcggcggaagagaggtgctgatgtgtggaaataacaactgctgccggtgcttctgcgtggaatgcgtggacctgctggtgggccccggcgccgcccaggccgctattaaggaagatccttggaactgctacatgtgcggccacaagggcacatacggcctgctgagacggagagaggactggcctagcagactgcagatgttcttcgccaataaccacgaccaggagttcgacccccctaaggtgtaccctcccgtccccgccgagaagagaaagcccatccgggtcctgagcctgttcgatggcatcgccaccggtctgctggtgctgaaggacctgggcatccaggtggataggtacattgcctccgaggtgtgcgaggactccatcaccgtgggaatggtgcgtcatcagggcaagatcatgtacgtgggcgacgtgcggagcgtgacacagaagcatatccaggagtggggccctttcgacctggtgatcggcggcagcccttgcaatgacctgagcatcgtgaacccagcccggaagggcctgtacgagggaaccggcagactgttcttcgagttttacagactgctgcacgacgcccggcctaaggaaggcgacgaccggcccttcttttggctgttcgagaatgtggtggccatgggagtcagcgacaagcgggatattagccggttcctggagagcaaccccgtgatgatcgatgccaaggaagtgagcgccgcccaccgggccagatacttctggggcaatctgcctggcatgaacagacccctggccagcaccgtgaacgacaagctggagctgcaggagtgcctggagcacggccggatcgccaagttcagcaaggtgagaaccatcaccacccgaagcaacagcatcaaacaaggcaaggaccagcactttcctgtgttcatgaacgagaaggaggacatcctgtggtgtaccgagatggagagagtgttcgggttcccagtccactacacagatgtcagcaacatgtctagactggccagacagagactgctgggaagaagctggtccgtccctgtgatcagacacctgttcgcccctctgaaggagtacttcgcctgcgtgagcagcggcaacagcaacgccaacagccggggccccagcttctctagcggcctggtgccactgtccctgagagggagccacatgggccccatggagatctacaaaaccgtgagcgcctggaagcggcagcctgtgcgcgtgctgagcctgtttcggaatatcgataaagtcctgaaaagcctgggattcctggagagcggctctggctccggcggtggcaccctgaagtacgtggaggatgtgacaaacgtggtcagacgggatgtggagaagtggggccccttcgatctggtgtacggcagcacccaacccctgggcagctcttgtgaccggtgccctggctggtacatgtttcagttccaccggatcctgcagtacgccctgccgagacaggagtcccagcggccattcttttggattttcatggacaacttgctgctgaccgaggatgaccaggaaactaccactcggttcctgcagaccgaagccgtgaccctgcaggacgtgagaggccgggactaccagaacgccatgcgggtgtggtccaacatccctggactgaaaagcaagcacgcacctctgacccctaaagaagaggagtacctgcaggcccaggtgcggagcagaagcaagctggacgcccctaaggtggatctgctggtgaagaattgcctcctgcccctgagagagtacttcaagtatttcagccagaatagtctgcccctgggcggcccaagcagcggcgcccctcctcccagcggcggcagcccagccggctccccaacctctaccgaggagggcacctctgagtccgccacccccgagagcggccctggcacctccaccgagcccagcgagggcagcgcacccggcagccctgccggcagccccacctccacagaggagggaaccagcaccgagcccagcgaaggcagcgccccaggcaccagcaccgagcctagtgagggcggctctggcggcggcagcgcccaggagattaaacggatcaacaagatcagaagaagacttgtgaaagacagcaacaccaagaaggccggcaagacaggccccatgaaaaccctgctggttagagtgatgacacccgatctgagagagcggctggaaaacctgagaaagaagcctgaaaatatcccccagcccatcagcaatacatctagagccaacctgaataagctgctgaccgattacaccgaaatgaagaaggcgatcctgcatgtgtactgggaagagttccagaaggaccctgtgggcctgatgagccgggtggcccagcctgccagcaagaagatcgatcagaacaagctgaaacctgagatggacgagaagggcaacctgaccaccgccggctttgcctgctctcagtgtggccagcccctgttcgtgtacaagctggagcaggtgtctgagaagggcaaggcttacaccaactacttcggacggtgcaatgtggccgagcacgaaaagctgatcctgctggcccagctgaagcccgagaaggatagcgacgaagccgtgacatatagcctgggaaagtttgggcagagggccctggatttctacagcattcatgtgaccaaggagtccacccaccccgtgaagcccctggcccagatcgccggaaacagatacgcctccggacctgtgggaaaggccctgagcgacgcatgtatgggcacaatcgcctccttcctgtctaagtaccaggacatcatcatcgaacaccagaaggtggtgaagggcaaccagaagagactggagagcctgcgggagctggccggcaaggaaaacctggaataccctagcgtgaccctgccacctcagcctcacaccaaggagggcgttgatgcctacaacgaagtgatcgcccgggtgcgaatgtgggtgaacctgaacctgtggcagaagctgaagctaagcagagatgatgccaagcctctgctgagactgaagggattcccttcctttcctctggtcgagagacaggccaacgaagtggactggtgggacatggtgtgtaacgtgaagaagctgatcaacgagaaaaaggaggatggcaaggtgttttggcagaatctggctggctacaagagacaggaagccctgagaccatacctgagcagcgaggaagatcggaagaagggaaagaaattcgctcggtaccagctgggcgacctgctgctgcacctggaaaagaagcacggcgaggactggggaaaggtgtacgacgaggcctgggagcggattgacaagaaagtggaaggcctgagcaagcacatcaagctggaagaggaacggagaagcgaggacgcccagagcaaggccgccctgaccgactggctgcgggctaaggccagcttcgtgatcgagggcctgaaggaggccgacaaggacgagttctgcagatgcgagctgaagctgcagaagtggtacggggacctgcggggaaagcccttcgccatcgaagccgagaacagcatcctggacatcagcggcttcagcaagcagtacaactgtgccttcatctggcagaaggacggcgtgaagaagctgaacctgtacctgatcatcaactacttcaagggcggcaagctgcggttcaagaagatcaaacctgaagccttcgaagccaacagattctacaccgtgatcaacaaaaagagcggcgagatcgtgcccatggaggtgaacttcaacttcgacgaccccaacctgatcatcctgcctctggcctttggcaagagacagggcagagaattcatctggaacgacctgctgtccctggaaaccggcagcctgaagctggccaacggaagagtgatcgagaagacactgtacaacagaagaacccggcaggatgagcctgccctgttcgtggccctgaccttcgagcggcgggaggtcctggactcctccaatatcaaaccaatgaacctgatcggcgtggcaagaggcgaaaacatccccgccgtgatcgccctgaccgaccccgagggctgcccactgagccggtttaaggatagcctgggaaacccaacccacatcctgagaatcggcgagagctataaggagaagcagcggaccatccaggccaagaaggaggtggagcagcggagagccggcggctacagccggaagtacgccagcaaagccaagaatctggcagacgatatggtgagaaacaccgctagagatctgctgtactacgccgtgacccaggatgccatgctgatcttcgccaacctgagccggggcttcggccggcagggcaagcggaccttcatggccgagagacagtacacacggatggaggactggctgaccgccaagctggcctacgagggcctgagcaagacctacctgtccaagacactggcccagtacacctccaagacatgcagcaactgtgggtttaccatcaccagcgccgactacgacagggtgctggagaagctgaagaagacagcaacaggctggatgaccacaattaacggcaaggagctgaaggtggagggccagattacctactacaacagatacaagagacagaacgtagtcaaggacctgtccgtcgagctggatagactgagcgaagaatctgtgaacaacgacatctcctcctggacaaagggcagaagcggagaagctctgagcctcctgaagaaaagattctcccatagacccgtgcaggagaagttcgtgtgcctgaactgcggcttcgagacacacgcagccgagcaagccgccctgaacatcgccagatcctggctgttcctgcggagccaggagtacaagaaataccagacaaacaagacaaccggcaacaccgataagagagccttcgtcgagacctggcagtccttttaccggaagaagcttaaggaggtgtggaaacctgccgtgcggtctggcggatctggcggaggctccacaagcgaggagctgcccgtggtgttcgaggacgtggccgtgtacttcaccagggaggagtgggccatgctggacaagaggcagaaggagctgtacagggacgtgatgaggatgaactacgagctgctggccagcctgggccccgccgcccccaagcccgacctgatcctgaagctggagaggagggccgccccctggatcaaggaccccaacggccccaagtggggcaagggcaggccccccggcaagaccagccccaagaaaaagagaaaagtctaagctgccttctgcggggcttgccttctggccatgcccttcttctctcccttgcacctgtacctcttggtctttgaataaagcctgagtaggaaggctagcaaaaaaaaaaaaaaaaaaaaaaaaaaaaaaaaaaaaaaaaaaaaaaaaaaaaaaaaaaaaaaaaaaaaaaaaaaaaaaaa

SEQ ID NO: 6117 - RNA, 5797 nt, synthetic construct
  source 1..5797: mol_type = other RNA
aggaaataagagagaaaagaagagtaagaagaaatataagagccaccatggcccctaagaagaagcgtaaagtgagccggatggaacgcctcgtctacgaggtgcggcagaagtgcagaaacatcgaggacatctgcatctcctgcggatctctgaacgtgaccctggagcacccactgttcatcggcggcatgtgccagaactgtaaaaactgttttctggagtgtgcctatcaatacgacgatgacggctaccagagctactgcaccatctgttgcggcggaagagaggtgctgatgtgtggaaataacaactgctgccggtgcttctgcgtggaatgcgtggacctgctggtgggccccggcgccgcccaggccgctattaaggaagatccttggaactgctacatgtgcggccacaagggcacatacggcctgctgagacggagagaggactggcctagcagactgcagatgttcttcgccaataaccacgaccaggagttcgacccccctaaggtgtaccctcccgtccccgccgagaagagaaagcccatccgggtcctgagcctgttcgatggcatcgccaccggtctgctggtgctgaaggacctgggcatccaggtggataggtacattgcctccgaggtgtgcgaggactccatcaccgtgggaatggtgcgtcatcagggcaagatcatgtacgtgggcgacgtgcggagcgtgacacagaagcatatccaggagtggggccctttcgacctggtgatcggcggcagcccttgcaatgacctgagcatcgtgaacccagcccggaagggcctgtacgagggaaccggcagactgttcttcgagttttacagactgctgcacgacgcccggcctaaggaaggcgacgaccggcccttcttttggctgttcgagaatgtggtggccatgggagtcagcgacaagcgggatattagccggttcctggagagcaaccccgtgatgatcgatgccaaggaagtgagcgccgcccaccgggccagatacttctggggcaatctgcctggcatgaacagacccctggccagcaccgtgaacgacaagctggagctgcaggagtgcctggagcacggccggatcgccaagttcagcaaggtgagaaccatcaccacccgaagcaacagcatcaaacaaggcaaggaccagcactttcctgtgttcatgaacgagaaggaggacatcctgtggtgtaccgagatggagagagtgttcgggttcccagtccactacacagatgtcagcaacatgtctagactggccagacagagactgctgggaagaagctggtccgtccctgtgatcagacacctgttcgcccctctgaaggagtacttcgcctgcgtgagcagcggcaacagcaacgccaacagccggggccccagcttctctagcggcctggtgccactgtccctgagagggagccacatgggccccatggagatctacaaaaccgtgagcgcctggaagcggcagcctgtgcgcgtgctgagcctgtttcggaatatcgataaagtcctgaaaagcctgggattcctggagagcggctctggctccggcggtggcaccctgaagtacgtggaggatgtgacaaacgtggtcagacgggatgtggagaagtggggccccttcgatctggtgtacggcagcacccaacccctgggcagctcttgtgaccggtgccctggctggtacatgtttcagttccaccggatcctgcagtacgccctgccgagacaggagtcccagcggccattcttttggattttcatggacaacttgctgctgaccgaggatgaccaggaaactaccactcggttcctgcagaccgaagccgtgaccctgcaggacgtgagaggccgggactaccagaacgccatgcgggtgtggtccaacatccctggactgaaaagcaagcacgcacctctgacccctaaagaagaggagtacctgcaggcccaggtgcggagcagaagcaagctggacgcccctaaggtggatctgctggtgaagaattgcctcctgcccctgagagagtacttcaagtatttcagccagaatagtctgcccctgggcggcccaagcagcggcgcccctcctcccagcggcggcagcccagccggctccccaacctctaccgaggagggcacctctgagtccgccacccccgagagcggccctggcacctccaccgagcccagcgagggcagcgcacccggcagccctgccggcagccccacctccacagaggagggaaccagcaccgagcccagcgaaggcagcgccccaggcaccagcaccgagcctagtgagggcggctctggcggcggcagcgcccaggagattaaacggatcaacaagatcagaagaagacttgtgaaagacagcaacaccaagaaggccggcaagacaggccccatgaaaaccctgctggttagagtgatgacacccgatctgagagagcggctggaaaacctgagaaagaagcctgaaaatatcccccagcccatcagcaatacatctagagccaacctgaataagctgctgaccgattacaccgaaatgaagaaggcgatcctgcatgtgtactgggaagagttccagaaggaccctgtgggcctgatgagccgggtggcccagcctgccagcaagaagatcgatcagaacaagctgaaacctgagatggacgagaagggcaacctgaccaccgccggctttgcctgctctcagtgtggccagcccctgttcgtgtacaagctggagcaggtgtctgagaagggcaaggcttacaccaactacttcggacggtgcaatgtggccgagcacgaaaagctgatcctgctggcccagctgaagcccgagaaggatagcgacgaagccgtgacatatagcctgggaaagtttgggcagagggccctggatttctacagcattcatgtgaccaaggagtccacccaccccgtgaagcccctggcccagatcgccggaaacagatacgcctccggacctgtgggaaaggccctgagcgacgcatgtatgggcacaatcgcctccttcctgtctaagtaccaggacatcatcatcgaacaccagaaggtggtgaagggcaaccagaagagactggagagcctgcgggagctggccggcaaggaaaacctggaataccctagcgtgaccctgccacctcagcctcacaccaaggagggcgttgatgcctacaacgaagtgatcgcccgggtgcgaatgtgggtgaacctgaacctgtggcagaagctgaagctaagcagagatgatgccaagcctctgctgagactgaagggattcccttcctttcctctggtcgagagacaggccaacgaagtggactggtgggacatggtgtgtaacgtgaagaagctgatcaacgagaaaaaggaggatggcaaggtgttttggcagaatctggctggctacaagagacaggaagccctgagaccatacctgagcagcgaggaagatcggaagaagggaaagaaattcgctcggtaccagctgggcgacctgctgctgcacctggaaaagaagcacggcgaggactggggaaaggtgtacgacgaggcctgggagcggattgacaagaaagtggaaggcctgagcaagcacatcaagctggaagaggaacggagaagcgaggacgcccagagcaaggccgccctgaccgactggctgcgggctaaggccagcttcgtgatcgagggcctgaaggaggccgacaaggacgagttctgcagatgcgagctgaagctgcagaagtggtacggggacctgcggggaaagcccttcgccatcgaagccgagaacagcatcctggacatcagcggcttcagcaagcagtacaactgtgccttcatctggcagaaggacggcgtgaagaagctgaacctgtacctgatcatcaactacttcaagggcggcaagctgcggttcaagaagatcaaacctgaagccttcgaagccaacagattctacaccgtgatcaacaaaaagagcggcgagatcgtgcccatggaggtgaacttcaacttcgacgaccccaacctgatcatcctgcctctggcctttggcaagagacagggcagagaattcatctggaacgacctgctgtccctggaaaccggcagcctgaagctggccaacggaagagtgatcgagaagacactgtacaacagaagaacccggcaggatgagcctgccctgttcgtggccctgaccttcgagcggcgggaggtcctggactcctccaatatcaaaccaatgaacctgatcggcgtggcaagaggcgaaaacatccccgccgtgatcgccctgaccgaccccgagggctgcccactgagccggtttaaggatagcctgggaaacccaacccacatcctgagaatcggcgagagctataaggagaagcagcggaccatccaggccaagaaggaggtggagcagcggagagccggcggctacagccggaagtacgccagcaaagccaagaatctggcagacgatatggtgagaaacaccgctagagatctgctgtactacgccgtgacccaggatgccatgctgatcttcgccaacctgagccggggcttcggccggcagggcaagcggaccttcatggccgagagacagtacacacggatggaggactggctgaccgccaagctggcctacgagggcctgagcaagacctacctgtccaagacactggcccagtacacctccaagacatgcagcaactgtgggtttaccatcaccagcgccgactacgacagggtgctggagaagctgaagaagacagcaacaggctggatgaccacaattaacggcaaggagctgaaggtggagggccagattacctactacaacagatacaagagacagaacgtagtcaaggacctgtccgtcgagctggatagactgagcgaagaatctgtgaacaacgacatctcctcctggacaaagggcagaagcggagaagctctgagcctcctgaagaaaagattctcccatagacccgtgcaggagaagttcgtgtgcctgaactgcggcttcgagacacacgcagccgagcaagccgccctgaacatcgccagatcctggctgttcctgcggagccaggagtacaagaaataccagacaaacaagacaaccggcaacaccgataagagagccttcgtcgagacctggcagtccttttaccggaagaagcttaaggaggtgtggaaacctgccgtgcggtctggcggatctggcggaggctccacaagcttccaggaggccgtgaccttcaaggacgtggccgtggccttcaccgaggaggagctgggcatgctggacagcgcccagaagaagctgtacagggacgtgatgctggagaacttcaggaacctggtgagcgtgggccaccagagcttcaagcccgacatgatcagccagctggagagggaggagaagctgtggatgaaggagctgcagacccagaggggcaagcacagcggcgagtactgcgccaccagccccaagaaaaagagaaaagtctaagctgccttctgcggggcttgccttctggccatgcccttcttctctcccttgcacctgtacctcttggtctttgaataaagcctgagtaggaaggctagcaaaaaaaaaaaaaaaaaaaaaaaaaaaaaaaaaaaaaaaaaaaaaaaaaaaaaaaaaaaaaaaaaaaaaaaaaaaaaaaa

SEQ ID NO: 6118 - RNA, 5797 nt, synthetic construct
  source 1..5797: mol_type = other RNA
aggaaataagagagaaaagaagagtaagaagaaatataagagccaccatggcccctaagaagaagcgtaaagtgagccggatggaacgcctcgtctacgaggtgcggcagaagtgcagaaacatcgaggacatctgcatctcctgcggatctctgaacgtgaccctggagcacccactgttcatcggcggcatgtgccagaactgtaaaaactgttttctggagtgtgcctatcaatacgacgatgacggctaccagagctactgcaccatctgttgcggcggaagagaggtgctgatgtgtggaaataacaactgctgccggtgcttctgcgtggaatgcgtggacctgctggtgggccccggcgccgcccaggccgctattaaggaagatccttggaactgctacatgtgcggccacaagggcacatacggcctgctgagacggagagaggactggcctagcagactgcagatgttcttcgccaataaccacgaccaggagttcgacccccctaaggtgtaccctcccgtccccgccgagaagagaaagcccatccgggtcctgagcctgttcgatggcatcgccaccggtctgctggtgctgaaggacctgggcatccaggtggataggtacattgcctccgaggtgtgcgaggactccatcaccgtgggaatggtgcgtcatcagggcaagatcatgtacgtgggcgacgtgcggagcgtgacacagaagcatatccaggagtggggccctttcgacctggtgatcggcggcagcccttgcaatgacctgagcatcgtgaacccagcccggaagggcctgtacgagggaaccggcagactgttcttcgagttttacagactgctgcacgacgcccggcctaaggaaggcgacgaccggcccttcttttggctgttcgagaatgtggtggccatgggagtcagcgacaagcgggatattagccggttcctggagagcaaccccgtgatgatcgatgccaaggaagtgagcgccgcccaccgggccagatacttctggggcaatctgcctggcatgaacagacccctggccagcaccgtgaacgacaagctggagctgcaggagtgcctggagcacggccggatcgccaagttcagcaaggtgagaaccatcaccacccgaagcaacagcatcaaacaaggcaaggaccagcactttcctgtgttcatgaacgagaaggaggacatcctgtggtgtaccgagatggagagagtgttcgggttcccagtccactacacagatgtcagcaacatgtctagactggccagacagagactgctgggaagaagctggtccgtccctgtgatcagacacctgttcgcccctctgaaggagtacttcgcctgcgtgagcagcggcaacagcaacgccaacagccggggccccagcttctctagcggcctggtgccactgtccctgagagggagccacatgggccccatggagatctacaaaaccgtgagcgcctggaagcggcagcctgtgcgcgtgctgagcctgtttcggaatatcgataaagtcctgaaaagcctgggattcctggagagcggctctggctccggcggtggcaccctgaagtacgtggaggatgtgacaaacgtggtcagacgggatgtggagaagtggggccccttcgatctggtgtacggcagcacccaacccctgggcagctcttgtgaccggtgccctggctggtacatgtttcagttccaccggatcctgcagtacgccctgccgagacaggagtcccagcggccattcttttggattttcatggacaacttgctgctgaccgaggatgaccaggaaactaccactcggttcctgcagaccgaagccgtgaccctgcaggacgtgagaggccgggactaccagaacgccatgcgggtgtggtccaacatccctggactgaaaagcaagcacgcacctctgacccctaaagaagaggagtacctgcaggcccaggtgcggagcagaagcaagctggacgcccctaaggtggatctgctggtgaagaattgcctcctgcccctgagagagtacttcaagtatttcagccagaatagtctgcccctgggcggcccaagcagcggcgcccctcctcccagcggcggcagcccagccggctccccaacctctaccgaggagggcacctctgagtccgccacccccgagagcggccctggcacctccaccgagcccagcgagggcagcgcacccggcagccctgccggcagccccacctccacagaggagggaaccagcaccgagcccagcgaaggcagcgccccaggcaccagcaccgagcctagtgagggcggctctggcggcggcagcgcccaggagattaaacggatcaacaagatcagaagaagacttgtgaaagacagcaacaccaagaaggccggcaagacaggccccatgaaaaccctgctggttagagtgatgacacccgatctgagagagcggctggaaaacctgagaaagaagcctgaaaatatcccccagcccatcagcaatacatctagagccaacctgaataagctgctgaccgattacaccgaaatgaagaaggcgatcctgcatgtgtactgggaagagttccagaaggaccctgtgggcctgatgagccgggtggcccagcctgccagcaagaagatcgatcagaacaagctgaaacctgagatggacgagaagggcaacctgaccaccgccggctttgcctgctctcagtgtggccagcccctgttcgtgtacaagctggagcaggtgtctgagaagggcaaggcttacaccaactacttcggacggtgcaatgtggccgagcacgaaaagctgatcctgctggcccagctgaagcccgagaaggatagcgacgaagccgtgacatatagcctgggaaagtttgggcagagggccctggatttctacagcattcatgtgaccaaggagtccacccaccccgtgaagcccctggcccagatcgccggaaacagatacgcctccggacctgtgggaaaggccctgagcgacgcatgtatgggcacaatcgcctccttcctgtctaagtaccaggacatcatcatcgaacaccagaaggtggtgaagggcaaccagaagagactggagagcctgcgggagctggccggcaaggaaaacctggaataccctagcgtgaccctgccacctcagcctcacaccaaggagggcgttgatgcctacaacgaagtgatcgcccgggtgcgaatgtgggtgaacctgaacctgtggcagaagctgaagctaagcagagatgatgccaagcctctgctgagactgaagggattcccttcctttcctctggtcgagagacaggccaacgaagtggactggtgggacatggtgtgtaacgtgaagaagctgatcaacgagaaaaaggaggatggcaaggtgttttggcagaatctggctggctacaagagacaggaagccctgagaccatacctgagcagcgaggaagatcggaagaagggaaagaaattcgctcggtaccagctgggcgacctgctgctgcacctggaaaagaagcacggcgaggactggggaaaggtgtacgacgaggcctgggagcggattgacaagaaagtggaaggcctgagcaagcacatcaagctggaagaggaacggagaagcgaggacgcccagagcaaggccgccctgaccgactggctgcgggctaaggccagcttcgtgatcgagggcctgaaggaggccgacaaggacgagttctgcagatgcgagctgaagctgcagaagtggtacggggacctgcggggaaagcccttcgccatcgaagccgagaacagcatcctggacatcagcggcttcagcaagcagtacaactgtgccttcatctggcagaaggacggcgtgaagaagctgaacctgtacctgatcatcaactacttcaagggcggcaagctgcggttcaagaagatcaaacctgaagccttcgaagccaacagattctacaccgtgatcaacaaaaagagcggcgagatcgtgcccatggaggtgaacttcaacttcgacgaccccaacctgatcatcctgcctctggcctttggcaagagacagggcagagaattcatctggaacgacctgctgtccctggaaaccggcagcctgaagctggccaacggaagagtgatcgagaagacactgtacaacagaagaacccggcaggatgagcctgccctgttcgtggccctgaccttcgagcggcgggaggtcctggactcctccaatatcaaaccaatgaacctgatcggcgtggcaagaggcgaaaacatccccgccgtgatcgccctgaccgaccccgagggctgcccactgagccggtttaaggatagcctgggaaacccaacccacatcctgagaatcggcgagagctataaggagaagcagcggaccatccaggccaagaaggaggtggagcagcggagagccggcggctacagccggaagtacgccagcaaagccaagaatctggcagacgatatggtgagaaacaccgctagagatctgctgtactacgccgtgacccaggatgccatgctgatcttcgccaacctgagccggggcttcggccggcagggcaagcggaccttcatggccgagagacagtacacacggatggaggactggctgaccgccaagctggcctacgagggcctgagcaagacctacctgtccaagacactggcccagtacacctccaagacatgcagcaactgtgggtttaccatcaccagcgccgactacgacagggtgctggagaagctgaagaagacagcaacaggctggatgaccacaattaacggcaaggagctgaaggtggagggccagattacctactacaacagatacaagagacagaacgtagtcaaggacctgtccgtcgagctggatagactgagcgaagaatctgtgaacaacgacatctcctcctggacaaagggcagaagcggagaagctctgagcctcctgaagaaaagattctcccatagacccgtgcaggagaagttcgtgtgcctgaactgcggcttcgagacacacgcagccgagcaagccgccctgaacatcgccagatcctggctgttcctgcggagccaggagtacaagaaataccagacaaacaagacaaccggcaacaccgataagagagccttcgtcgagacctggcagtccttttaccggaagaagcttaaggaggtgtggaaacctgccgtgcggtctggcggatctggcggaggctccacaagcatgggccagctgaccttcaacgacgtgaccatcgagttcagcctggaggagtggcagtgcctggacaagccccagcagaacctgtacagggaggtgatgctggagaactacaggaacctggtgttcctgggcatcgccgtgagcaagcccgacctgatcacctgcctgaagcagggcaaggagccctggaacatcaggaggcacgagatggtgaccaagccccccgccatgtgcagccacttcaccagccccaagaaaaagagaaaagtctaagctgccttctgcggggcttgccttctggccatgcccttcttctctcccttgcacctgtacctcttggtctttgaataaagcctgagtaggaaggctagcaaaaaaaaaaaaaaaaaaaaaaaaaaaaaaaaaaaaaaaaaaaaaaaaaaaaaaaaaaaaaaaaaaaaaaaaaaaaaaaa

SEQ ID NO: 6119 - RNA, 5797 nt, synthetic construct
  source 1..5797: mol_type = other RNA
aggaaataagagagaaaagaagagtaagaagaaatataagagccaccatggcccctaagaagaagcgtaaagtgagccggatggaacgcctcgtctacgaggtgcggcagaagtgcagaaacatcgaggacatctgcatctcctgcggatctctgaacgtgaccctggagcacccactgttcatcggcggcatgtgccagaactgtaaaaactgttttctggagtgtgcctatcaatacgacgatgacggctaccagagctactgcaccatctgttgcggcggaagagaggtgctgatgtgtggaaataacaactgctgccggtgcttctgcgtggaatgcgtggacctgctggtgggccccggcgccgcccaggccgctattaaggaagatccttggaactgctacatgtgcggccacaagggcacatacggcctgctgagacggagagaggactggcctagcagactgcagatgttcttcgccaataaccacgaccaggagttcgacccccctaaggtgtaccctcccgtccccgccgagaagagaaagcccatccgggtcctgagcctgttcgatggcatcgccaccggtctgctggtgctgaaggacctgggcatccaggtggataggtacattgcctccgaggtgtgcgaggactccatcaccgtgggaatggtgcgtcatcagggcaagatcatgtacgtgggcgacgtgcggagcgtgacacagaagcatatccaggagtggggccctttcgacctggtgatcggcggcagcccttgcaatgacctgagcatcgtgaacccagcccggaagggcctgtacgagggaaccggcagactgttcttcgagttttacagactgctgcacgacgcccggcctaaggaaggcgacgaccggcccttcttttggctgttcgagaatgtggtggccatgggagtcagcgacaagcgggatattagccggttcctggagagcaaccccgtgatgatcgatgccaaggaagtgagcgccgcccaccgggccagatacttctggggcaatctgcctggcatgaacagacccctggccagcaccgtgaacgacaagctggagctgcaggagtgcctggagcacggccggatcgccaagttcagcaaggtgagaaccatcaccacccgaagcaacagcatcaaacaaggcaaggaccagcactttcctgtgttcatgaacgagaaggaggacatcctgtggtgtaccgagatggagagagtgttcgggttcccagtccactacacagatgtcagcaacatgtctagactggccagacagagactgctgggaagaagctggtccgtccctgtgatcagacacctgttcgcccctctgaaggagtacttcgcctgcgtgagcagcggcaacagcaacgccaacagccggggccccagcttctctagcggcctggtgccactgtccctgagagggagccacatgggccccatggagatctacaaaaccgtgagcgcctggaagcggcagcctgtgcgcgtgctgagcctgtttcggaatatcgataaagtcctgaaaagcctgggattcctggagagcggctctggctccggcggtggcaccctgaagtacgtggaggatgtgacaaacgtggtcagacgggatgtggagaagtggggccccttcgatctggtgtacggcagcacccaacccctgggcagctcttgtgaccggtgccctggctggtacatgtttcagttccaccggatcctgcagtacgccctgccgagacaggagtcccagcggccattcttttggattttcatggacaacttgctgctgaccgaggatgaccaggaaactaccactcggttcctgcagaccgaagccgtgaccctgcaggacgtgagaggccgggactaccagaacgccatgcgggtgtggtccaacatccctggactgaaaagcaagcacgcacctctgacccctaaagaagaggagtacctgcaggcccaggtgcggagcagaagcaagctggacgcccctaaggtggatctgctggtgaagaattgcctcctgcccctgagagagtacttcaagtatttcagccagaatagtctgcccctgggcggcccaagcagcggcgcccctcctcccagcggcggcagcccagccggctccccaacctctaccgaggagggcacctctgagtccgccacccccgagagcggccctggcacctccaccgagcccagcgagggcagcgcacccggcagccctgccggcagccccacctccacagaggagggaaccagcaccgagcccagcgaaggcagcgccccaggcaccagcaccgagcctagtgagggcggctctggcggcggcagcgcccaggagattaaacggatcaacaagatcagaagaagacttgtgaaagacagcaacaccaagaaggccggcaagacaggccccatgaaaaccctgctggttagagtgatgacacccgatctgagagagcggctggaaaacctgagaaagaagcctgaaaatatcccccagcccatcagcaatacatctagagccaacctgaataagctgctgaccgattacaccgaaatgaagaaggcgatcctgcatgtgtactgggaagagttccagaaggaccctgtgggcctgatgagccgggtggcccagcctgccagcaagaagatcgatcagaacaagctgaaacctgagatggacgagaagggcaacctgaccaccgccggctttgcctgctctcagtgtggccagcccctgttcgtgtacaagctggagcaggtgtctgagaagggcaaggcttacaccaactacttcggacggtgcaatgtggccgagcacgaaaagctgatcctgctggcccagctgaagcccgagaaggatagcgacgaagccgtgacatatagcctgggaaagtttgggcagagggccctggatttctacagcattcatgtgaccaaggagtccacccaccccgtgaagcccctggcccagatcgccggaaacagatacgcctccggacctgtgggaaaggccctgagcgacgcatgtatgggcacaatcgcctccttcctgtctaagtaccaggacatcatcatcgaacaccagaaggtggtgaagggcaaccagaagagactggagagcctgcgggagctggccggcaaggaaaacctggaataccctagcgtgaccctgccacctcagcctcacaccaaggagggcgttgatgcctacaacgaagtgatcgcccgggtgcgaatgtgggtgaacctgaacctgtggcagaagctgaagctaagcagagatgatgccaagcctctgctgagactgaagggattcccttcctttcctctggtcgagagacaggccaacgaagtggactggtgggacatggtgtgtaacgtgaagaagctgatcaacgagaaaaaggaggatggcaaggtgttttggcagaatctggctggctacaagagacaggaagccctgagaccatacctgagcagcgaggaagatcggaagaagggaaagaaattcgctcggtaccagctgggcgacctgctgctgcacctggaaaagaagcacggcgaggactggggaaaggtgtacgacgaggcctgggagcggattgacaagaaagtggaaggcctgagcaagcacatcaagctggaagaggaacggagaagcgaggacgcccagagcaaggccgccctgaccgactggctgcgggctaaggccagcttcgtgatcgagggcctgaaggaggccgacaaggacgagttctgcagatgcgagctgaagctgcagaagtggtacggggacctgcggggaaagcccttcgccatcgaagccgagaacagcatcctggacatcagcggcttcagcaagcagtacaactgtgccttcatctggcagaaggacggcgtgaagaagctgaacctgtacctgatcatcaactacttcaagggcggcaagctgcggttcaagaagatcaaacctgaagccttcgaagccaacagattctacaccgtgatcaacaaaaagagcggcgagatcgtgcccatggaggtgaacttcaacttcgacgaccccaacctgatcatcctgcctctggcctttggcaagagacagggcagagaattcatctggaacgacctgctgtccctggaaaccggcagcctgaagctggccaacggaagagtgatcgagaagacactgtacaacagaagaacccggcaggatgagcctgccctgttcgtggccctgaccttcgagcggcgggaggtcctggactcctccaatatcaaaccaatgaacctgatcggcgtggcaagaggcgaaaacatccccgccgtgatcgccctgaccgaccccgagggctgcccactgagccggtttaaggatagcctgggaaacccaacccacatcctgagaatcggcgagagctataaggagaagcagcggaccatccaggccaagaaggaggtggagcagcggagagccggcggctacagccggaagtacgccagcaaagccaagaatctggcagacgatatggtgagaaacaccgctagagatctgctgtactacgccgtgacccaggatgccatgctgatcttcgccaacctgagccggggcttcggccggcagggcaagcggaccttcatggccgagagacagtacacacggatggaggactggctgaccgccaagctggcctacgagggcctgagcaagacctacctgtccaagacactggcccagtacacctccaagacatgcagcaactgtgggtttaccatcaccagcgccgactacgacagggtgctggagaagctgaagaagacagcaacaggctggatgaccacaattaacggcaaggagctgaaggtggagggccagattacctactacaacagatacaagagacagaacgtagtcaaggacctgtccgtcgagctggatagactgagcgaagaatctgtgaacaacgacatctcctcctggacaaagggcagaagcggagaagctctgagcctcctgaagaaaagattctcccatagacccgtgcaggagaagttcgtgtgcctgaactgcggcttcgagacacacgcagccgagcaagccgccctgaacatcgccagatcctggctgttcctgcggagccaggagtacaagaaataccagacaaacaagacaaccggcaacaccgataagagagccttcgtcgagacctggcagtccttttaccggaagaagcttaaggaggtgtggaaacctgccgtgcggtctggcggatctggcggaggctccacaagcatgcccctgaaggccaggtaccaggagatggtgaccttcgaggacgtggccgtgcacttcaccaagaccgagtggaccggcctgagccccgcccagagggccctgtacaggagcgtgatgctggagaacttcggcaacctgaccgccctgggctaccccgtgcccaagcccgccctgatcagcctgctggagggcggcgacatggcctggggcctggaggcccaggacgacccccccgccgagaccagccccaagaaaaagagaaaagtctaagctgccttctgcggggcttgccttctggccatgcccttcttctctcccttgcacctgtacctcttggtctttgaataaagcctgagtaggaaggctagcaaaaaaaaaaaaaaaaaaaaaaaaaaaaaaaaaaaaaaaaaaaaaaaaaaaaaaaaaaaaaaaaaaaaaaaaaaaaaaaa

SEQ ID NO: 6120 - RNA, 5797 nt, synthetic construct
  source 1..5797: mol_type = other RNA
aggaaataagagagaaaagaagagtaagaagaaatataagagccaccatggcccctaagaagaagcgtaaagtgagccggatggaacgcctcgtctacgaggtgcggcagaagtgcagaaacatcgaggacatctgcatctcctgcggatctctgaacgtgaccctggagcacccactgttcatcggcggcatgtgccagaactgtaaaaactgttttctggagtgtgcctatcaatacgacgatgacggctaccagagctactgcaccatctgttgcggcggaagagaggtgctgatgtgtggaaataacaactgctgccggtgcttctgcgtggaatgcgtggacctgctggtgggccccggcgccgcccaggccgctattaaggaagatccttggaactgctacatgtgcggccacaagggcacatacggcctgctgagacggagagaggactggcctagcagactgcagatgttcttcgccaataaccacgaccaggagttcgacccccctaaggtgtaccctcccgtccccgccgagaagagaaagcccatccgggtcctgagcctgttcgatggcatcgccaccggtctgctggtgctgaaggacctgggcatccaggtggataggtacattgcctccgaggtgtgcgaggactccatcaccgtgggaatggtgcgtcatcagggcaagatcatgtacgtgggcgacgtgcggagcgtgacacagaagcatatccaggagtggggccctttcgacctggtgatcggcggcagcccttgcaatgacctgagcatcgtgaacccagcccggaagggcctgtacgagggaaccggcagactgttcttcgagttttacagactgctgcacgacgcccggcctaaggaaggcgacgaccggcccttcttttggctgttcgagaatgtggtggccatgggagtcagcgacaagcgggatattagccggttcctggagagcaaccccgtgatgatcgatgccaaggaagtgagcgccgcccaccgggccagatacttctggggcaatctgcctggcatgaacagacccctggccagcaccgtgaacgacaagctggagctgcaggagtgcctggagcacggccggatcgccaagttcagcaaggtgagaaccatcaccacccgaagcaacagcatcaaacaaggcaaggaccagcactttcctgtgttcatgaacgagaaggaggacatcctgtggtgtaccgagatggagagagtgttcgggttcccagtccactacacagatgtcagcaacatgtctagactggccagacagagactgctgggaagaagctggtccgtccctgtgatcagacacctgttcgcccctctgaaggagtacttcgcctgcgtgagcagcggcaacagcaacgccaacagccggggccccagcttctctagcggcctggtgccactgtccctgagagggagccacatgggccccatggagatctacaaaaccgtgagcgcctggaagcggcagcctgtgcgcgtgctgagcctgtttcggaatatcgataaagtcctgaaaagcctgggattcctggagagcggctctggctccggcggtggcaccctgaagtacgtggaggatgtgacaaacgtggtcagacgggatgtggagaagtggggccccttcgatctggtgtacggcagcacccaacccctgggcagctcttgtgaccggtgccctggctggtacatgtttcagttccaccggatcctgcagtacgccctgccgagacaggagtcccagcggccattcttttggattttcatggacaacttgctgctgaccgaggatgaccaggaaactaccactcggttcctgcagaccgaagccgtgaccctgcaggacgtgagaggccgggactaccagaacgccatgcgggtgtggtccaacatccctggactgaaaagcaagcacgcacctctgacccctaaagaagaggagtacctgcaggcccaggtgcggagcagaagcaagctggacgcccctaaggtggatctgctggtgaagaattgcctcctgcccctgagagagtacttcaagtatttcagccagaatagtctgcccctgggcggcccaagcagcggcgcccctcctcccagcggcggcagcccagccggctccccaacctctaccgaggagggcacctctgagtccgccacccccgagagcggccctggcacctccaccgagcccagcgagggcagcgcacccggcagccctgccggcagccccacctccacagaggagggaaccagcaccgagcccagcgaaggcagcgccccaggcaccagcaccgagcctagtgagggcggctctggcggcggcagcgcccaggagattaaacggatcaacaagatcagaagaagacttgtgaaagacagcaacaccaagaaggccggcaagacaggccccatgaaaaccctgctggttagagtgatgacacccgatctgagagagcggctggaaaacctgagaaagaagcctgaaaatatcccccagcccatcagcaatacatctagagccaacctgaataagctgctgaccgattacaccgaaatgaagaaggcgatcctgcatgtgtactgggaagagttccagaaggaccctgtgggcctgatgagccgggtggcccagcctgccagcaagaagatcgatcagaacaagctgaaacctgagatggacgagaagggcaacctgaccaccgccggctttgcctgctctcagtgtggccagcccctgttcgtgtacaagctggagcaggtgtctgagaagggcaaggcttacaccaactacttcggacggtgcaatgtggccgagcacgaaaagctgatcctgctggcccagctgaagcccgagaaggatagcgacgaagccgtgacatatagcctgggaaagtttgggcagagggccctggatttctacagcattcatgtgaccaaggagtccacccaccccgtgaagcccctggcccagatcgccggaaacagatacgcctccggacctgtgggaaaggccctgagcgacgcatgtatgggcacaatcgcctccttcctgtctaagtaccaggacatcatcatcgaacaccagaaggtggtgaagggcaaccagaagagactggagagcctgcgggagctggccggcaaggaaaacctggaataccctagcgtgaccctgccacctcagcctcacaccaaggagggcgttgatgcctacaacgaagtgatcgcccgggtgcgaatgtgggtgaacctgaacctgtggcagaagctgaagctaagcagagatgatgccaagcctctgctgagactgaagggattcccttcctttcctctggtcgagagacaggccaacgaagtggactggtgggacatggtgtgtaacgtgaagaagctgatcaacgagaaaaaggaggatggcaaggtgttttggcagaatctggctggctacaagagacaggaagccctgagaccatacctgagcagcgaggaagatcggaagaagggaaagaaattcgctcggtaccagctgggcgacctgctgctgcacctggaaaagaagcacggcgaggactggggaaaggtgtacgacgaggcctgggagcggattgacaagaaagtggaaggcctgagcaagcacatcaagctggaagaggaacggagaagcgaggacgcccagagcaaggccgccctgaccgactggctgcgggctaaggccagcttcgtgatcgagggcctgaaggaggccgacaaggacgagttctgcagatgcgagctgaagctgcagaagtggtacggggacctgcggggaaagcccttcgccatcgaagccgagaacagcatcctggacatcagcggcttcagcaagcagtacaactgtgccttcatctggcagaaggacggcgtgaagaagctgaacctgtacctgatcatcaactacttcaagggcggcaagctgcggttcaagaagatcaaacctgaagccttcgaagccaacagattctacaccgtgatcaacaaaaagagcggcgagatcgtgcccatggaggtgaacttcaacttcgacgaccccaacctgatcatcctgcctctggcctttggcaagagacagggcagagaattcatctggaacgacctgctgtccctggaaaccggcagcctgaagctggccaacggaagagtgatcgagaagacactgtacaacagaagaacccggcaggatgagcctgccctgttcgtggccctgaccttcgagcggcgggaggtcctggactcctccaatatcaaaccaatgaacctgatcggcgtggcaagaggcgaaaacatccccgccgtgatcgccctgaccgaccccgagggctgcccactgagccggtttaaggatagcctgggaaacccaacccacatcctgagaatcggcgagagctataaggagaagcagcggaccatccaggccaagaaggaggtggagcagcggagagccggcggctacagccggaagtacgccagcaaagccaagaatctggcagacgatatggtgagaaacaccgctagagatctgctgtactacgccgtgacccaggatgccatgctgatcttcgccaacctgagccggggcttcggccggcagggcaagcggaccttcatggccgagagacagtacacacggatggaggactggctgaccgccaagctggcctacgagggcctgagcaagacctacctgtccaagacactggcccagtacacctccaagacatgcagcaactgtgggtttaccatcaccagcgccgactacgacagggtgctggagaagctgaagaagacagcaacaggctggatgaccacaattaacggcaaggagctgaaggtggagggccagattacctactacaacagatacaagagacagaacgtagtcaaggacctgtccgtcgagctggatagactgagcgaagaatctgtgaacaacgacatctcctcctggacaaagggcagaagcggagaagctctgagcctcctgaagaaaagattctcccatagacccgtgcaggagaagttcgtgtgcctgaactgcggcttcgagacacacgcagccgagcaagccgccctgaacatcgccagatcctggctgttcctgcggagccaggagtacaagaaataccagacaaacaagacaaccggcaacaccgataagagagccttcgtcgagacctggcagtccttttaccggaagaagcttaaggaggtgtggaaacctgccgtgcggtctggcggatctggcggaggctccacaagcttccaggagagcgtgatgttcgaggacgtggccgtgtacttcacccagaaggagtgggccgacctggcccccgcccagagggccctgtacagggacgtgatgctggagaactacggcaacatggtgagcctggccttccccttccccaagcccgccgtgatcagcaagctggagaggggcgaggagccctggggcctggacccccaggtggtgcccaacgaggagggcctgaagggcttccccaccagccccaagaaaaagagaaaagtctaagctgccttctgcggggcttgccttctggccatgcccttcttctctcccttgcacctgtacctcttggtctttgaataaagcctgagtaggaaggctagcaaaaaaaaaaaaaaaaaaaaaaaaaaaaaaaaaaaaaaaaaaaaaaaaaaaaaaaaaaaaaaaaaaaaaaaaaaaaaaaa

SEQ ID NO: 6121 - RNA, 5797 nt, synthetic construct
  source 1..5797: mol_type = other RNA
aggaaataagagagaaaagaagagtaagaagaaatataagagccaccatggcccctaagaagaagcgtaaagtgagccggatggaacgcctcgtctacgaggtgcggcagaagtgcagaaacatcgaggacatctgcatctcctgcggatctctgaacgtgaccctggagcacccactgttcatcggcggcatgtgccagaactgtaaaaactgttttctggagtgtgcctatcaatacgacgatgacggctaccagagctactgcaccatctgttgcggcggaagagaggtgctgatgtgtggaaataacaactgctgccggtgcttctgcgtggaatgcgtggacctgctggtgggccccggcgccgcccaggccgctattaaggaagatccttggaactgctacatgtgcggccacaagggcacatacggcctgctgagacggagagaggactggcctagcagactgcagatgttcttcgccaataaccacgaccaggagttcgacccccctaaggtgtaccctcccgtccccgccgagaagagaaagcccatccgggtcctgagcctgttcgatggcatcgccaccggtctgctggtgctgaaggacctgggcatccaggtggataggtacattgcctccgaggtgtgcgaggactccatcaccgtgggaatggtgcgtcatcagggcaagatcatgtacgtgggcgacgtgcggagcgtgacacagaagcatatccaggagtggggccctttcgacctggtgatcggcggcagcccttgcaatgacctgagcatcgtgaacccagcccggaagggcctgtacgagggaaccggcagactgttcttcgagttttacagactgctgcacgacgcccggcctaaggaaggcgacgaccggcccttcttttggctgttcgagaatgtggtggccatgggagtcagcgacaagcgggatattagccggttcctggagagcaaccccgtgatgatcgatgccaaggaagtgagcgccgcccaccgggccagatacttctggggcaatctgcctggcatgaacagacccctggccagcaccgtgaacgacaagctggagctgcaggagtgcctggagcacggccggatcgccaagttcagcaaggtgagaaccatcaccacccgaagcaacagcatcaaacaaggcaaggaccagcactttcctgtgttcatgaacgagaaggaggacatcctgtggtgtaccgagatggagagagtgttcgggttcccagtccactacacagatgtcagcaacatgtctagactggccagacagagactgctgggaagaagctggtccgtccctgtgatcagacacctgttcgcccctctgaaggagtacttcgcctgcgtgagcagcggcaacagcaacgccaacagccggggccccagcttctctagcggcctggtgccactgtccctgagagggagccacatgggccccatggagatctacaaaaccgtgagcgcctggaagcggcagcctgtgcgcgtgctgagcctgtttcggaatatcgataaagtcctgaaaagcctgggattcctggagagcggctctggctccggcggtggcaccctgaagtacgtggaggatgtgacaaacgtggtcagacgggatgtggagaagtggggccccttcgatctggtgtacggcagcacccaacccctgggcagctcttgtgaccggtgccctggctggtacatgtttcagttccaccggatcctgcagtacgccctgccgagacaggagtcccagcggccattcttttggattttcatggacaacttgctgctgaccgaggatgaccaggaaactaccactcggttcctgcagaccgaagccgtgaccctgcaggacgtgagaggccgggactaccagaacgccatgcgggtgtggtccaacatccctggactgaaaagcaagcacgcacctctgacccctaaagaagaggagtacctgcaggcccaggtgcggagcagaagcaagctggacgcccctaaggtggatctgctggtgaagaattgcctcctgcccctgagagagtacttcaagtatttcagccagaatagtctgcccctgggcggcccaagcagcggcgcccctcctcccagcggcggcagcccagccggctccccaacctctaccgaggagggcacctctgagtccgccacccccgagagcggccctggcacctccaccgagcccagcgagggcagcgcacccggcagccctgccggcagccccacctccacagaggagggaaccagcaccgagcccagcgaaggcagcgccccaggcaccagcaccgagcctagtgagggcggctctggcggcggcagcgcccaggagattaaacggatcaacaagatcagaagaagacttgtgaaagacagcaacaccaagaaggccggcaagacaggccccatgaaaaccctgctggttagagtgatgacacccgatctgagagagcggctggaaaacctgagaaagaagcctgaaaatatcccccagcccatcagcaatacatctagagccaacctgaataagctgctgaccgattacaccgaaatgaagaaggcgatcctgcatgtgtactgggaagagttccagaaggaccctgtgggcctgatgagccgggtggcccagcctgccagcaagaagatcgatcagaacaagctgaaacctgagatggacgagaagggcaacctgaccaccgccggctttgcctgctctcagtgtggccagcccctgttcgtgtacaagctggagcaggtgtctgagaagggcaaggcttacaccaactacttcggacggtgcaatgtggccgagcacgaaaagctgatcctgctggcccagctgaagcccgagaaggatagcgacgaagccgtgacatatagcctgggaaagtttgggcagagggccctggatttctacagcattcatgtgaccaaggagtccacccaccccgtgaagcccctggcccagatcgccggaaacagatacgcctccggacctgtgggaaaggccctgagcgacgcatgtatgggcacaatcgcctccttcctgtctaagtaccaggacatcatcatcgaacaccagaaggtggtgaagggcaaccagaagagactggagagcctgcgggagctggccggcaaggaaaacctggaataccctagcgtgaccctgccacctcagcctcacaccaaggagggcgttgatgcctacaacgaagtgatcgcccgggtgcgaatgtgggtgaacctgaacctgtggcagaagctgaagctaagcagagatgatgccaagcctctgctgagactgaagggattcccttcctttcctctggtcgagagacaggccaacgaagtggactggtgggacatggtgtgtaacgtgaagaagctgatcaacgagaaaaaggaggatggcaaggtgttttggcagaatctggctggctacaagagacaggaagccctgagaccatacctgagcagcgaggaagatcggaagaagggaaagaaattcgctcggtaccagctgggcgacctgctgctgcacctggaaaagaagcacggcgaggactggggaaaggtgtacgacgaggcctgggagcggattgacaagaaagtggaaggcctgagcaagcacatcaagctggaagaggaacggagaagcgaggacgcccagagcaaggccgccctgaccgactggctgcgggctaaggccagcttcgtgatcgagggcctgaaggaggccgacaaggacgagttctgcagatgcgagctgaagctgcagaagtggtacggggacctgcggggaaagcccttcgccatcgaagccgagaacagcatcctggacatcagcggcttcagcaagcagtacaactgtgccttcatctggcagaaggacggcgtgaagaagctgaacctgtacctgatcatcaactacttcaagggcggcaagctgcggttcaagaagatcaaacctgaagccttcgaagccaacagattctacaccgtgatcaacaaaaagagcggcgagatcgtgcccatggaggtgaacttcaacttcgacgaccccaacctgatcatcctgcctctggcctttggcaagagacagggcagagaattcatctggaacgacctgctgtccctggaaaccggcagcctgaagctggccaacggaagagtgatcgagaagacactgtacaacagaagaacccggcaggatgagcctgccctgttcgtggccctgaccttcgagcggcgggaggtcctggactcctccaatatcaaaccaatgaacctgatcggcgtggcaagaggcgaaaacatccccgccgtgatcgccctgaccgaccccgagggctgcccactgagccggtttaaggatagcctgggaaacccaacccacatcctgagaatcggcgagagctataaggagaagcagcggaccatccaggccaagaaggaggtggagcagcggagagccggcggctacagccggaagtacgccagcaaagccaagaatctggcagacgatatggtgagaaacaccgctagagatctgctgtactacgccgtgacccaggatgccatgctgatcttcgccaacctgagccggggcttcggccggcagggcaagcggaccttcatggccgagagacagtacacacggatggaggactggctgaccgccaagctggcctacgagggcctgagcaagacctacctgtccaagacactggcccagtacacctccaagacatgcagcaactgtgggtttaccatcaccagcgccgactacgacagggtgctggagaagctgaagaagacagcaacaggctggatgaccacaattaacggcaaggagctgaaggtggagggccagattacctactacaacagatacaagagacagaacgtagtcaaggacctgtccgtcgagctggatagactgagcgaagaatctgtgaacaacgacatctcctcctggacaaagggcagaagcggagaagctctgagcctcctgaagaaaagattctcccatagacccgtgcaggagaagttcgtgtgcctgaactgcggcttcgagacacacgcagccgagcaagccgccctgaacatcgccagatcctggctgttcctgcggagccaggagtacaagaaataccagacaaacaagacaaccggcaacaccgataagagagccttcgtcgagacctggcagtccttttaccggaagaagcttaaggaggtgtggaaacctgccgtgcggtctggcggatctggcggaggctccacaagcatggtgttcgaggacgtggccgtgtacttcagcagggaggagtggggcctgctggacagcgcccagagggccctgtacaggcaggtgatgctggagaacttcgccctggtggccagcctgggcctgagcgccagcaggcccaggatcgtgctgcagctggagaggggcgaggagccctgggtgctgagcggcctggacgtggccctggccagggacgcccagaggaggcccggccccggcgagaccagccccaagaaaaagagaaaagtctaagctgccttctgcggggcttgccttctggccatgcccttcttctctcccttgcacctgtacctcttggtctttgaataaagcctgagtaggaaggctagcaaaaaaaaaaaaaaaaaaaaaaaaaaaaaaaaaaaaaaaaaaaaaaaaaaaaaaaaaaaaaaaaaaaaaaaaaaaaaaaa

SEQ ID NO: 6122 - RNA, 5797 nt, synthetic construct
  source 1..5797: mol_type = other RNA
aggaaataagagagaaaagaagagtaagaagaaatataagagccaccatggcccctaagaagaagcgtaaagtgagccggatggaacgcctcgtctacgaggtgcggcagaagtgcagaaacatcgaggacatctgcatctcctgcggatctctgaacgtgaccctggagcacccactgttcatcggcggcatgtgccagaactgtaaaaactgttttctggagtgtgcctatcaatacgacgatgacggctaccagagctactgcaccatctgttgcggcggaagagaggtgctgatgtgtggaaataacaactgctgccggtgcttctgcgtggaatgcgtggacctgctggtgggccccggcgccgcccaggccgctattaaggaagatccttggaactgctacatgtgcggccacaagggcacatacggcctgctgagacggagagaggactggcctagcagactgcagatgttcttcgccaataaccacgaccaggagttcgacccccctaaggtgtaccctcccgtccccgccgagaagagaaagcccatccgggtcctgagcctgttcgatggcatcgccaccggtctgctggtgctgaaggacctgggcatccaggtggataggtacattgcctccgaggtgtgcgaggactccatcaccgtgggaatggtgcgtcatcagggcaagatcatgtacgtgggcgacgtgcggagcgtgacacagaagcatatccaggagtggggccctttcgacctggtgatcggcggcagcccttgcaatgacctgagcatcgtgaacccagcccggaagggcctgtacgagggaaccggcagactgttcttcgagttttacagactgctgcacgacgcccggcctaaggaaggcgacgaccggcccttcttttggctgttcgagaatgtggtggccatgggagtcagcgacaagcgggatattagccggttcctggagagcaaccccgtgatgatcgatgccaaggaagtgagcgccgcccaccgggccagatacttctggggcaatctgcctggcatgaacagacccctggccagcaccgtgaacgacaagctggagctgcaggagtgcctggagcacggccggatcgccaagttcagcaaggtgagaaccatcaccacccgaagcaacagcatcaaacaaggcaaggaccagcactttcctgtgttcatgaacgagaaggaggacatcctgtggtgtaccgagatggagagagtgttcgggttcccagtccactacacagatgtcagcaacatgtctagactggccagacagagactgctgggaagaagctggtccgtccctgtgatcagacacctgttcgcccctctgaaggagtacttcgcctgcgtgagcagcggcaacagcaacgccaacagccggggccccagcttctctagcggcctggtgccactgtccctgagagggagccacatgggccccatggagatctacaaaaccgtgagcgcctggaagcggcagcctgtgcgcgtgctgagcctgtttcggaatatcgataaagtcctgaaaagcctgggattcctggagagcggctctggctccggcggtggcaccctgaagtacgtggaggatgtgacaaacgtggtcagacgggatgtggagaagtggggccccttcgatctggtgtacggcagcacccaacccctgggcagctcttgtgaccggtgccctggctggtacatgtttcagttccaccggatcctgcagtacgccctgccgagacaggagtcccagcggccattcttttggattttcatggacaacttgctgctgaccgaggatgaccaggaaactaccactcggttcctgcagaccgaagccgtgaccctgcaggacgtgagaggccgggactaccagaacgccatgcgggtgtggtccaacatccctggactgaaaagcaagcacgcacctctgacccctaaagaagaggagtacctgcaggcccaggtgcggagcagaagcaagctggacgcccctaaggtggatctgctggtgaagaattgcctcctgcccctgagagagtacttcaagtatttcagccagaatagtctgcccctgggcggcccaagcagcggcgcccctcctcccagcggcggcagcccagccggctccccaacctctaccgaggagggcacctctgagtccgccacccccgagagcggccctggcacctccaccgagcccagcgagggcagcgcacccggcagccctgccggcagccccacctccacagaggagggaaccagcaccgagcccagcgaaggcagcgccccaggcaccagcaccgagcctagtgagggcggctctggcggcggcagcgcccaggagattaaacggatcaacaagatcagaagaagacttgtgaaagacagcaacaccaagaaggccggcaagacaggccccatgaaaaccctgctggttagagtgatgacacccgatctgagagagcggctggaaaacctgagaaagaagcctgaaaatatcccccagcccatcagcaatacatctagagccaacctgaataagctgctgaccgattacaccgaaatgaagaaggcgatcctgcatgtgtactgggaagagttccagaaggaccctgtgggcctgatgagccgggtggcccagcctgccagcaagaagatcgatcagaacaagctgaaacctgagatggacgagaagggcaacctgaccaccgccggctttgcctgctctcagtgtggccagcccctgttcgtgtacaagctggagcaggtgtctgagaagggcaaggcttacaccaactacttcggacggtgcaatgtggccgagcacgaaaagctgatcctgctggcccagctgaagcccgagaaggatagcgacgaagccgtgacatatagcctgggaaagtttgggcagagggccctggatttctacagcattcatgtgaccaaggagtccacccaccccgtgaagcccctggcccagatcgccggaaacagatacgcctccggacctgtgggaaaggccctgagcgacgcatgtatgggcacaatcgcctccttcctgtctaagtaccaggacatcatcatcgaacaccagaaggtggtgaagggcaaccagaagagactggagagcctgcgggagctggccggcaaggaaaacctggaataccctagcgtgaccctgccacctcagcctcacaccaaggagggcgttgatgcctacaacgaagtgatcgcccgggtgcgaatgtgggtgaacctgaacctgtggcagaagctgaagctaagcagagatgatgccaagcctctgctgagactgaagggattcccttcctttcctctggtcgagagacaggccaacgaagtggactggtgggacatggtgtgtaacgtgaagaagctgatcaacgagaaaaaggaggatggcaaggtgttttggcagaatctggctggctacaagagacaggaagccctgagaccatacctgagcagcgaggaagatcggaagaagggaaagaaattcgctcggtaccagctgggcgacctgctgctgcacctggaaaagaagcacggcgaggactggggaaaggtgtacgacgaggcctgggagcggattgacaagaaagtggaaggcctgagcaagcacatcaagctggaagaggaacggagaagcgaggacgcccagagcaaggccgccctgaccgactggctgcgggctaaggccagcttcgtgatcgagggcctgaaggaggccgacaaggacgagttctgcagatgcgagctgaagctgcagaagtggtacggggacctgcggggaaagcccttcgccatcgaagccgagaacagcatcctggacatcagcggcttcagcaagcagtacaactgtgccttcatctggcagaaggacggcgtgaagaagctgaacctgtacctgatcatcaactacttcaagggcggcaagctgcggttcaagaagatcaaacctgaagccttcgaagccaacagattctacaccgtgatcaacaaaaagagcggcgagatcgtgcccatggaggtgaacttcaacttcgacgaccccaacctgatcatcctgcctctggcctttggcaagagacagggcagagaattcatctggaacgacctgctgtccctggaaaccggcagcctgaagctggccaacggaagagtgatcgagaagacactgtacaacagaagaacccggcaggatgagcctgccctgttcgtggccctgaccttcgagcggcgggaggtcctggactcctccaatatcaaaccaatgaacctgatcggcgtggcaagaggcgaaaacatccccgccgtgatcgccctgaccgaccccgagggctgcccactgagccggtttaaggatagcctgggaaacccaacccacatcctgagaatcggcgagagctataaggagaagcagcggaccatccaggccaagaaggaggtggagcagcggagagccggcggctacagccggaagtacgccagcaaagccaagaatctggcagacgatatggtgagaaacaccgctagagatctgctgtactacgccgtgacccaggatgccatgctgatcttcgccaacctgagccggggcttcggccggcagggcaagcggaccttcatggccgagagacagtacacacggatggaggactggctgaccgccaagctggcctacgagggcctgagcaagacctacctgtccaagacactggcccagtacacctccaagacatgcagcaactgtgggtttaccatcaccagcgccgactacgacagggtgctggagaagctgaagaagacagcaacaggctggatgaccacaattaacggcaaggagctgaaggtggagggccagattacctactacaacagatacaagagacagaacgtagtcaaggacctgtccgtcgagctggatagactgagcgaagaatctgtgaacaacgacatctcctcctggacaaagggcagaagcggagaagctctgagcctcctgaagaaaagattctcccatagacccgtgcaggagaagttcgtgtgcctgaactgcggcttcgagacacacgcagccgagcaagccgccctgaacatcgccagatcctggctgttcctgcggagccaggagtacaagaaataccagacaaacaagacaaccggcaacaccgataagagagccttcgtcgagacctggcagtccttttaccggaagaagcttaaggaggtgtggaaacctgccgtgcggtctggcggatctggcggaggctccacaagcagcgtggccttcagggacgtgatcgtggacttcacccaggaggagtggcagcagctgaagcccgcccagaaggacctgtacagggacgtgatgatggagaactactggaacctggtgagcctggacctggagaccaggcccgacaagaaggagagcgacccccaggaggacgactgggaggacaggcccagcatcgccgtggtggccgagggccccatgaggaccggcgaccagggctgcatcaccagccccaagaaaaagagaaaagtctaagctgccttctgcggggcttgccttctggccatgcccttcttctctcccttgcacctgtacctcttggtctttgaataaagcctgagtaggaaggctagcaaaaaaaaaaaaaaaaaaaaaaaaaaaaaaaaaaaaaaaaaaaaaaaaaaaaaaaaaaaaaaaaaaaaaaaaaaaaaaaa

SEQ ID NO: 6123 - RNA, 5797 nt, synthetic construct
  source 1..5797: mol_type = other RNA
aggaaataagagagaaaagaagagtaagaagaaatataagagccaccatggcccctaagaagaagcgtaaagtgagccggatggaacgcctcgtctacgaggtgcggcagaagtgcagaaacatcgaggacatctgcatctcctgcggatctctgaacgtgaccctggagcacccactgttcatcggcggcatgtgccagaactgtaaaaactgttttctggagtgtgcctatcaatacgacgatgacggctaccagagctactgcaccatctgttgcggcggaagagaggtgctgatgtgtggaaataacaactgctgccggtgcttctgcgtggaatgcgtggacctgctggtgggccccggcgccgcccaggccgctattaaggaagatccttggaactgctacatgtgcggccacaagggcacatacggcctgctgagacggagagaggactggcctagcagactgcagatgttcttcgccaataaccacgaccaggagttcgacccccctaaggtgtaccctcccgtccccgccgagaagagaaagcccatccgggtcctgagcctgttcgatggcatcgccaccggtctgctggtgctgaaggacctgggcatccaggtggataggtacattgcctccgaggtgtgcgaggactccatcaccgtgggaatggtgcgtcatcagggcaagatcatgtacgtgggcgacgtgcggagcgtgacacagaagcatatccaggagtggggccctttcgacctggtgatcggcggcagcccttgcaatgacctgagcatcgtgaacccagcccggaagggcctgtacgagggaaccggcagactgttcttcgagttttacagactgctgcacgacgcccggcctaaggaaggcgacgaccggcccttcttttggctgttcgagaatgtggtggccatgggagtcagcgacaagcgggatattagccggttcctggagagcaaccccgtgatgatcgatgccaaggaagtgagcgccgcccaccgggccagatacttctggggcaatctgcctggcatgaacagacccctggccagcaccgtgaacgacaagctggagctgcaggagtgcctggagcacggccggatcgccaagttcagcaaggtgagaaccatcaccacccgaagcaacagcatcaaacaaggcaaggaccagcactttcctgtgttcatgaacgagaaggaggacatcctgtggtgtaccgagatggagagagtgttcgggttcccagtccactacacagatgtcagcaacatgtctagactggccagacagagactgctgggaagaagctggtccgtccctgtgatcagacacctgttcgcccctctgaaggagtacttcgcctgcgtgagcagcggcaacagcaacgccaacagccggggccccagcttctctagcggcctggtgccactgtccctgagagggagccacatgggccccatggagatctacaaaaccgtgagcgcctggaagcggcagcctgtgcgcgtgctgagcctgtttcggaatatcgataaagtcctgaaaagcctgggattcctggagagcggctctggctccggcggtggcaccctgaagtacgtggaggatgtgacaaacgtggtcagacgggatgtggagaagtggggccccttcgatctggtgtacggcagcacccaacccctgggcagctcttgtgaccggtgccctggctggtacatgtttcagttccaccggatcctgcagtacgccctgccgagacaggagtcccagcggccattcttttggattttcatggacaacttgctgctgaccgaggatgaccaggaaactaccactcggttcctgcagaccgaagccgtgaccctgcaggacgtgagaggccgggactaccagaacgccatgcgggtgtggtccaacatccctggactgaaaagcaagcacgcacctctgacccctaaagaagaggagtacctgcaggcccaggtgcggagcagaagcaagctggacgcccctaaggtggatctgctggtgaagaattgcctcctgcccctgagagagtacttcaagtatttcagccagaatagtctgcccctgggcggcccaagcagcggcgcccctcctcccagcggcggcagcccagccggctccccaacctctaccgaggagggcacctctgagtccgccacccccgagagcggccctggcacctccaccgagcccagcgagggcagcgcacccggcagccctgccggcagccccacctccacagaggagggaaccagcaccgagcccagcgaaggcagcgccccaggcaccagcaccgagcctagtgagggcggctctggcggcggcagcgcccaggagattaaacggatcaacaagatcagaagaagacttgtgaaagacagcaacaccaagaaggccggcaagacaggccccatgaaaaccctgctggttagagtgatgacacccgatctgagagagcggctggaaaacctgagaaagaagcctgaaaatatcccccagcccatcagcaatacatctagagccaacctgaataagctgctgaccgattacaccgaaatgaagaaggcgatcctgcatgtgtactgggaagagttccagaaggaccctgtgggcctgatgagccgggtggcccagcctgccagcaagaagatcgatcagaacaagctgaaacctgagatggacgagaagggcaacctgaccaccgccggctttgcctgctctcagtgtggccagcccctgttcgtgtacaagctggagcaggtgtctgagaagggcaaggcttacaccaactacttcggacggtgcaatgtggccgagcacgaaaagctgatcctgctggcccagctgaagcccgagaaggatagcgacgaagccgtgacatatagcctgggaaagtttgggcagagggccctggatttctacagcattcatgtgaccaaggagtccacccaccccgtgaagcccctggcccagatcgccggaaacagatacgcctccggacctgtgggaaaggccctgagcgacgcatgtatgggcacaatcgcctccttcctgtctaagtaccaggacatcatcatcgaacaccagaaggtggtgaagggcaaccagaagagactggagagcctgcgggagctggccggcaaggaaaacctggaataccctagcgtgaccctgccacctcagcctcacaccaaggagggcgttgatgcctacaacgaagtgatcgcccgggtgcgaatgtgggtgaacctgaacctgtggcagaagctgaagctaagcagagatgatgccaagcctctgctgagactgaagggattcccttcctttcctctggtcgagagacaggccaacgaagtggactggtgggacatggtgtgtaacgtgaagaagctgatcaacgagaaaaaggaggatggcaaggtgttttggcagaatctggctggctacaagagacaggaagccctgagaccatacctgagcagcgaggaagatcggaagaagggaaagaaattcgctcggtaccagctgggcgacctgctgctgcacctggaaaagaagcacggcgaggactggggaaaggtgtacgacgaggcctgggagcggattgacaagaaagtggaaggcctgagcaagcacatcaagctggaagaggaacggagaagcgaggacgcccagagcaaggccgccctgaccgactggctgcgggctaaggccagcttcgtgatcgagggcctgaaggaggccgacaaggacgagttctgcagatgcgagctgaagctgcagaagtggtacggggacctgcggggaaagcccttcgccatcgaagccgagaacagcatcctggacatcagcggcttcagcaagcagtacaactgtgccttcatctggcagaaggacggcgtgaagaagctgaacctgtacctgatcatcaactacttcaagggcggcaagctgcggttcaagaagatcaaacctgaagccttcgaagccaacagattctacaccgtgatcaacaaaaagagcggcgagatcgtgcccatggaggtgaacttcaacttcgacgaccccaacctgatcatcctgcctctggcctttggcaagagacagggcagagaattcatctggaacgacctgctgtccctggaaaccggcagcctgaagctggccaacggaagagtgatcgagaagacactgtacaacagaagaacccggcaggatgagcctgccctgttcgtggccctgaccttcgagcggcgggaggtcctggactcctccaatatcaaaccaatgaacctgatcggcgtggcaagaggcgaaaacatccccgccgtgatcgccctgaccgaccccgagggctgcccactgagccggtttaaggatagcctgggaaacccaacccacatcctgagaatcggcgagagctataaggagaagcagcggaccatccaggccaagaaggaggtggagcagcggagagccggcggctacagccggaagtacgccagcaaagccaagaatctggcagacgatatggtgagaaacaccgctagagatctgctgtactacgccgtgacccaggatgccatgctgatcttcgccaacctgagccggggcttcggccggcagggcaagcggaccttcatggccgagagacagtacacacggatggaggactggctgaccgccaagctggcctacgagggcctgagcaagacctacctgtccaagacactggcccagtacacctccaagacatgcagcaactgtgggtttaccatcaccagcgccgactacgacagggtgctggagaagctgaagaagacagcaacaggctggatgaccacaattaacggcaaggagctgaaggtggagggccagattacctactacaacagatacaagagacagaacgtagtcaaggacctgtccgtcgagctggatagactgagcgaagaatctgtgaacaacgacatctcctcctggacaaagggcagaagcggagaagctctgagcctcctgaagaaaagattctcccatagacccgtgcaggagaagttcgtgtgcctgaactgcggcttcgagacacacgcagccgagcaagccgccctgaacatcgccagatcctggctgttcctgcggagccaggagtacaagaaataccagacaaacaagacaaccggcaacaccgataagagagccttcgtcgagacctggcagtccttttaccggaagaagcttaaggaggtgtggaaacctgccgtgcggtctggcggatctggcggaggctccacaagcatggacgccgtgacctacgaggacgtgcacgtgaacttcagccaggaggagtgggccctgctggaccccagccagaagagcctgtacaaggacgtgatgctggagacctactggaacctgacctgcatcggctacaagtgggaggaccacaacatcgaggaccagcaccagagcagcggcaggcacggcaggtgcatcaactgccccagcgcctacggcaagaagcagtgcaccaacctgttcaccagccccaagaaaaagagaaaagtctaagctgccttctgcggggcttgccttctggccatgcccttcttctctcccttgcacctgtacctcttggtctttgaataaagcctgagtaggaaggctagcaaaaaaaaaaaaaaaaaaaaaaaaaaaaaaaaaaaaaaaaaaaaaaaaaaaaaaaaaaaaaaaaaaaaaaaaaaaaaaaa

SEQ ID NO: 6124 - RNA, 5797 nt, synthetic construct
  source 1..5797: mol_type = other RNA
aggaaataagagagaaaagaagagtaagaagaaatataagagccaccatggcccctaagaagaagcgtaaagtgagccggatggaacgcctcgtctacgaggtgcggcagaagtgcagaaacatcgaggacatctgcatctcctgcggatctctgaacgtgaccctggagcacccactgttcatcggcggcatgtgccagaactgtaaaaactgttttctggagtgtgcctatcaatacgacgatgacggctaccagagctactgcaccatctgttgcggcggaagagaggtgctgatgtgtggaaataacaactgctgccggtgcttctgcgtggaatgcgtggacctgctggtgggccccggcgccgcccaggccgctattaaggaagatccttggaactgctacatgtgcggccacaagggcacatacggcctgctgagacggagagaggactggcctagcagactgcagatgttcttcgccaataaccacgaccaggagttcgacccccctaaggtgtaccctcccgtccccgccgagaagagaaagcccatccgggtcctgagcctgttcgatggcatcgccaccggtctgctggtgctgaaggacctgggcatccaggtggataggtacattgcctccgaggtgtgcgaggactccatcaccgtgggaatggtgcgtcatcagggcaagatcatgtacgtgggcgacgtgcggagcgtgacacagaagcatatccaggagtggggccctttcgacctggtgatcggcggcagcccttgcaatgacctgagcatcgtgaacccagcccggaagggcctgtacgagggaaccggcagactgttcttcgagttttacagactgctgcacgacgcccggcctaaggaaggcgacgaccggcccttcttttggctgttcgagaatgtggtggccatgggagtcagcgacaagcgggatattagccggttcctggagagcaaccccgtgatgatcgatgccaaggaagtgagcgccgcccaccgggccagatacttctggggcaatctgcctggcatgaacagacccctggccagcaccgtgaacgacaagctggagctgcaggagtgcctggagcacggccggatcgccaagttcagcaaggtgagaaccatcaccacccgaagcaacagcatcaaacaaggcaaggaccagcactttcctgtgttcatgaacgagaaggaggacatcctgtggtgtaccgagatggagagagtgttcgggttcccagtccactacacagatgtcagcaacatgtctagactggccagacagagactgctgggaagaagctggtccgtccctgtgatcagacacctgttcgcccctctgaaggagtacttcgcctgcgtgagcagcggcaacagcaacgccaacagccggggccccagcttctctagcggcctggtgccactgtccctgagagggagccacatgggccccatggagatctacaaaaccgtgagcgcctggaagcggcagcctgtgcgcgtgctgagcctgtttcggaatatcgataaagtcctgaaaagcctgggattcctggagagcggctctggctccggcggtggcaccctgaagtacgtggaggatgtgacaaacgtggtcagacgggatgtggagaagtggggccccttcgatctggtgtacggcagcacccaacccctgggcagctcttgtgaccggtgccctggctggtacatgtttcagttccaccggatcctgcagtacgccctgccgagacaggagtcccagcggccattcttttggattttcatggacaacttgctgctgaccgaggatgaccaggaaactaccactcggttcctgcagaccgaagccgtgaccctgcaggacgtgagaggccgggactaccagaacgccatgcgggtgtggtccaacatccctggactgaaaagcaagcacgcacctctgacccctaaagaagaggagtacctgcaggcccaggtgcggagcagaagcaagctggacgcccctaaggtggatctgctggtgaagaattgcctcctgcccctgagagagtacttcaagtatttcagccagaatagtctgcccctgggcggcccaagcagcggcgcccctcctcccagcggcggcagcccagccggctccccaacctctaccgaggagggcacctctgagtccgccacccccgagagcggccctggcacctccaccgagcccagcgagggcagcgcacccggcagccctgccggcagccccacctccacagaggagggaaccagcaccgagcccagcgaaggcagcgccccaggcaccagcaccgagcctagtgagggcggctctggcggcggcagcgcccaggagattaaacggatcaacaagatcagaagaagacttgtgaaagacagcaacaccaagaaggccggcaagacaggccccatgaaaaccctgctggttagagtgatgacacccgatctgagagagcggctggaaaacctgagaaagaagcctgaaaatatcccccagcccatcagcaatacatctagagccaacctgaataagctgctgaccgattacaccgaaatgaagaaggcgatcctgcatgtgtactgggaagagttccagaaggaccctgtgggcctgatgagccgggtggcccagcctgccagcaagaagatcgatcagaacaagctgaaacctgagatggacgagaagggcaacctgaccaccgccggctttgcctgctctcagtgtggccagcccctgttcgtgtacaagctggagcaggtgtctgagaagggcaaggcttacaccaactacttcggacggtgcaatgtggccgagcacgaaaagctgatcctgctggcccagctgaagcccgagaaggatagcgacgaagccgtgacatatagcctgggaaagtttgggcagagggccctggatttctacagcattcatgtgaccaaggagtccacccaccccgtgaagcccctggcccagatcgccggaaacagatacgcctccggacctgtgggaaaggccctgagcgacgcatgtatgggcacaatcgcctccttcctgtctaagtaccaggacatcatcatcgaacaccagaaggtggtgaagggcaaccagaagagactggagagcctgcgggagctggccggcaaggaaaacctggaataccctagcgtgaccctgccacctcagcctcacaccaaggagggcgttgatgcctacaacgaagtgatcgcccgggtgcgaatgtgggtgaacctgaacctgtggcagaagctgaagctaagcagagatgatgccaagcctctgctgagactgaagggattcccttcctttcctctggtcgagagacaggccaacgaagtggactggtgggacatggtgtgtaacgtgaagaagctgatcaacgagaaaaaggaggatggcaaggtgttttggcagaatctggctggctacaagagacaggaagccctgagaccatacctgagcagcgaggaagatcggaagaagggaaagaaattcgctcggtaccagctgggcgacctgctgctgcacctggaaaagaagcacggcgaggactggggaaaggtgtacgacgaggcctgggagcggattgacaagaaagtggaaggcctgagcaagcacatcaagctggaagaggaacggagaagcgaggacgcccagagcaaggccgccctgaccgactggctgcgggctaaggccagcttcgtgatcgagggcctgaaggaggccgacaaggacgagttctgcagatgcgagctgaagctgcagaagtggtacggggacctgcggggaaagcccttcgccatcgaagccgagaacagcatcctggacatcagcggcttcagcaagcagtacaactgtgccttcatctggcagaaggacggcgtgaagaagctgaacctgtacctgatcatcaactacttcaagggcggcaagctgcggttcaagaagatcaaacctgaagccttcgaagccaacagattctacaccgtgatcaacaaaaagagcggcgagatcgtgcccatggaggtgaacttcaacttcgacgaccccaacctgatcatcctgcctctggcctttggcaagagacagggcagagaattcatctggaacgacctgctgtccctggaaaccggcagcctgaagctggccaacggaagagtgatcgagaagacactgtacaacagaagaacccggcaggatgagcctgccctgttcgtggccctgaccttcgagcggcgggaggtcctggactcctccaatatcaaaccaatgaacctgatcggcgtggcaagaggcgaaaacatccccgccgtgatcgccctgaccgaccccgagggctgcccactgagccggtttaaggatagcctgggaaacccaacccacatcctgagaatcggcgagagctataaggagaagcagcggaccatccaggccaagaaggaggtggagcagcggagagccggcggctacagccggaagtacgccagcaaagccaagaatctggcagacgatatggtgagaaacaccgctagagatctgctgtactacgccgtgacccaggatgccatgctgatcttcgccaacctgagccggggcttcggccggcagggcaagcggaccttcatggccgagagacagtacacacggatggaggactggctgaccgccaagctggcctacgagggcctgagcaagacctacctgtccaagacactggcccagtacacctccaagacatgcagcaactgtgggtttaccatcaccagcgccgactacgacagggtgctggagaagctgaagaagacagcaacaggctggatgaccacaattaacggcaaggagctgaaggtggagggccagattacctactacaacagatacaagagacagaacgtagtcaaggacctgtccgtcgagctggatagactgagcgaagaatctgtgaacaacgacatctcctcctggacaaagggcagaagcggagaagctctgagcctcctgaagaaaagattctcccatagacccgtgcaggagaagttcgtgtgcctgaactgcggcttcgagacacacgcagccgagcaagccgccctgaacatcgccagatcctggctgttcctgcggagccaggagtacaagaaataccagacaaacaagacaaccggcaacaccgataagagagccttcgtcgagacctggcagtccttttaccggaagaagcttaaggaggtgtggaaacctgccgtgcggtctggcggatctggcggaggctccacaagcaacgagatggtgaccttcaaggacgtggccgtggtgttcagcggcgaggagctggagctgctggacagcgcccagtggaagctgtaccaggacgtgatgctggagaacttcaggaacctgctgagcgtgggcggcaggatccagaccgagctggagaccttccccgaggccggcccccacgaggagctgagctggcagcagatctgggagcagatcgccagcgacagcaccttcagccaggacaccagccccaagaaaaagagaaaagtctaagctgccttctgcggggcttgccttctggccatgcccttcttctctcccttgcacctgtacctcttggtctttgaataaagcctgagtaggaaggctagcaaaaaaaaaaaaaaaaaaaaaaaaaaaaaaaaaaaaaaaaaaaaaaaaaaaaaaaaaaaaaaaaaaaaaaaaaaaaaaaa

SEQ ID NO: 6125 - RNA, 5797 nt, synthetic construct
  source 1..5797: mol_type = other RNA
aggaaataagagagaaaagaagagtaagaagaaatataagagccaccatggcccctaagaagaagcgtaaagtgagccggatggaacgcctcgtctacgaggtgcggcagaagtgcagaaacatcgaggacatctgcatctcctgcggatctctgaacgtgaccctggagcacccactgttcatcggcggcatgtgccagaactgtaaaaactgttttctggagtgtgcctatcaatacgacgatgacggctaccagagctactgcaccatctgttgcggcggaagagaggtgctgatgtgtggaaataacaactgctgccggtgcttctgcgtggaatgcgtggacctgctggtgggccccggcgccgcccaggccgctattaaggaagatccttggaactgctacatgtgcggccacaagggcacatacggcctgctgagacggagagaggactggcctagcagactgcagatgttcttcgccaataaccacgaccaggagttcgacccccctaaggtgtaccctcccgtccccgccgagaagagaaagcccatccgggtcctgagcctgttcgatggcatcgccaccggtctgctggtgctgaaggacctgggcatccaggtggataggtacattgcctccgaggtgtgcgaggactccatcaccgtgggaatggtgcgtcatcagggcaagatcatgtacgtgggcgacgtgcggagcgtgacacagaagcatatccaggagtggggccctttcgacctggtgatcggcggcagcccttgcaatgacctgagcatcgtgaacccagcccggaagggcctgtacgagggaaccggcagactgttcttcgagttttacagactgctgcacgacgcccggcctaaggaaggcgacgaccggcccttcttttggctgttcgagaatgtggtggccatgggagtcagcgacaagcgggatattagccggttcctggagagcaaccccgtgatgatcgatgccaaggaagtgagcgccgcccaccgggccagatacttctggggcaatctgcctggcatgaacagacccctggccagcaccgtgaacgacaagctggagctgcaggagtgcctggagcacggccggatcgccaagttcagcaaggtgagaaccatcaccacccgaagcaacagcatcaaacaaggcaaggaccagcactttcctgtgttcatgaacgagaaggaggacatcctgtggtgtaccgagatggagagagtgttcgggttcccagtccactacacagatgtcagcaacatgtctagactggccagacagagactgctgggaagaagctggtccgtccctgtgatcagacacctgttcgcccctctgaaggagtacttcgcctgcgtgagcagcggcaacagcaacgccaacagccggggccccagcttctctagcggcctggtgccactgtccctgagagggagccacatgggccccatggagatctacaaaaccgtgagcgcctggaagcggcagcctgtgcgcgtgctgagcctgtttcggaatatcgataaagtcctgaaaagcctgggattcctggagagcggctctggctccggcggtggcaccctgaagtacgtggaggatgtgacaaacgtggtcagacgggatgtggagaagtggggccccttcgatctggtgtacggcagcacccaacccctgggcagctcttgtgaccggtgccctggctggtacatgtttcagttccaccggatcctgcagtacgccctgccgagacaggagtcccagcggccattcttttggattttcatggacaacttgctgctgaccgaggatgaccaggaaactaccactcggttcctgcagaccgaagccgtgaccctgcaggacgtgagaggccgggactaccagaacgccatgcgggtgtggtccaacatccctggactgaaaagcaagcacgcacctctgacccctaaagaagaggagtacctgcaggcccaggtgcggagcagaagcaagctggacgcccctaaggtggatctgctggtgaagaattgcctcctgcccctgagagagtacttcaagtatttcagccagaatagtctgcccctgggcggcccaagcagcggcgcccctcctcccagcggcggcagcccagccggctccccaacctctaccgaggagggcacctctgagtccgccacccccgagagcggccctggcacctccaccgagcccagcgagggcagcgcacccggcagccctgccggcagccccacctccacagaggagggaaccagcaccgagcccagcgaaggcagcgccccaggcaccagcaccgagcctagtgagggcggctctggcggcggcagcgcccaggagattaaacggatcaacaagatcagaagaagacttgtgaaagacagcaacaccaagaaggccggcaagacaggccccatgaaaaccctgctggttagagtgatgacacccgatctgagagagcggctggaaaacctgagaaagaagcctgaaaatatcccccagcccatcagcaatacatctagagccaacctgaataagctgctgaccgattacaccgaaatgaagaaggcgatcctgcatgtgtactgggaagagttccagaaggaccctgtgggcctgatgagccgggtggcccagcctgccagcaagaagatcgatcagaacaagctgaaacctgagatggacgagaagggcaacctgaccaccgccggctttgcctgctctcagtgtggccagcccctgttcgtgtacaagctggagcaggtgtctgagaagggcaaggcttacaccaactacttcggacggtgcaatgtggccgagcacgaaaagctgatcctgctggcccagctgaagcccgagaaggatagcgacgaagccgtgacatatagcctgggaaagtttgggcagagggccctggatttctacagcattcatgtgaccaaggagtccacccaccccgtgaagcccctggcccagatcgccggaaacagatacgcctccggacctgtgggaaaggccctgagcgacgcatgtatgggcacaatcgcctccttcctgtctaagtaccaggacatcatcatcgaacaccagaaggtggtgaagggcaaccagaagagactggagagcctgcgggagctggccggcaaggaaaacctggaataccctagcgtgaccctgccacctcagcctcacaccaaggagggcgttgatgcctacaacgaagtgatcgcccgggtgcgaatgtgggtgaacctgaacctgtggcagaagctgaagctaagcagagatgatgccaagcctctgctgagactgaagggattcccttcctttcctctggtcgagagacaggccaacgaagtggactggtgggacatggtgtgtaacgtgaagaagctgatcaacgagaaaaaggaggatggcaaggtgttttggcagaatctggctggctacaagagacaggaagccctgagaccatacctgagcagcgaggaagatcggaagaagggaaagaaattcgctcggtaccagctgggcgacctgctgctgcacctggaaaagaagcacggcgaggactggggaaaggtgtacgacgaggcctgggagcggattgacaagaaagtggaaggcctgagcaagcacatcaagctggaagaggaacggagaagcgaggacgcccagagcaaggccgccctgaccgactggctgcgggctaaggccagcttcgtgatcgagggcctgaaggaggccgacaaggacgagttctgcagatgcgagctgaagctgcagaagtggtacggggacctgcggggaaagcccttcgccatcgaagccgagaacagcatcctggacatcagcggcttcagcaagcagtacaactgtgccttcatctggcagaaggacggcgtgaagaagctgaacctgtacctgatcatcaactacttcaagggcggcaagctgcggttcaagaagatcaaacctgaagccttcgaagccaacagattctacaccgtgatcaacaaaaagagcggcgagatcgtgcccatggaggtgaacttcaacttcgacgaccccaacctgatcatcctgcctctggcctttggcaagagacagggcagagaattcatctggaacgacctgctgtccctggaaaccggcagcctgaagctggccaacggaagagtgatcgagaagacactgtacaacagaagaacccggcaggatgagcctgccctgttcgtggccctgaccttcgagcggcgggaggtcctggactcctccaatatcaaaccaatgaacctgatcggcgtggcaagaggcgaaaacatccccgccgtgatcgccctgaccgaccccgagggctgcccactgagccggtttaaggatagcctgggaaacccaacccacatcctgagaatcggcgagagctataaggagaagcagcggaccatccaggccaagaaggaggtggagcagcggagagccggcggctacagccggaagtacgccagcaaagccaagaatctggcagacgatatggtgagaaacaccgctagagatctgctgtactacgccgtgacccaggatgccatgctgatcttcgccaacctgagccggggcttcggccggcagggcaagcggaccttcatggccgagagacagtacacacggatggaggactggctgaccgccaagctggcctacgagggcctgagcaagacctacctgtccaagacactggcccagtacacctccaagacatgcagcaactgtgggtttaccatcaccagcgccgactacgacagggtgctggagaagctgaagaagacagcaacaggctggatgaccacaattaacggcaaggagctgaaggtggagggccagattacctactacaacagatacaagagacagaacgtagtcaaggacctgtccgtcgagctggatagactgagcgaagaatctgtgaacaacgacatctcctcctggacaaagggcagaagcggagaagctctgagcctcctgaagaaaagattctcccatagacccgtgcaggagaagttcgtgtgcctgaactgcggcttcgagacacacgcagccgagcaagccgccctgaacatcgccagatcctggctgttcctgcggagccaggagtacaagaaataccagacaaacaagacaaccggcaacaccgataagagagccttcgtcgagacctggcagtccttttaccggaagaagcttaaggaggtgtggaaacctgccgtgcggtctggcggatctggcggaggctccacaagcccccaggccgccatgaccttccaggacgtggccgtggacttcaccagggaggagtggaggctgctggagcccccccagaaggagctgtactgggaggtgatgctggagaactacaggaacctggtgtgcctgggcctgaccgtgagcaagcccgacgtgatcagccagctggagcagggcgaggccccctggaggctggagggcggcagcgccaggggcaggtgcctggactggggcatgaggaccagccccaagaaaaagagaaaagtctaagctgccttctgcggggcttgccttctggccatgcccttcttctctcccttgcacctgtacctcttggtctttgaataaagcctgagtaggaaggctagcaaaaaaaaaaaaaaaaaaaaaaaaaaaaaaaaaaaaaaaaaaaaaaaaaaaaaaaaaaaaaaaaaaaaaaaaaaaaaaaa

SEQ ID NO: 6126 - RNA, 5797 nt, synthetic construct
  source 1..5797: mol_type = other RNA
aggaaataagagagaaaagaagagtaagaagaaatataagagccaccatggcccctaagaagaagcgtaaagtgagccggatggaacgcctcgtctacgaggtgcggcagaagtgcagaaacatcgaggacatctgcatctcctgcggatctctgaacgtgaccctggagcacccactgttcatcggcggcatgtgccagaactgtaaaaactgttttctggagtgtgcctatcaatacgacgatgacggctaccagagctactgcaccatctgttgcggcggaagagaggtgctgatgtgtggaaataacaactgctgccggtgcttctgcgtggaatgcgtggacctgctggtgggccccggcgccgcccaggccgctattaaggaagatccttggaactgctacatgtgcggccacaagggcacatacggcctgctgagacggagagaggactggcctagcagactgcagatgttcttcgccaataaccacgaccaggagttcgacccccctaaggtgtaccctcccgtccccgccgagaagagaaagcccatccgggtcctgagcctgttcgatggcatcgccaccggtctgctggtgctgaaggacctgggcatccaggtggataggtacattgcctccgaggtgtgcgaggactccatcaccgtgggaatggtgcgtcatcagggcaagatcatgtacgtgggcgacgtgcggagcgtgacacagaagcatatccaggagtggggccctttcgacctggtgatcggcggcagcccttgcaatgacctgagcatcgtgaacccagcccggaagggcctgtacgagggaaccggcagactgttcttcgagttttacagactgctgcacgacgcccggcctaaggaaggcgacgaccggcccttcttttggctgttcgagaatgtggtggccatgggagtcagcgacaagcgggatattagccggttcctggagagcaaccccgtgatgatcgatgccaaggaagtgagcgccgcccaccgggccagatacttctggggcaatctgcctggcatgaacagacccctggccagcaccgtgaacgacaagctggagctgcaggagtgcctggagcacggccggatcgccaagttcagcaaggtgagaaccatcaccacccgaagcaacagcatcaaacaaggcaaggaccagcactttcctgtgttcatgaacgagaaggaggacatcctgtggtgtaccgagatggagagagtgttcgggttcccagtccactacacagatgtcagcaacatgtctagactggccagacagagactgctgggaagaagctggtccgtccctgtgatcagacacctgttcgcccctctgaaggagtacttcgcctgcgtgagcagcggcaacagcaacgccaacagccggggccccagcttctctagcggcctggtgccactgtccctgagagggagccacatgggccccatggagatctacaaaaccgtgagcgcctggaagcggcagcctgtgcgcgtgctgagcctgtttcggaatatcgataaagtcctgaaaagcctgggattcctggagagcggctctggctccggcggtggcaccctgaagtacgtggaggatgtgacaaacgtggtcagacgggatgtggagaagtggggccccttcgatctggtgtacggcagcacccaacccctgggcagctcttgtgaccggtgccctggctggtacatgtttcagttccaccggatcctgcagtacgccctgccgagacaggagtcccagcggccattcttttggattttcatggacaacttgctgctgaccgaggatgaccaggaaactaccactcggttcctgcagaccgaagccgtgaccctgcaggacgtgagaggccgggactaccagaacgccatgcgggtgtggtccaacatccctggactgaaaagcaagcacgcacctctgacccctaaagaagaggagtacctgcaggcccaggtgcggagcagaagcaagctggacgcccctaaggtggatctgctggtgaagaattgcctcctgcccctgagagagtacttcaagtatttcagccagaatagtctgcccctgggcggcccaagcagcggcgcccctcctcccagcggcggcagcccagccggctccccaacctctaccgaggagggcacctctgagtccgccacccccgagagcggccctggcacctccaccgagcccagcgagggcagcgcacccggcagccctgccggcagccccacctccacagaggagggaaccagcaccgagcccagcgaaggcagcgccccaggcaccagcaccgagcctagtgagggcggctctggcggcggcagcgcccaggagattaaacggatcaacaagatcagaagaagacttgtgaaagacagcaacaccaagaaggccggcaagacaggccccatgaaaaccctgctggttagagtgatgacacccgatctgagagagcggctggaaaacctgagaaagaagcctgaaaatatcccccagcccatcagcaatacatctagagccaacctgaataagctgctgaccgattacaccgaaatgaagaaggcgatcctgcatgtgtactgggaagagttccagaaggaccctgtgggcctgatgagccgggtggcccagcctgccagcaagaagatcgatcagaacaagctgaaacctgagatggacgagaagggcaacctgaccaccgccggctttgcctgctctcagtgtggccagcccctgttcgtgtacaagctggagcaggtgtctgagaagggcaaggcttacaccaactacttcggacggtgcaatgtggccgagcacgaaaagctgatcctgctggcccagctgaagcccgagaaggatagcgacgaagccgtgacatatagcctgggaaagtttgggcagagggccctggatttctacagcattcatgtgaccaaggagtccacccaccccgtgaagcccctggcccagatcgccggaaacagatacgcctccggacctgtgggaaaggccctgagcgacgcatgtatgggcacaatcgcctccttcctgtctaagtaccaggacatcatcatcgaacaccagaaggtggtgaagggcaaccagaagagactggagagcctgcgggagctggccggcaaggaaaacctggaataccctagcgtgaccctgccacctcagcctcacaccaaggagggcgttgatgcctacaacgaagtgatcgcccgggtgcgaatgtgggtgaacctgaacctgtggcagaagctgaagctaagcagagatgatgccaagcctctgctgagactgaagggattcccttcctttcctctggtcgagagacaggccaacgaagtggactggtgggacatggtgtgtaacgtgaagaagctgatcaacgagaaaaaggaggatggcaaggtgttttggcagaatctggctggctacaagagacaggaagccctgagaccatacctgagcagcgaggaagatcggaagaagggaaagaaattcgctcggtaccagctgggcgacctgctgctgcacctggaaaagaagcacggcgaggactggggaaaggtgtacgacgaggcctgggagcggattgacaagaaagtggaaggcctgagcaagcacatcaagctggaagaggaacggagaagcgaggacgcccagagcaaggccgccctgaccgactggctgcgggctaaggccagcttcgtgatcgagggcctgaaggaggccgacaaggacgagttctgcagatgcgagctgaagctgcagaagtggtacggggacctgcggggaaagcccttcgccatcgaagccgagaacagcatcctggacatcagcggcttcagcaagcagtacaactgtgccttcatctggcagaaggacggcgtgaagaagctgaacctgtacctgatcatcaactacttcaagggcggcaagctgcggttcaagaagatcaaacctgaagccttcgaagccaacagattctacaccgtgatcaacaaaaagagcggcgagatcgtgcccatggaggtgaacttcaacttcgacgaccccaacctgatcatcctgcctctggcctttggcaagagacagggcagagaattcatctggaacgacctgctgtccctggaaaccggcagcctgaagctggccaacggaagagtgatcgagaagacactgtacaacagaagaacccggcaggatgagcctgccctgttcgtggccctgaccttcgagcggcgggaggtcctggactcctccaatatcaaaccaatgaacctgatcggcgtggcaagaggcgaaaacatccccgccgtgatcgccctgaccgaccccgagggctgcccactgagccggtttaaggatagcctgggaaacccaacccacatcctgagaatcggcgagagctataaggagaagcagcggaccatccaggccaagaaggaggtggagcagcggagagccggcggctacagccggaagtacgccagcaaagccaagaatctggcagacgatatggtgagaaacaccgctagagatctgctgtactacgccgtgacccaggatgccatgctgatcttcgccaacctgagccggggcttcggccggcagggcaagcggaccttcatggccgagagacagtacacacggatggaggactggctgaccgccaagctggcctacgagggcctgagcaagacctacctgtccaagacactggcccagtacacctccaagacatgcagcaactgtgggtttaccatcaccagcgccgactacgacagggtgctggagaagctgaagaagacagcaacaggctggatgaccacaattaacggcaaggagctgaaggtggagggccagattacctactacaacagatacaagagacagaacgtagtcaaggacctgtccgtcgagctggatagactgagcgaagaatctgtgaacaacgacatctcctcctggacaaagggcagaagcggagaagctctgagcctcctgaagaaaagattctcccatagacccgtgcaggagaagttcgtgtgcctgaactgcggcttcgagacacacgcagccgagcaagccgccctgaacatcgccagatcctggctgttcctgcggagccaggagtacaagaaataccagacaaacaagacaaccggcaacaccgataagagagccttcgtcgagacctggcagtccttttaccggaagaagcttaaggaggtgtggaaacctgccgtgcggtctggcggatctggcggaggctccacaagcgccaagggcctgctgaccttcggcgacgtggccatcgagttcagccaggaggagtgggagtgcctgagccacacccagagggagctgtacagggacgtgatcctggagaactacggccacctgctgttcctgggcgtgatcgtgagcaagcccgacctggtgagcctgctggagcagaggaaggagccctggggcgagaagaggaacaagaccaggatccacgtgggcaagaaccccttcggcaccagccccaagaaaaagagaaaagtctaagctgccttctgcggggcttgccttctggccatgcccttcttctctcccttgcacctgtacctcttggtctttgaataaagcctgagtaggaaggctagcaaaaaaaaaaaaaaaaaaaaaaaaaaaaaaaaaaaaaaaaaaaaaaaaaaaaaaaaaaaaaaaaaaaaaaaaaaaaaaaa

SEQ ID NO: 6127 - RNA, 5797 nt, synthetic construct
  source 1..5797: mol_type = other RNA
aggaaataagagagaaaagaagagtaagaagaaatataagagccaccatggcccctaagaagaagcgtaaagtgagccggatggaacgcctcgtctacgaggtgcggcagaagtgcagaaacatcgaggacatctgcatctcctgcggatctctgaacgtgaccctggagcacccactgttcatcggcggcatgtgccagaactgtaaaaactgttttctggagtgtgcctatcaatacgacgatgacggctaccagagctactgcaccatctgttgcggcggaagagaggtgctgatgtgtggaaataacaactgctgccggtgcttctgcgtggaatgcgtggacctgctggtgggccccggcgccgcccaggccgctattaaggaagatccttggaactgctacatgtgcggccacaagggcacatacggcctgctgagacggagagaggactggcctagcagactgcagatgttcttcgccaataaccacgaccaggagttcgacccccctaaggtgtaccctcccgtccccgccgagaagagaaagcccatccgggtcctgagcctgttcgatggcatcgccaccggtctgctggtgctgaaggacctgggcatccaggtggataggtacattgcctccgaggtgtgcgaggactccatcaccgtgggaatggtgcgtcatcagggcaagatcatgtacgtgggcgacgtgcggagcgtgacacagaagcatatccaggagtggggccctttcgacctggtgatcggcggcagcccttgcaatgacctgagcatcgtgaacccagcccggaagggcctgtacgagggaaccggcagactgttcttcgagttttacagactgctgcacgacgcccggcctaaggaaggcgacgaccggcccttcttttggctgttcgagaatgtggtggccatgggagtcagcgacaagcgggatattagccggttcctggagagcaaccccgtgatgatcgatgccaaggaagtgagcgccgcccaccgggccagatacttctggggcaatctgcctggcatgaacagacccctggccagcaccgtgaacgacaagctggagctgcaggagtgcctggagcacggccggatcgccaagttcagcaaggtgagaaccatcaccacccgaagcaacagcatcaaacaaggcaaggaccagcactttcctgtgttcatgaacgagaaggaggacatcctgtggtgtaccgagatggagagagtgttcgggttcccagtccactacacagatgtcagcaacatgtctagactggccagacagagactgctgggaagaagctggtccgtccctgtgatcagacacctgttcgcccctctgaaggagtacttcgcctgcgtgagcagcggcaacagcaacgccaacagccggggccccagcttctctagcggcctggtgccactgtccctgagagggagccacatgggccccatggagatctacaaaaccgtgagcgcctggaagcggcagcctgtgcgcgtgctgagcctgtttcggaatatcgataaagtcctgaaaagcctgggattcctggagagcggctctggctccggcggtggcaccctgaagtacgtggaggatgtgacaaacgtggtcagacgggatgtggagaagtggggccccttcgatctggtgtacggcagcacccaacccctgggcagctcttgtgaccggtgccctggctggtacatgtttcagttccaccggatcctgcagtacgccctgccgagacaggagtcccagcggccattcttttggattttcatggacaacttgctgctgaccgaggatgaccaggaaactaccactcggttcctgcagaccgaagccgtgaccctgcaggacgtgagaggccgggactaccagaacgccatgcgggtgtggtccaacatccctggactgaaaagcaagcacgcacctctgacccctaaagaagaggagtacctgcaggcccaggtgcggagcagaagcaagctggacgcccctaaggtggatctgctggtgaagaattgcctcctgcccctgagagagtacttcaagtatttcagccagaatagtctgcccctgggcggcccaagcagcggcgcccctcctcccagcggcggcagcccagccggctccccaacctctaccgaggagggcacctctgagtccgccacccccgagagcggccctggcacctccaccgagcccagcgagggcagcgcacccggcagccctgccggcagccccacctccacagaggagggaaccagcaccgagcccagcgaaggcagcgccccaggcaccagcaccgagcctagtgagggcggctctggcggcggcagcgcccaggagattaaacggatcaacaagatcagaagaagacttgtgaaagacagcaacaccaagaaggccggcaagacaggccccatgaaaaccctgctggttagagtgatgacacccgatctgagagagcggctggaaaacctgagaaagaagcctgaaaatatcccccagcccatcagcaatacatctagagccaacctgaataagctgctgaccgattacaccgaaatgaagaaggcgatcctgcatgtgtactgggaagagttccagaaggaccctgtgggcctgatgagccgggtggcccagcctgccagcaagaagatcgatcagaacaagctgaaacctgagatggacgagaagggcaacctgaccaccgccggctttgcctgctctcagtgtggccagcccctgttcgtgtacaagctggagcaggtgtctgagaagggcaaggcttacaccaactacttcggacggtgcaatgtggccgagcacgaaaagctgatcctgctggcccagctgaagcccgagaaggatagcgacgaagccgtgacatatagcctgggaaagtttgggcagagggccctggatttctacagcattcatgtgaccaaggagtccacccaccccgtgaagcccctggcccagatcgccggaaacagatacgcctccggacctgtgggaaaggccctgagcgacgcatgtatgggcacaatcgcctccttcctgtctaagtaccaggacatcatcatcgaacaccagaaggtggtgaagggcaaccagaagagactggagagcctgcgggagctggccggcaaggaaaacctggaataccctagcgtgaccctgccacctcagcctcacaccaaggagggcgttgatgcctacaacgaagtgatcgcccgggtgcgaatgtgggtgaacctgaacctgtggcagaagctgaagctaagcagagatgatgccaagcctctgctgagactgaagggattcccttcctttcctctggtcgagagacaggccaacgaagtggactggtgggacatggtgtgtaacgtgaagaagctgatcaacgagaaaaaggaggatggcaaggtgttttggcagaatctggctggctacaagagacaggaagccctgagaccatacctgagcagcgaggaagatcggaagaagggaaagaaattcgctcggtaccagctgggcgacctgctgctgcacctggaaaagaagcacggcgaggactggggaaaggtgtacgacgaggcctgggagcggattgacaagaaagtggaaggcctgagcaagcacatcaagctggaagaggaacggagaagcgaggacgcccagagcaaggccgccctgaccgactggctgcgggctaaggccagcttcgtgatcgagggcctgaaggaggccgacaaggacgagttctgcagatgcgagctgaagctgcagaagtggtacggggacctgcggggaaagcccttcgccatcgaagccgagaacagcatcctggacatcagcggcttcagcaagcagtacaactgtgccttcatctggcagaaggacggcgtgaagaagctgaacctgtacctgatcatcaactacttcaagggcggcaagctgcggttcaagaagatcaaacctgaagccttcgaagccaacagattctacaccgtgatcaacaaaaagagcggcgagatcgtgcccatggaggtgaacttcaacttcgacgaccccaacctgatcatcctgcctctggcctttggcaagagacagggcagagaattcatctggaacgacctgctgtccctggaaaccggcagcctgaagctggccaacggaagagtgatcgagaagacactgtacaacagaagaacccggcaggatgagcctgccctgttcgtggccctgaccttcgagcggcgggaggtcctggactcctccaatatcaaaccaatgaacctgatcggcgtggcaagaggcgaaaacatccccgccgtgatcgccctgaccgaccccgagggctgcccactgagccggtttaaggatagcctgggaaacccaacccacatcctgagaatcggcgagagctataaggagaagcagcggaccatccaggccaagaaggaggtggagcagcggagagccggcggctacagccggaagtacgccagcaaagccaagaatctggcagacgatatggtgagaaacaccgctagagatctgctgtactacgccgtgacccaggatgccatgctgatcttcgccaacctgagccggggcttcggccggcagggcaagcggaccttcatggccgagagacagtacacacggatggaggactggctgaccgccaagctggcctacgagggcctgagcaagacctacctgtccaagacactggcccagtacacctccaagacatgcagcaactgtgggtttaccatcaccagcgccgactacgacagggtgctggagaagctgaagaagacagcaacaggctggatgaccacaattaacggcaaggagctgaaggtggagggccagattacctactacaacagatacaagagacagaacgtagtcaaggacctgtccgtcgagctggatagactgagcgaagaatctgtgaacaacgacatctcctcctggacaaagggcagaagcggagaagctctgagcctcctgaagaaaagattctcccatagacccgtgcaggagaagttcgtgtgcctgaactgcggcttcgagacacacgcagccgagcaagccgccctgaacatcgccagatcctggctgttcctgcggagccaggagtacaagaaataccagacaaacaagacaaccggcaacaccgataagagagccttcgtcgagacctggcagtccttttaccggaagaagcttaaggaggtgtggaaacctgccgtgcggtctggcggatctggcggaggctccacaagcgaggaggtgcccgtggtgttcgaggacgtggccgtgtacttcaccagggaggagtggggcaccctggacaagaggcagaaggagctgtacagggacgtgatgaggatgaactacgagctgctggccagcctgggccccgccgccgccaagcccgacctgatcagcaagctggagaggagggccgccccctggatcaaggaccccaacggccccaagtggggcaagggcaggccccccggcaagaccagccccaagaaaaagagaaaagtctaagctgccttctgcggggcttgccttctggccatgcccttcttctctcccttgcacctgtacctcttggtctttgaataaagcctgagtaggaaggctagcaaaaaaaaaaaaaaaaaaaaaaaaaaaaaaaaaaaaaaaaaaaaaaaaaaaaaaaaaaaaaaaaaaaaaaaaaaaaaaaa

SEQ ID NO: 6128 - RNA, 5797 nt, synthetic construct
  source 1..5797: mol_type = other RNA
aggaaataagagagaaaagaagagtaagaagaaatataagagccaccatggcccctaagaagaagcgtaaagtgagccggatggaacgcctcgtctacgaggtgcggcagaagtgcagaaacatcgaggacatctgcatctcctgcggatctctgaacgtgaccctggagcacccactgttcatcggcggcatgtgccagaactgtaaaaactgttttctggagtgtgcctatcaatacgacgatgacggctaccagagctactgcaccatctgttgcggcggaagagaggtgctgatgtgtggaaataacaactgctgccggtgcttctgcgtggaatgcgtggacctgctggtgggccccggcgccgcccaggccgctattaaggaagatccttggaactgctacatgtgcggccacaagggcacatacggcctgctgagacggagagaggactggcctagcagactgcagatgttcttcgccaataaccacgaccaggagttcgacccccctaaggtgtaccctcccgtccccgccgagaagagaaagcccatccgggtcctgagcctgttcgatggcatcgccaccggtctgctggtgctgaaggacctgggcatccaggtggataggtacattgcctccgaggtgtgcgaggactccatcaccgtgggaatggtgcgtcatcagggcaagatcatgtacgtgggcgacgtgcggagcgtgacacagaagcatatccaggagtggggccctttcgacctggtgatcggcggcagcccttgcaatgacctgagcatcgtgaacccagcccggaagggcctgtacgagggaaccggcagactgttcttcgagttttacagactgctgcacgacgcccggcctaaggaaggcgacgaccggcccttcttttggctgttcgagaatgtggtggccatgggagtcagcgacaagcgggatattagccggttcctggagagcaaccccgtgatgatcgatgccaaggaagtgagcgccgcccaccgggccagatacttctggggcaatctgcctggcatgaacagacccctggccagcaccgtgaacgacaagctggagctgcaggagtgcctggagcacggccggatcgccaagttcagcaaggtgagaaccatcaccacccgaagcaacagcatcaaacaaggcaaggaccagcactttcctgtgttcatgaacgagaaggaggacatcctgtggtgtaccgagatggagagagtgttcgggttcccagtccactacacagatgtcagcaacatgtctagactggccagacagagactgctgggaagaagctggtccgtccctgtgatcagacacctgttcgcccctctgaaggagtacttcgcctgcgtgagcagcggcaacagcaacgccaacagccggggccccagcttctctagcggcctggtgccactgtccctgagagggagccacatgggccccatggagatctacaaaaccgtgagcgcctggaagcggcagcctgtgcgcgtgctgagcctgtttcggaatatcgataaagtcctgaaaagcctgggattcctggagagcggctctggctccggcggtggcaccctgaagtacgtggaggatgtgacaaacgtggtcagacgggatgtggagaagtggggccccttcgatctggtgtacggcagcacccaacccctgggcagctcttgtgaccggtgccctggctggtacatgtttcagttccaccggatcctgcagtacgccctgccgagacaggagtcccagcggccattcttttggattttcatggacaacttgctgctgaccgaggatgaccaggaaactaccactcggttcctgcagaccgaagccgtgaccctgcaggacgtgagaggccgggactaccagaacgccatgcgggtgtggtccaacatccctggactgaaaagcaagcacgcacctctgacccctaaagaagaggagtacctgcaggcccaggtgcggagcagaagcaagctggacgcccctaaggtggatctgctggtgaagaattgcctcctgcccctgagagagtacttcaagtatttcagccagaatagtctgcccctgggcggcccaagcagcggcgcccctcctcccagcggcggcagcccagccggctccccaacctctaccgaggagggcacctctgagtccgccacccccgagagcggccctggcacctccaccgagcccagcgagggcagcgcacccggcagccctgccggcagccccacctccacagaggagggaaccagcaccgagcccagcgaaggcagcgccccaggcaccagcaccgagcctagtgagggcggctctggcggcggcagcgcccaggagattaaacggatcaacaagatcagaagaagacttgtgaaagacagcaacaccaagaaggccggcaagacaggccccatgaaaaccctgctggttagagtgatgacacccgatctgagagagcggctggaaaacctgagaaagaagcctgaaaatatcccccagcccatcagcaatacatctagagccaacctgaataagctgctgaccgattacaccgaaatgaagaaggcgatcctgcatgtgtactgggaagagttccagaaggaccctgtgggcctgatgagccgggtggcccagcctgccagcaagaagatcgatcagaacaagctgaaacctgagatggacgagaagggcaacctgaccaccgccggctttgcctgctctcagtgtggccagcccctgttcgtgtacaagctggagcaggtgtctgagaagggcaaggcttacaccaactacttcggacggtgcaatgtggccgagcacgaaaagctgatcctgctggcccagctgaagcccgagaaggatagcgacgaagccgtgacatatagcctgggaaagtttgggcagagggccctggatttctacagcattcatgtgaccaaggagtccacccaccccgtgaagcccctggcccagatcgccggaaacagatacgcctccggacctgtgggaaaggccctgagcgacgcatgtatgggcacaatcgcctccttcctgtctaagtaccaggacatcatcatcgaacaccagaaggtggtgaagggcaaccagaagagactggagagcctgcgggagctggccggcaaggaaaacctggaataccctagcgtgaccctgccacctcagcctcacaccaaggagggcgttgatgcctacaacgaagtgatcgcccgggtgcgaatgtgggtgaacctgaacctgtggcagaagctgaagctaagcagagatgatgccaagcctctgctgagactgaagggattcccttcctttcctctggtcgagagacaggccaacgaagtggactggtgggacatggtgtgtaacgtgaagaagctgatcaacgagaaaaaggaggatggcaaggtgttttggcagaatctggctggctacaagagacaggaagccctgagaccatacctgagcagcgaggaagatcggaagaagggaaagaaattcgctcggtaccagctgggcgacctgctgctgcacctggaaaagaagcacggcgaggactggggaaaggtgtacgacgaggcctgggagcggattgacaagaaagtggaaggcctgagcaagcacatcaagctggaagaggaacggagaagcgaggacgcccagagcaaggccgccctgaccgactggctgcgggctaaggccagcttcgtgatcgagggcctgaaggaggccgacaaggacgagttctgcagatgcgagctgaagctgcagaagtggtacggggacctgcggggaaagcccttcgccatcgaagccgagaacagcatcctggacatcagcggcttcagcaagcagtacaactgtgccttcatctggcagaaggacggcgtgaagaagctgaacctgtacctgatcatcaactacttcaagggcggcaagctgcggttcaagaagatcaaacctgaagccttcgaagccaacagattctacaccgtgatcaacaaaaagagcggcgagatcgtgcccatggaggtgaacttcaacttcgacgaccccaacctgatcatcctgcctctggcctttggcaagagacagggcagagaattcatctggaacgacctgctgtccctggaaaccggcagcctgaagctggccaacggaagagtgatcgagaagacactgtacaacagaagaacccggcaggatgagcctgccctgttcgtggccctgaccttcgagcggcgggaggtcctggactcctccaatatcaaaccaatgaacctgatcggcgtggcaagaggcgaaaacatccccgccgtgatcgccctgaccgaccccgagggctgcccactgagccggtttaaggatagcctgggaaacccaacccacatcctgagaatcggcgagagctataaggagaagcagcggaccatccaggccaagaaggaggtggagcagcggagagccggcggctacagccggaagtacgccagcaaagccaagaatctggcagacgatatggtgagaaacaccgctagagatctgctgtactacgccgtgacccaggatgccatgctgatcttcgccaacctgagccggggcttcggccggcagggcaagcggaccttcatggccgagagacagtacacacggatggaggactggctgaccgccaagctggcctacgagggcctgagcaagacctacctgtccaagacactggcccagtacacctccaagacatgcagcaactgtgggtttaccatcaccagcgccgactacgacagggtgctggagaagctgaagaagacagcaacaggctggatgaccacaattaacggcaaggagctgaaggtggagggccagattacctactacaacagatacaagagacagaacgtagtcaaggacctgtccgtcgagctggatagactgagcgaagaatctgtgaacaacgacatctcctcctggacaaagggcagaagcggagaagctctgagcctcctgaagaaaagattctcccatagacccgtgcaggagaagttcgtgtgcctgaactgcggcttcgagacacacgcagccgagcaagccgccctgaacatcgccagatcctggctgttcctgcggagccaggagtacaagaaataccagacaaacaagacaaccggcaacaccgataagagagccttcgtcgagacctggcagtccttttaccggaagaagcttaaggaggtgtggaaacctgccgtgcggtctggcggatctggcggaggctccacaagcccccccgagagcgtgaccttcgaggacgtggccgtgtacttcacccagaaggagtgggccagcctgatgcccgcccagaaggccctgtacagggacgtgatgctggagaactacgaggccgtggccttcctggcccccgccaccagcaagcccgccctgatcagccagctggagcagggcgtggagcccagcttcagccaggcccagggcgacctgagcatgagggacaggggcgccggcctgaccagccccaagaaaaagagaaaagtctaagctgccttctgcggggcttgccttctggccatgcccttcttctctcccttgcacctgtacctcttggtctttgaataaagcctgagtaggaaggctagcaaaaaaaaaaaaaaaaaaaaaaaaaaaaaaaaaaaaaaaaaaaaaaaaaaaaaaaaaaaaaaaaaaaaaaaaaaaaaaaa

SEQ ID NO: 6129 - RNA, 5797 nt, synthetic construct
  source 1..5797: mol_type = other RNA
aggaaataagagagaaaagaagagtaagaagaaatataagagccaccatggcccctaagaagaagcgtaaagtgagccggatggaacgcctcgtctacgaggtgcggcagaagtgcagaaacatcgaggacatctgcatctcctgcggatctctgaacgtgaccctggagcacccactgttcatcggcggcatgtgccagaactgtaaaaactgttttctggagtgtgcctatcaatacgacgatgacggctaccagagctactgcaccatctgttgcggcggaagagaggtgctgatgtgtggaaataacaactgctgccggtgcttctgcgtggaatgcgtggacctgctggtgggccccggcgccgcccaggccgctattaaggaagatccttggaactgctacatgtgcggccacaagggcacatacggcctgctgagacggagagaggactggcctagcagactgcagatgttcttcgccaataaccacgaccaggagttcgacccccctaaggtgtaccctcccgtccccgccgagaagagaaagcccatccgggtcctgagcctgttcgatggcatcgccaccggtctgctggtgctgaaggacctgggcatccaggtggataggtacattgcctccgaggtgtgcgaggactccatcaccgtgggaatggtgcgtcatcagggcaagatcatgtacgtgggcgacgtgcggagcgtgacacagaagcatatccaggagtggggccctttcgacctggtgatcggcggcagcccttgcaatgacctgagcatcgtgaacccagcccggaagggcctgtacgagggaaccggcagactgttcttcgagttttacagactgctgcacgacgcccggcctaaggaaggcgacgaccggcccttcttttggctgttcgagaatgtggtggccatgggagtcagcgacaagcgggatattagccggttcctggagagcaaccccgtgatgatcgatgccaaggaagtgagcgccgcccaccgggccagatacttctggggcaatctgcctggcatgaacagacccctggccagcaccgtgaacgacaagctggagctgcaggagtgcctggagcacggccggatcgccaagttcagcaaggtgagaaccatcaccacccgaagcaacagcatcaaacaaggcaaggaccagcactttcctgtgttcatgaacgagaaggaggacatcctgtggtgtaccgagatggagagagtgttcgggttcccagtccactacacagatgtcagcaacatgtctagactggccagacagagactgctgggaagaagctggtccgtccctgtgatcagacacctgttcgcccctctgaaggagtacttcgcctgcgtgagcagcggcaacagcaacgccaacagccggggccccagcttctctagcggcctggtgccactgtccctgagagggagccacatgggccccatggagatctacaaaaccgtgagcgcctggaagcggcagcctgtgcgcgtgctgagcctgtttcggaatatcgataaagtcctgaaaagcctgggattcctggagagcggctctggctccggcggtggcaccctgaagtacgtggaggatgtgacaaacgtggtcagacgggatgtggagaagtggggccccttcgatctggtgtacggcagcacccaacccctgggcagctcttgtgaccggtgccctggctggtacatgtttcagttccaccggatcctgcagtacgccctgccgagacaggagtcccagcggccattcttttggattttcatggacaacttgctgctgaccgaggatgaccaggaaactaccactcggttcctgcagaccgaagccgtgaccctgcaggacgtgagaggccgggactaccagaacgccatgcgggtgtggtccaacatccctggactgaaaagcaagcacgcacctctgacccctaaagaagaggagtacctgcaggcccaggtgcggagcagaagcaagctggacgcccctaaggtggatctgctggtgaagaattgcctcctgcccctgagagagtacttcaagtatttcagccagaatagtctgcccctgggcggcccaagcagcggcgcccctcctcccagcggcggcagcccagccggctccccaacctctaccgaggagggcacctctgagtccgccacccccgagagcggccctggcacctccaccgagcccagcgagggcagcgcacccggcagccctgccggcagccccacctccacagaggagggaaccagcaccgagcccagcgaaggcagcgccccaggcaccagcaccgagcctagtgagggcggctctggcggcggcagcgcccaggagattaaacggatcaacaagatcagaagaagacttgtgaaagacagcaacaccaagaaggccggcaagacaggccccatgaaaaccctgctggttagagtgatgacacccgatctgagagagcggctggaaaacctgagaaagaagcctgaaaatatcccccagcccatcagcaatacatctagagccaacctgaataagctgctgaccgattacaccgaaatgaagaaggcgatcctgcatgtgtactgggaagagttccagaaggaccctgtgggcctgatgagccgggtggcccagcctgccagcaagaagatcgatcagaacaagctgaaacctgagatggacgagaagggcaacctgaccaccgccggctttgcctgctctcagtgtggccagcccctgttcgtgtacaagctggagcaggtgtctgagaagggcaaggcttacaccaactacttcggacggtgcaatgtggccgagcacgaaaagctgatcctgctggcccagctgaagcccgagaaggatagcgacgaagccgtgacatatagcctgggaaagtttgggcagagggccctggatttctacagcattcatgtgaccaaggagtccacccaccccgtgaagcccctggcccagatcgccggaaacagatacgcctccggacctgtgggaaaggccctgagcgacgcatgtatgggcacaatcgcctccttcctgtctaagtaccaggacatcatcatcgaacaccagaaggtggtgaagggcaaccagaagagactggagagcctgcgggagctggccggcaaggaaaacctggaataccctagcgtgaccctgccacctcagcctcacaccaaggagggcgttgatgcctacaacgaagtgatcgcccgggtgcgaatgtgggtgaacctgaacctgtggcagaagctgaagctaagcagagatgatgccaagcctctgctgagactgaagggattcccttcctttcctctggtcgagagacaggccaacgaagtggactggtgggacatggtgtgtaacgtgaagaagctgatcaacgagaaaaaggaggatggcaaggtgttttggcagaatctggctggctacaagagacaggaagccctgagaccatacctgagcagcgaggaagatcggaagaagggaaagaaattcgctcggtaccagctgggcgacctgctgctgcacctggaaaagaagcacggcgaggactggggaaaggtgtacgacgaggcctgggagcggattgacaagaaagtggaaggcctgagcaagcacatcaagctggaagaggaacggagaagcgaggacgcccagagcaaggccgccctgaccgactggctgcgggctaaggccagcttcgtgatcgagggcctgaaggaggccgacaaggacgagttctgcagatgcgagctgaagctgcagaagtggtacggggacctgcggggaaagcccttcgccatcgaagccgagaacagcatcctggacatcagcggcttcagcaagcagtacaactgtgccttcatctggcagaaggacggcgtgaagaagctgaacctgtacctgatcatcaactacttcaagggcggcaagctgcggttcaagaagatcaaacctgaagccttcgaagccaacagattctacaccgtgatcaacaaaaagagcggcgagatcgtgcccatggaggtgaacttcaacttcgacgaccccaacctgatcatcctgcctctggcctttggcaagagacagggcagagaattcatctggaacgacctgctgtccctggaaaccggcagcctgaagctggccaacggaagagtgatcgagaagacactgtacaacagaagaacccggcaggatgagcctgccctgttcgtggccctgaccttcgagcggcgggaggtcctggactcctccaatatcaaaccaatgaacctgatcggcgtggcaagaggcgaaaacatccccgccgtgatcgccctgaccgaccccgagggctgcccactgagccggtttaaggatagcctgggaaacccaacccacatcctgagaatcggcgagagctataaggagaagcagcggaccatccaggccaagaaggaggtggagcagcggagagccggcggctacagccggaagtacgccagcaaagccaagaatctggcagacgatatggtgagaaacaccgctagagatctgctgtactacgccgtgacccaggatgccatgctgatcttcgccaacctgagccggggcttcggccggcagggcaagcggaccttcatggccgagagacagtacacacggatggaggactggctgaccgccaagctggcctacgagggcctgagcaagacctacctgtccaagacactggcccagtacacctccaagacatgcagcaactgtgggtttaccatcaccagcgccgactacgacagggtgctggagaagctgaagaagacagcaacaggctggatgaccacaattaacggcaaggagctgaaggtggagggccagattacctactacaacagatacaagagacagaacgtagtcaaggacctgtccgtcgagctggatagactgagcgaagaatctgtgaacaacgacatctcctcctggacaaagggcagaagcggagaagctctgagcctcctgaagaaaagattctcccatagacccgtgcaggagaagttcgtgtgcctgaactgcggcttcgagacacacgcagccgagcaagccgccctgaacatcgccagatcctggctgttcctgcggagccaggagtacaagaaataccagacaaacaagacaaccggcaacaccgataagagagccttcgtcgagacctggcagtccttttaccggaagaagcttaaggaggtgtggaaacctgccgtgcggtctggcggatctggcggaggctccacaagcttccagggcagcatcagcttcaaggacgtgaccgtgggcttcacccaggaggagtggcagcacctggaccccagccagagggccctgtacagggacgtgatgctggagaactacagcaacctggtgagcgtgggctactgcgtgcacaagcccgaggtgatcagcaggctggagcagggcgaggagccctggaggctggaggaggagttccccagccagagcttccccgtgtggaccgccgacaccagccccaagaaaaagagaaaagtctaagctgccttctgcggggcttgccttctggccatgcccttcttctctcccttgcacctgtacctcttggtctttgaataaagcctgagtaggaaggctagcaaaaaaaaaaaaaaaaaaaaaaaaaaaaaaaaaaaaaaaaaaaaaaaaaaaaaaaaaaaaaaaaaaaaaaaaaaaaaaaa

SEQ ID NO: 6130 - RNA, 5797 nt, synthetic construct
  source 1..5797: mol_type = other RNA
aggaaataagagagaaaagaagagtaagaagaaatataagagccaccatggcccctaagaagaagcgtaaagtgagccggatggaacgcctcgtctacgaggtgcggcagaagtgcagaaacatcgaggacatctgcatctcctgcggatctctgaacgtgaccctggagcacccactgttcatcggcggcatgtgccagaactgtaaaaactgttttctggagtgtgcctatcaatacgacgatgacggctaccagagctactgcaccatctgttgcggcggaagagaggtgctgatgtgtggaaataacaactgctgccggtgcttctgcgtggaatgcgtggacctgctggtgggccccggcgccgcccaggccgctattaaggaagatccttggaactgctacatgtgcggccacaagggcacatacggcctgctgagacggagagaggactggcctagcagactgcagatgttcttcgccaataaccacgaccaggagttcgacccccctaaggtgtaccctcccgtccccgccgagaagagaaagcccatccgggtcctgagcctgttcgatggcatcgccaccggtctgctggtgctgaaggacctgggcatccaggtggataggtacattgcctccgaggtgtgcgaggactccatcaccgtgggaatggtgcgtcatcagggcaagatcatgtacgtgggcgacgtgcggagcgtgacacagaagcatatccaggagtggggccctttcgacctggtgatcggcggcagcccttgcaatgacctgagcatcgtgaacccagcccggaagggcctgtacgagggaaccggcagactgttcttcgagttttacagactgctgcacgacgcccggcctaaggaaggcgacgaccggcccttcttttggctgttcgagaatgtggtggccatgggagtcagcgacaagcgggatattagccggttcctggagagcaaccccgtgatgatcgatgccaaggaagtgagcgccgcccaccgggccagatacttctggggcaatctgcctggcatgaacagacccctggccagcaccgtgaacgacaagctggagctgcaggagtgcctggagcacggccggatcgccaagttcagcaaggtgagaaccatcaccacccgaagcaacagcatcaaacaaggcaaggaccagcactttcctgtgttcatgaacgagaaggaggacatcctgtggtgtaccgagatggagagagtgttcgggttcccagtccactacacagatgtcagcaacatgtctagactggccagacagagactgctgggaagaagctggtccgtccctgtgatcagacacctgttcgcccctctgaaggagtacttcgcctgcgtgagcagcggcaacagcaacgccaacagccggggccccagcttctctagcggcctggtgccactgtccctgagagggagccacatgggccccatggagatctacaaaaccgtgagcgcctggaagcggcagcctgtgcgcgtgctgagcctgtttcggaatatcgataaagtcctgaaaagcctgggattcctggagagcggctctggctccggcggtggcaccctgaagtacgtggaggatgtgacaaacgtggtcagacgggatgtggagaagtggggccccttcgatctggtgtacggcagcacccaacccctgggcagctcttgtgaccggtgccctggctggtacatgtttcagttccaccggatcctgcagtacgccctgccgagacaggagtcccagcggccattcttttggattttcatggacaacttgctgctgaccgaggatgaccaggaaactaccactcggttcctgcagaccgaagccgtgaccctgcaggacgtgagaggccgggactaccagaacgccatgcgggtgtggtccaacatccctggactgaaaagcaagcacgcacctctgacccctaaagaagaggagtacctgcaggcccaggtgcggagcagaagcaagctggacgcccctaaggtggatctgctggtgaagaattgcctcctgcccctgagagagtacttcaagtatttcagccagaatagtctgcccctgggcggcccaagcagcggcgcccctcctcccagcggcggcagcccagccggctccccaacctctaccgaggagggcacctctgagtccgccacccccgagagcggccctggcacctccaccgagcccagcgagggcagcgcacccggcagccctgccggcagccccacctccacagaggagggaaccagcaccgagcccagcgaaggcagcgccccaggcaccagcaccgagcctagtgagggcggctctggcggcggcagcgcccaggagattaaacggatcaacaagatcagaagaagacttgtgaaagacagcaacaccaagaaggccggcaagacaggccccatgaaaaccctgctggttagagtgatgacacccgatctgagagagcggctggaaaacctgagaaagaagcctgaaaatatcccccagcccatcagcaatacatctagagccaacctgaataagctgctgaccgattacaccgaaatgaagaaggcgatcctgcatgtgtactgggaagagttccagaaggaccctgtgggcctgatgagccgggtggcccagcctgccagcaagaagatcgatcagaacaagctgaaacctgagatggacgagaagggcaacctgaccaccgccggctttgcctgctctcagtgtggccagcccctgttcgtgtacaagctggagcaggtgtctgagaagggcaaggcttacaccaactacttcggacggtgcaatgtggccgagcacgaaaagctgatcctgctggcccagctgaagcccgagaaggatagcgacgaagccgtgacatatagcctgggaaagtttgggcagagggccctggatttctacagcattcatgtgaccaaggagtccacccaccccgtgaagcccctggcccagatcgccggaaacagatacgcctccggacctgtgggaaaggccctgagcgacgcatgtatgggcacaatcgcctccttcctgtctaagtaccaggacatcatcatcgaacaccagaaggtggtgaagggcaaccagaagagactggagagcctgcgggagctggccggcaaggaaaacctggaataccctagcgtgaccctgccacctcagcctcacaccaaggagggcgttgatgcctacaacgaagtgatcgcccgggtgcgaatgtgggtgaacctgaacctgtggcagaagctgaagctaagcagagatgatgccaagcctctgctgagactgaagggattcccttcctttcctctggtcgagagacaggccaacgaagtggactggtgggacatggtgtgtaacgtgaagaagctgatcaacgagaaaaaggaggatggcaaggtgttttggcagaatctggctggctacaagagacaggaagccctgagaccatacctgagcagcgaggaagatcggaagaagggaaagaaattcgctcggtaccagctgggcgacctgctgctgcacctggaaaagaagcacggcgaggactggggaaaggtgtacgacgaggcctgggagcggattgacaagaaagtggaaggcctgagcaagcacatcaagctggaagaggaacggagaagcgaggacgcccagagcaaggccgccctgaccgactggctgcgggctaaggccagcttcgtgatcgagggcctgaaggaggccgacaaggacgagttctgcagatgcgagctgaagctgcagaagtggtacggggacctgcggggaaagcccttcgccatcgaagccgagaacagcatcctggacatcagcggcttcagcaagcagtacaactgtgccttcatctggcagaaggacggcgtgaagaagctgaacctgtacctgatcatcaactacttcaagggcggcaagctgcggttcaagaagatcaaacctgaagccttcgaagccaacagattctacaccgtgatcaacaaaaagagcggcgagatcgtgcccatggaggtgaacttcaacttcgacgaccccaacctgatcatcctgcctctggcctttggcaagagacagggcagagaattcatctggaacgacctgctgtccctggaaaccggcagcctgaagctggccaacggaagagtgatcgagaagacactgtacaacagaagaacccggcaggatgagcctgccctgttcgtggccctgaccttcgagcggcgggaggtcctggactcctccaatatcaaaccaatgaacctgatcggcgtggcaagaggcgaaaacatccccgccgtgatcgccctgaccgaccccgagggctgcccactgagccggtttaaggatagcctgggaaacccaacccacatcctgagaatcggcgagagctataaggagaagcagcggaccatccaggccaagaaggaggtggagcagcggagagccggcggctacagccggaagtacgccagcaaagccaagaatctggcagacgatatggtgagaaacaccgctagagatctgctgtactacgccgtgacccaggatgccatgctgatcttcgccaacctgagccggggcttcggccggcagggcaagcggaccttcatggccgagagacagtacacacggatggaggactggctgaccgccaagctggcctacgagggcctgagcaagacctacctgtccaagacactggcccagtacacctccaagacatgcagcaactgtgggtttaccatcaccagcgccgactacgacagggtgctggagaagctgaagaagacagcaacaggctggatgaccacaattaacggcaaggagctgaaggtggagggccagattacctactacaacagatacaagagacagaacgtagtcaaggacctgtccgtcgagctggatagactgagcgaagaatctgtgaacaacgacatctcctcctggacaaagggcagaagcggagaagctctgagcctcctgaagaaaagattctcccatagacccgtgcaggagaagttcgtgtgcctgaactgcggcttcgagacacacgcagccgagcaagccgccctgaacatcgccagatcctggctgttcctgcggagccaggagtacaagaaataccagacaaacaagacaaccggcaacaccgataagagagccttcgtcgagacctggcagtccttttaccggaagaagcttaaggaggtgtggaaacctgccgtgcggtctggcggatctggcggaggctccacaagcagccagggcctggtgaccttcggcgacgtggccgtggacttcagccaggaggagtgggagtggctggactgcgcccagaggaccctgtacaggagcgtgatgctggagaactacaggagcctggtgagcctgggcctgtgcgtgagcaagcccgagatgatcagcagcctggagcagaggaaggagccctggaccgtgaagaggaagtggaccaggggccagtgccccgacagcgaggccgtgaccagccccaagaaaaagagaaaagtctaagctgccttctgcggggcttgccttctggccatgcccttcttctctcccttgcacctgtacctcttggtctttgaataaagcctgagtaggaaggctagcaaaaaaaaaaaaaaaaaaaaaaaaaaaaaaaaaaaaaaaaaaaaaaaaaaaaaaaaaaaaaaaaaaaaaaaaaaaaaaaa

SEQ ID NO: 6131 - RNA, 5797 nt, synthetic construct
  source 1..5797: mol_type = other RNA
aggaaataagagagaaaagaagagtaagaagaaatataagagccaccatggcccctaagaagaagcgtaaagtgagccggatggaacgcctcgtctacgaggtgcggcagaagtgcagaaacatcgaggacatctgcatctcctgcggatctctgaacgtgaccctggagcacccactgttcatcggcggcatgtgccagaactgtaaaaactgttttctggagtgtgcctatcaatacgacgatgacggctaccagagctactgcaccatctgttgcggcggaagagaggtgctgatgtgtggaaataacaactgctgccggtgcttctgcgtggaatgcgtggacctgctggtgggccccggcgccgcccaggccgctattaaggaagatccttggaactgctacatgtgcggccacaagggcacatacggcctgctgagacggagagaggactggcctagcagactgcagatgttcttcgccaataaccacgaccaggagttcgacccccctaaggtgtaccctcccgtccccgccgagaagagaaagcccatccgggtcctgagcctgttcgatggcatcgccaccggtctgctggtgctgaaggacctgggcatccaggtggataggtacattgcctccgaggtgtgcgaggactccatcaccgtgggaatggtgcgtcatcagggcaagatcatgtacgtgggcgacgtgcggagcgtgacacagaagcatatccaggagtggggccctttcgacctggtgatcggcggcagcccttgcaatgacctgagcatcgtgaacccagcccggaagggcctgtacgagggaaccggcagactgttcttcgagttttacagactgctgcacgacgcccggcctaaggaaggcgacgaccggcccttcttttggctgttcgagaatgtggtggccatgggagtcagcgacaagcgggatattagccggttcctggagagcaaccccgtgatgatcgatgccaaggaagtgagcgccgcccaccgggccagatacttctggggcaatctgcctggcatgaacagacccctggccagcaccgtgaacgacaagctggagctgcaggagtgcctggagcacggccggatcgccaagttcagcaaggtgagaaccatcaccacccgaagcaacagcatcaaacaaggcaaggaccagcactttcctgtgttcatgaacgagaaggaggacatcctgtggtgtaccgagatggagagagtgttcgggttcccagtccactacacagatgtcagcaacatgtctagactggccagacagagactgctgggaagaagctggtccgtccctgtgatcagacacctgttcgcccctctgaaggagtacttcgcctgcgtgagcagcggcaacagcaacgccaacagccggggccccagcttctctagcggcctggtgccactgtccctgagagggagccacatgggccccatggagatctacaaaaccgtgagcgcctggaagcggcagcctgtgcgcgtgctgagcctgtttcggaatatcgataaagtcctgaaaagcctgggattcctggagagcggctctggctccggcggtggcaccctgaagtacgtggaggatgtgacaaacgtggtcagacgggatgtggagaagtggggccccttcgatctggtgtacggcagcacccaacccctgggcagctcttgtgaccggtgccctggctggtacatgtttcagttccaccggatcctgcagtacgccctgccgagacaggagtcccagcggccattcttttggattttcatggacaacttgctgctgaccgaggatgaccaggaaactaccactcggttcctgcagaccgaagccgtgaccctgcaggacgtgagaggccgggactaccagaacgccatgcgggtgtggtccaacatccctggactgaaaagcaagcacgcacctctgacccctaaagaagaggagtacctgcaggcccaggtgcggagcagaagcaagctggacgcccctaaggtggatctgctggtgaagaattgcctcctgcccctgagagagtacttcaagtatttcagccagaatagtctgcccctgggcggcccaagcagcggcgcccctcctcccagcggcggcagcccagccggctccccaacctctaccgaggagggcacctctgagtccgccacccccgagagcggccctggcacctccaccgagcccagcgagggcagcgcacccggcagccctgccggcagccccacctccacagaggagggaaccagcaccgagcccagcgaaggcagcgccccaggcaccagcaccgagcctagtgagggcggctctggcggcggcagcgcccaggagattaaacggatcaacaagatcagaagaagacttgtgaaagacagcaacaccaagaaggccggcaagacaggccccatgaaaaccctgctggttagagtgatgacacccgatctgagagagcggctggaaaacctgagaaagaagcctgaaaatatcccccagcccatcagcaatacatctagagccaacctgaataagctgctgaccgattacaccgaaatgaagaaggcgatcctgcatgtgtactgggaagagttccagaaggaccctgtgggcctgatgagccgggtggcccagcctgccagcaagaagatcgatcagaacaagctgaaacctgagatggacgagaagggcaacctgaccaccgccggctttgcctgctctcagtgtggccagcccctgttcgtgtacaagctggagcaggtgtctgagaagggcaaggcttacaccaactacttcggacggtgcaatgtggccgagcacgaaaagctgatcctgctggcccagctgaagcccgagaaggatagcgacgaagccgtgacatatagcctgggaaagtttgggcagagggccctggatttctacagcattcatgtgaccaaggagtccacccaccccgtgaagcccctggcccagatcgccggaaacagatacgcctccggacctgtgggaaaggccctgagcgacgcatgtatgggcacaatcgcctccttcctgtctaagtaccaggacatcatcatcgaacaccagaaggtggtgaagggcaaccagaagagactggagagcctgcgggagctggccggcaaggaaaacctggaataccctagcgtgaccctgccacctcagcctcacaccaaggagggcgttgatgcctacaacgaagtgatcgcccgggtgcgaatgtgggtgaacctgaacctgtggcagaagctgaagctaagcagagatgatgccaagcctctgctgagactgaagggattcccttcctttcctctggtcgagagacaggccaacgaagtggactggtgggacatggtgtgtaacgtgaagaagctgatcaacgagaaaaaggaggatggcaaggtgttttggcagaatctggctggctacaagagacaggaagccctgagaccatacctgagcagcgaggaagatcggaagaagggaaagaaattcgctcggtaccagctgggcgacctgctgctgcacctggaaaagaagcacggcgaggactggggaaaggtgtacgacgaggcctgggagcggattgacaagaaagtggaaggcctgagcaagcacatcaagctggaagaggaacggagaagcgaggacgcccagagcaaggccgccctgaccgactggctgcgggctaaggccagcttcgtgatcgagggcctgaaggaggccgacaaggacgagttctgcagatgcgagctgaagctgcagaagtggtacggggacctgcggggaaagcccttcgccatcgaagccgagaacagcatcctggacatcagcggcttcagcaagcagtacaactgtgccttcatctggcagaaggacggcgtgaagaagctgaacctgtacctgatcatcaactacttcaagggcggcaagctgcggttcaagaagatcaaacctgaagccttcgaagccaacagattctacaccgtgatcaacaaaaagagcggcgagatcgtgcccatggaggtgaacttcaacttcgacgaccccaacctgatcatcctgcctctggcctttggcaagagacagggcagagaattcatctggaacgacctgctgtccctggaaaccggcagcctgaagctggccaacggaagagtgatcgagaagacactgtacaacagaagaacccggcaggatgagcctgccctgttcgtggccctgaccttcgagcggcgggaggtcctggactcctccaatatcaaaccaatgaacctgatcggcgtggcaagaggcgaaaacatccccgccgtgatcgccctgaccgaccccgagggctgcccactgagccggtttaaggatagcctgggaaacccaacccacatcctgagaatcggcgagagctataaggagaagcagcggaccatccaggccaagaaggaggtggagcagcggagagccggcggctacagccggaagtacgccagcaaagccaagaatctggcagacgatatggtgagaaacaccgctagagatctgctgtactacgccgtgacccaggatgccatgctgatcttcgccaacctgagccggggcttcggccggcagggcaagcggaccttcatggccgagagacagtacacacggatggaggactggctgaccgccaagctggcctacgagggcctgagcaagacctacctgtccaagacactggcccagtacacctccaagacatgcagcaactgtgggtttaccatcaccagcgccgactacgacagggtgctggagaagctgaagaagacagcaacaggctggatgaccacaattaacggcaaggagctgaaggtggagggccagattacctactacaacagatacaagagacagaacgtagtcaaggacctgtccgtcgagctggatagactgagcgaagaatctgtgaacaacgacatctcctcctggacaaagggcagaagcggagaagctctgagcctcctgaagaaaagattctcccatagacccgtgcaggagaagttcgtgtgcctgaactgcggcttcgagacacacgcagccgagcaagccgccctgaacatcgccagatcctggctgttcctgcggagccaggagtacaagaaataccagacaaacaagacaaccggcaacaccgataagagagccttcgtcgagacctggcagtccttttaccggaagaagcttaaggaggtgtggaaacctgccgtgcggtctggcggatctggcggaggctccacaagcatgatcgagtaccagatccccgtgagcttcaaggacgtggtggtgggcttcacccaggaggagtggcaccagctgagccccgcccagagggccctgtacagggacgtgatgctggagacctacagcaacctggtgagcgtgggctacgagggcaccaagcccgacgtgatcctgaggctggagcaggaggaggccccctggatcggcgaggccgcctgcctgggctgccactgctggggcaagaccagccccaagaaaaagagaaaagtctaagctgccttctgcggggcttgccttctggccatgcccttcttctctcccttgcacctgtacctcttggtctttgaataaagcctgagtaggaaggctagcaaaaaaaaaaaaaaaaaaaaaaaaaaaaaaaaaaaaaaaaaaaaaaaaaaaaaaaaaaaaaaaaaaaaaaaaaaaaaaaa

SEQ ID NO: 6132 - RNA, 5797 nt, synthetic construct
  source 1..5797: mol_type = other RNA
aggaaataagagagaaaagaagagtaagaagaaatataagagccaccatggcccctaagaagaagcgtaaagtgagccggatggaacgcctcgtctacgaggtgcggcagaagtgcagaaacatcgaggacatctgcatctcctgcggatctctgaacgtgaccctggagcacccactgttcatcggcggcatgtgccagaactgtaaaaactgttttctggagtgtgcctatcaatacgacgatgacggctaccagagctactgcaccatctgttgcggcggaagagaggtgctgatgtgtggaaataacaactgctgccggtgcttctgcgtggaatgcgtggacctgctggtgggccccggcgccgcccaggccgctattaaggaagatccttggaactgctacatgtgcggccacaagggcacatacggcctgctgagacggagagaggactggcctagcagactgcagatgttcttcgccaataaccacgaccaggagttcgacccccctaaggtgtaccctcccgtccccgccgagaagagaaagcccatccgggtcctgagcctgttcgatggcatcgccaccggtctgctggtgctgaaggacctgggcatccaggtggataggtacattgcctccgaggtgtgcgaggactccatcaccgtgggaatggtgcgtcatcagggcaagatcatgtacgtgggcgacgtgcggagcgtgacacagaagcatatccaggagtggggccctttcgacctggtgatcggcggcagcccttgcaatgacctgagcatcgtgaacccagcccggaagggcctgtacgagggaaccggcagactgttcttcgagttttacagactgctgcacgacgcccggcctaaggaaggcgacgaccggcccttcttttggctgttcgagaatgtggtggccatgggagtcagcgacaagcgggatattagccggttcctggagagcaaccccgtgatgatcgatgccaaggaagtgagcgccgcccaccgggccagatacttctggggcaatctgcctggcatgaacagacccctggccagcaccgtgaacgacaagctggagctgcaggagtgcctggagcacggccggatcgccaagttcagcaaggtgagaaccatcaccacccgaagcaacagcatcaaacaaggcaaggaccagcactttcctgtgttcatgaacgagaaggaggacatcctgtggtgtaccgagatggagagagtgttcgggttcccagtccactacacagatgtcagcaacatgtctagactggccagacagagactgctgggaagaagctggtccgtccctgtgatcagacacctgttcgcccctctgaaggagtacttcgcctgcgtgagcagcggcaacagcaacgccaacagccggggccccagcttctctagcggcctggtgccactgtccctgagagggagccacatgggccccatggagatctacaaaaccgtgagcgcctggaagcggcagcctgtgcgcgtgctgagcctgtttcggaatatcgataaagtcctgaaaagcctgggattcctggagagcggctctggctccggcggtggcaccctgaagtacgtggaggatgtgacaaacgtggtcagacgggatgtggagaagtggggccccttcgatctggtgtacggcagcacccaacccctgggcagctcttgtgaccggtgccctggctggtacatgtttcagttccaccggatcctgcagtacgccctgccgagacaggagtcccagcggccattcttttggattttcatggacaacttgctgctgaccgaggatgaccaggaaactaccactcggttcctgcagaccgaagccgtgaccctgcaggacgtgagaggccgggactaccagaacgccatgcgggtgtggtccaacatccctggactgaaaagcaagcacgcacctctgacccctaaagaagaggagtacctgcaggcccaggtgcggagcagaagcaagctggacgcccctaaggtggatctgctggtgaagaattgcctcctgcccctgagagagtacttcaagtatttcagccagaatagtctgcccctgggcggcccaagcagcggcgcccctcctcccagcggcggcagcccagccggctccccaacctctaccgaggagggcacctctgagtccgccacccccgagagcggccctggcacctccaccgagcccagcgagggcagcgcacccggcagccctgccggcagccccacctccacagaggagggaaccagcaccgagcccagcgaaggcagcgccccaggcaccagcaccgagcctagtgagggcggctctggcggcggcagcgcccaggagattaaacggatcaacaagatcagaagaagacttgtgaaagacagcaacaccaagaaggccggcaagacaggccccatgaaaaccctgctggttagagtgatgacacccgatctgagagagcggctggaaaacctgagaaagaagcctgaaaatatcccccagcccatcagcaatacatctagagccaacctgaataagctgctgaccgattacaccgaaatgaagaaggcgatcctgcatgtgtactgggaagagttccagaaggaccctgtgggcctgatgagccgggtggcccagcctgccagcaagaagatcgatcagaacaagctgaaacctgagatggacgagaagggcaacctgaccaccgccggctttgcctgctctcagtgtggccagcccctgttcgtgtacaagctggagcaggtgtctgagaagggcaaggcttacaccaactacttcggacggtgcaatgtggccgagcacgaaaagctgatcctgctggcccagctgaagcccgagaaggatagcgacgaagccgtgacatatagcctgggaaagtttgggcagagggccctggatttctacagcattcatgtgaccaaggagtccacccaccccgtgaagcccctggcccagatcgccggaaacagatacgcctccggacctgtgggaaaggccctgagcgacgcatgtatgggcacaatcgcctccttcctgtctaagtaccaggacatcatcatcgaacaccagaaggtggtgaagggcaaccagaagagactggagagcctgcgggagctggccggcaaggaaaacctggaataccctagcgtgaccctgccacctcagcctcacaccaaggagggcgttgatgcctacaacgaagtgatcgcccgggtgcgaatgtgggtgaacctgaacctgtggcagaagctgaagctaagcagagatgatgccaagcctctgctgagactgaagggattcccttcctttcctctggtcgagagacaggccaacgaagtggactggtgggacatggtgtgtaacgtgaagaagctgatcaacgagaaaaaggaggatggcaaggtgttttggcagaatctggctggctacaagagacaggaagccctgagaccatacctgagcagcgaggaagatcggaagaagggaaagaaattcgctcggtaccagctgggcgacctgctgctgcacctggaaaagaagcacggcgaggactggggaaaggtgtacgacgaggcctgggagcggattgacaagaaagtggaaggcctgagcaagcacatcaagctggaagaggaacggagaagcgaggacgcccagagcaaggccgccctgaccgactggctgcgggctaaggccagcttcgtgatcgagggcctgaaggaggccgacaaggacgagttctgcagatgcgagctgaagctgcagaagtggtacggggacctgcggggaaagcccttcgccatcgaagccgagaacagcatcctggacatcagcggcttcagcaagcagtacaactgtgccttcatctggcagaaggacggcgtgaagaagctgaacctgtacctgatcatcaactacttcaagggcggcaagctgcggttcaagaagatcaaacctgaagccttcgaagccaacagattctacaccgtgatcaacaaaaagagcggcgagatcgtgcccatggaggtgaacttcaacttcgacgaccccaacctgatcatcctgcctctggcctttggcaagagacagggcagagaattcatctggaacgacctgctgtccctggaaaccggcagcctgaagctggccaacggaagagtgatcgagaagacactgtacaacagaagaacccggcaggatgagcctgccctgttcgtggccctgaccttcgagcggcgggaggtcctggactcctccaatatcaaaccaatgaacctgatcggcgtggcaagaggcgaaaacatccccgccgtgatcgccctgaccgaccccgagggctgcccactgagccggtttaaggatagcctgggaaacccaacccacatcctgagaatcggcgagagctataaggagaagcagcggaccatccaggccaagaaggaggtggagcagcggagagccggcggctacagccggaagtacgccagcaaagccaagaatctggcagacgatatggtgagaaacaccgctagagatctgctgtactacgccgtgacccaggatgccatgctgatcttcgccaacctgagccggggcttcggccggcagggcaagcggaccttcatggccgagagacagtacacacggatggaggactggctgaccgccaagctggcctacgagggcctgagcaagacctacctgtccaagacactggcccagtacacctccaagacatgcagcaactgtgggtttaccatcaccagcgccgactacgacagggtgctggagaagctgaagaagacagcaacaggctggatgaccacaattaacggcaaggagctgaaggtggagggccagattacctactacaacagatacaagagacagaacgtagtcaaggacctgtccgtcgagctggatagactgagcgaagaatctgtgaacaacgacatctcctcctggacaaagggcagaagcggagaagctctgagcctcctgaagaaaagattctcccatagacccgtgcaggagaagttcgtgtgcctgaactgcggcttcgagacacacgcagccgagcaagccgccctgaacatcgccagatcctggctgttcctgcggagccaggagtacaagaaataccagacaaacaagacaaccggcaacaccgataagagagccttcgtcgagacctggcagtccttttaccggaagaagcttaaggaggtgtggaaacctgccgtgcggtctggcggatctggcggaggctccacaagctacgaggagatggtgaccttcgaggacgtggccgtgcacttcaccaagaccgagtggaccggcctgagccccgcccagagggccctgtacaggagcgtgatgctggagaacttcggcaacctgaccgccctgggctaccccgtgcccaagcccgccctgatcagcctgctggagggcggcgacatggcctggggcctggaggcccaggacgaccccctggccgagatgaccaagaacgtgtgcaccagccccaagaaaaagagaaaagtctaagctgccttctgcggggcttgccttctggccatgcccttcttctctcccttgcacctgtacctcttggtctttgaataaagcctgagtaggaaggctagcaaaaaaaaaaaaaaaaaaaaaaaaaaaaaaaaaaaaaaaaaaaaaaaaaaaaaaaaaaaaaaaaaaaaaaaaaaaaaaaa

SEQ ID NO: 6133 - RNA, 5797 nt, synthetic construct
  source 1..5797: mol_type = other RNA
aggaaataagagagaaaagaagagtaagaagaaatataagagccaccatggcccctaagaagaagcgtaaagtgagccggatggaacgcctcgtctacgaggtgcggcagaagtgcagaaacatcgaggacatctgcatctcctgcggatctctgaacgtgaccctggagcacccactgttcatcggcggcatgtgccagaactgtaaaaactgttttctggagtgtgcctatcaatacgacgatgacggctaccagagctactgcaccatctgttgcggcggaagagaggtgctgatgtgtggaaataacaactgctgccggtgcttctgcgtggaatgcgtggacctgctggtgggccccggcgccgcccaggccgctattaaggaagatccttggaactgctacatgtgcggccacaagggcacatacggcctgctgagacggagagaggactggcctagcagactgcagatgttcttcgccaataaccacgaccaggagttcgacccccctaaggtgtaccctcccgtccccgccgagaagagaaagcccatccgggtcctgagcctgttcgatggcatcgccaccggtctgctggtgctgaaggacctgggcatccaggtggataggtacattgcctccgaggtgtgcgaggactccatcaccgtgggaatggtgcgtcatcagggcaagatcatgtacgtgggcgacgtgcggagcgtgacacagaagcatatccaggagtggggccctttcgacctggtgatcggcggcagcccttgcaatgacctgagcatcgtgaacccagcccggaagggcctgtacgagggaaccggcagactgttcttcgagttttacagactgctgcacgacgcccggcctaaggaaggcgacgaccggcccttcttttggctgttcgagaatgtggtggccatgggagtcagcgacaagcgggatattagccggttcctggagagcaaccccgtgatgatcgatgccaaggaagtgagcgccgcccaccgggccagatacttctggggcaatctgcctggcatgaacagacccctggccagcaccgtgaacgacaagctggagctgcaggagtgcctggagcacggccggatcgccaagttcagcaaggtgagaaccatcaccacccgaagcaacagcatcaaacaaggcaaggaccagcactttcctgtgttcatgaacgagaaggaggacatcctgtggtgtaccgagatggagagagtgttcgggttcccagtccactacacagatgtcagcaacatgtctagactggccagacagagactgctgggaagaagctggtccgtccctgtgatcagacacctgttcgcccctctgaaggagtacttcgcctgcgtgagcagcggcaacagcaacgccaacagccggggccccagcttctctagcggcctggtgccactgtccctgagagggagccacatgggccccatggagatctacaaaaccgtgagcgcctggaagcggcagcctgtgcgcgtgctgagcctgtttcggaatatcgataaagtcctgaaaagcctgggattcctggagagcggctctggctccggcggtggcaccctgaagtacgtggaggatgtgacaaacgtggtcagacgggatgtggagaagtggggccccttcgatctggtgtacggcagcacccaacccctgggcagctcttgtgaccggtgccctggctggtacatgtttcagttccaccggatcctgcagtacgccctgccgagacaggagtcccagcggccattcttttggattttcatggacaacttgctgctgaccgaggatgaccaggaaactaccactcggttcctgcagaccgaagccgtgaccctgcaggacgtgagaggccgggactaccagaacgccatgcgggtgtggtccaacatccctggactgaaaagcaagcacgcacctctgacccctaaagaagaggagtacctgcaggcccaggtgcggagcagaagcaagctggacgcccctaaggtggatctgctggtgaagaattgcctcctgcccctgagagagtacttcaagtatttcagccagaatagtctgcccctgggcggcccaagcagcggcgcccctcctcccagcggcggcagcccagccggctccccaacctctaccgaggagggcacctctgagtccgccacccccgagagcggccctggcacctccaccgagcccagcgagggcagcgcacccggcagccctgccggcagccccacctccacagaggagggaaccagcaccgagcccagcgaaggcagcgccccaggcaccagcaccgagcctagtgagggcggctctggcggcggcagcgcccaggagattaaacggatcaacaagatcagaagaagacttgtgaaagacagcaacaccaagaaggccggcaagacaggccccatgaaaaccctgctggttagagtgatgacacccgatctgagagagcggctggaaaacctgagaaagaagcctgaaaatatcccccagcccatcagcaatacatctagagccaacctgaataagctgctgaccgattacaccgaaatgaagaaggcgatcctgcatgtgtactgggaagagttccagaaggaccctgtgggcctgatgagccgggtggcccagcctgccagcaagaagatcgatcagaacaagctgaaacctgagatggacgagaagggcaacctgaccaccgccggctttgcctgctctcagtgtggccagcccctgttcgtgtacaagctggagcaggtgtctgagaagggcaaggcttacaccaactacttcggacggtgcaatgtggccgagcacgaaaagctgatcctgctggcccagctgaagcccgagaaggatagcgacgaagccgtgacatatagcctgggaaagtttgggcagagggccctggatttctacagcattcatgtgaccaaggagtccacccaccccgtgaagcccctggcccagatcgccggaaacagatacgcctccggacctgtgggaaaggccctgagcgacgcatgtatgggcacaatcgcctccttcctgtctaagtaccaggacatcatcatcgaacaccagaaggtggtgaagggcaaccagaagagactggagagcctgcgggagctggccggcaaggaaaacctggaataccctagcgtgaccctgccacctcagcctcacaccaaggagggcgttgatgcctacaacgaagtgatcgcccgggtgcgaatgtgggtgaacctgaacctgtggcagaagctgaagctaagcagagatgatgccaagcctctgctgagactgaagggattcccttcctttcctctggtcgagagacaggccaacgaagtggactggtgggacatggtgtgtaacgtgaagaagctgatcaacgagaaaaaggaggatggcaaggtgttttggcagaatctggctggctacaagagacaggaagccctgagaccatacctgagcagcgaggaagatcggaagaagggaaagaaattcgctcggtaccagctgggcgacctgctgctgcacctggaaaagaagcacggcgaggactggggaaaggtgtacgacgaggcctgggagcggattgacaagaaagtggaaggcctgagcaagcacatcaagctggaagaggaacggagaagcgaggacgcccagagcaaggccgccctgaccgactggctgcgggctaaggccagcttcgtgatcgagggcctgaaggaggccgacaaggacgagttctgcagatgcgagctgaagctgcagaagtggtacggggacctgcggggaaagcccttcgccatcgaagccgagaacagcatcctggacatcagcggcttcagcaagcagtacaactgtgccttcatctggcagaaggacggcgtgaagaagctgaacctgtacctgatcatcaactacttcaagggcggcaagctgcggttcaagaagatcaaacctgaagccttcgaagccaacagattctacaccgtgatcaacaaaaagagcggcgagatcgtgcccatggaggtgaacttcaacttcgacgaccccaacctgatcatcctgcctctggcctttggcaagagacagggcagagaattcatctggaacgacctgctgtccctggaaaccggcagcctgaagctggccaacggaagagtgatcgagaagacactgtacaacagaagaacccggcaggatgagcctgccctgttcgtggccctgaccttcgagcggcgggaggtcctggactcctccaatatcaaaccaatgaacctgatcggcgtggcaagaggcgaaaacatccccgccgtgatcgccctgaccgaccccgagggctgcccactgagccggtttaaggatagcctgggaaacccaacccacatcctgagaatcggcgagagctataaggagaagcagcggaccatccaggccaagaaggaggtggagcagcggagagccggcggctacagccggaagtacgccagcaaagccaagaatctggcagacgatatggtgagaaacaccgctagagatctgctgtactacgccgtgacccaggatgccatgctgatcttcgccaacctgagccggggcttcggccggcagggcaagcggaccttcatggccgagagacagtacacacggatggaggactggctgaccgccaagctggcctacgagggcctgagcaagacctacctgtccaagacactggcccagtacacctccaagacatgcagcaactgtgggtttaccatcaccagcgccgactacgacagggtgctggagaagctgaagaagacagcaacaggctggatgaccacaattaacggcaaggagctgaaggtggagggccagattacctactacaacagatacaagagacagaacgtagtcaaggacctgtccgtcgagctggatagactgagcgaagaatctgtgaacaacgacatctcctcctggacaaagggcagaagcggagaagctctgagcctcctgaagaaaagattctcccatagacccgtgcaggagaagttcgtgtgcctgaactgcggcttcgagacacacgcagccgagcaagccgccctgaacatcgccagatcctggctgttcctgcggagccaggagtacaagaaataccagacaaacaagacaaccggcaacaccgataagagagccttcgtcgagacctggcagtccttttaccggaagaagcttaaggaggtgtggaaacctgccgtgcggtctggcggatctggcggaggctccacaagcagccccaccctggtgaccttcaaggacatccacgtgaacttcaccagggaggagtggaacctgctggacgccgcccagcagatcatgtacaaggacgtgatgctggagaactacaagaacctggtgagcgtgggccaccagctgcccaagcccgacgtgatcctgcagctggagaagggcgaggagccctggctggtggagaggggcgtgaggcaggacaccaggcccgactgggacaccgccaccagccccaagaaaaagagaaaagtctaagctgccttctgcggggcttgccttctggccatgcccttcttctctcccttgcacctgtacctcttggtctttgaataaagcctgagtaggaaggctagcaaaaaaaaaaaaaaaaaaaaaaaaaaaaaaaaaaaaaaaaaaaaaaaaaaaaaaaaaaaaaaaaaaaaaaaaaaaaaaaa

SEQ ID NO: 6134 - RNA, 5797 nt, synthetic construct
  source 1..5797: mol_type = other RNA
aggaaataagagagaaaagaagagtaagaagaaatataagagccaccatggcccctaagaagaagcgtaaagtgagccggatggaacgcctcgtctacgaggtgcggcagaagtgcagaaacatcgaggacatctgcatctcctgcggatctctgaacgtgaccctggagcacccactgttcatcggcggcatgtgccagaactgtaaaaactgttttctggagtgtgcctatcaatacgacgatgacggctaccagagctactgcaccatctgttgcggcggaagagaggtgctgatgtgtggaaataacaactgctgccggtgcttctgcgtggaatgcgtggacctgctggtgggccccggcgccgcccaggccgctattaaggaagatccttggaactgctacatgtgcggccacaagggcacatacggcctgctgagacggagagaggactggcctagcagactgcagatgttcttcgccaataaccacgaccaggagttcgacccccctaaggtgtaccctcccgtccccgccgagaagagaaagcccatccgggtcctgagcctgttcgatggcatcgccaccggtctgctggtgctgaaggacctgggcatccaggtggataggtacattgcctccgaggtgtgcgaggactccatcaccgtgggaatggtgcgtcatcagggcaagatcatgtacgtgggcgacgtgcggagcgtgacacagaagcatatccaggagtggggccctttcgacctggtgatcggcggcagcccttgcaatgacctgagcatcgtgaacccagcccggaagggcctgtacgagggaaccggcagactgttcttcgagttttacagactgctgcacgacgcccggcctaaggaaggcgacgaccggcccttcttttggctgttcgagaatgtggtggccatgggagtcagcgacaagcgggatattagccggttcctggagagcaaccccgtgatgatcgatgccaaggaagtgagcgccgcccaccgggccagatacttctggggcaatctgcctggcatgaacagacccctggccagcaccgtgaacgacaagctggagctgcaggagtgcctggagcacggccggatcgccaagttcagcaaggtgagaaccatcaccacccgaagcaacagcatcaaacaaggcaaggaccagcactttcctgtgttcatgaacgagaaggaggacatcctgtggtgtaccgagatggagagagtgttcgggttcccagtccactacacagatgtcagcaacatgtctagactggccagacagagactgctgggaagaagctggtccgtccctgtgatcagacacctgttcgcccctctgaaggagtacttcgcctgcgtgagcagcggcaacagcaacgccaacagccggggccccagcttctctagcggcctggtgccactgtccctgagagggagccacatgggccccatggagatctacaaaaccgtgagcgcctggaagcggcagcctgtgcgcgtgctgagcctgtttcggaatatcgataaagtcctgaaaagcctgggattcctggagagcggctctggctccggcggtggcaccctgaagtacgtggaggatgtgacaaacgtggtcagacgggatgtggagaagtggggccccttcgatctggtgtacggcagcacccaacccctgggcagctcttgtgaccggtgccctggctggtacatgtttcagttccaccggatcctgcagtacgccctgccgagacaggagtcccagcggccattcttttggattttcatggacaacttgctgctgaccgaggatgaccaggaaactaccactcggttcctgcagaccgaagccgtgaccctgcaggacgtgagaggccgggactaccagaacgccatgcgggtgtggtccaacatccctggactgaaaagcaagcacgcacctctgacccctaaagaagaggagtacctgcaggcccaggtgcggagcagaagcaagctggacgcccctaaggtggatctgctggtgaagaattgcctcctgcccctgagagagtacttcaagtatttcagccagaatagtctgcccctgggcggcccaagcagcggcgcccctcctcccagcggcggcagcccagccggctccccaacctctaccgaggagggcacctctgagtccgccacccccgagagcggccctggcacctccaccgagcccagcgagggcagcgcacccggcagccctgccggcagccccacctccacagaggagggaaccagcaccgagcccagcgaaggcagcgccccaggcaccagcaccgagcctagtgagggcggctctggcggcggcagcgcccaggagattaaacggatcaacaagatcagaagaagacttgtgaaagacagcaacaccaagaaggccggcaagacaggccccatgaaaaccctgctggttagagtgatgacacccgatctgagagagcggctggaaaacctgagaaagaagcctgaaaatatcccccagcccatcagcaatacatctagagccaacctgaataagctgctgaccgattacaccgaaatgaagaaggcgatcctgcatgtgtactgggaagagttccagaaggaccctgtgggcctgatgagccgggtggcccagcctgccagcaagaagatcgatcagaacaagctgaaacctgagatggacgagaagggcaacctgaccaccgccggctttgcctgctctcagtgtggccagcccctgttcgtgtacaagctggagcaggtgtctgagaagggcaaggcttacaccaactacttcggacggtgcaatgtggccgagcacgaaaagctgatcctgctggcccagctgaagcccgagaaggatagcgacgaagccgtgacatatagcctgggaaagtttgggcagagggccctggatttctacagcattcatgtgaccaaggagtccacccaccccgtgaagcccctggcccagatcgccggaaacagatacgcctccggacctgtgggaaaggccctgagcgacgcatgtatgggcacaatcgcctccttcctgtctaagtaccaggacatcatcatcgaacaccagaaggtggtgaagggcaaccagaagagactggagagcctgcgggagctggccggcaaggaaaacctggaataccctagcgtgaccctgccacctcagcctcacaccaaggagggcgttgatgcctacaacgaagtgatcgcccgggtgcgaatgtgggtgaacctgaacctgtggcagaagctgaagctaagcagagatgatgccaagcctctgctgagactgaagggattcccttcctttcctctggtcgagagacaggccaacgaagtggactggtgggacatggtgtgtaacgtgaagaagctgatcaacgagaaaaaggaggatggcaaggtgttttggcagaatctggctggctacaagagacaggaagccctgagaccatacctgagcagcgaggaagatcggaagaagggaaagaaattcgctcggtaccagctgggcgacctgctgctgcacctggaaaagaagcacggcgaggactggggaaaggtgtacgacgaggcctgggagcggattgacaagaaagtggaaggcctgagcaagcacatcaagctggaagaggaacggagaagcgaggacgcccagagcaaggccgccctgaccgactggctgcgggctaaggccagcttcgtgatcgagggcctgaaggaggccgacaaggacgagttctgcagatgcgagctgaagctgcagaagtggtacggggacctgcggggaaagcccttcgccatcgaagccgagaacagcatcctggacatcagcggcttcagcaagcagtacaactgtgccttcatctggcagaaggacggcgtgaagaagctgaacctgtacctgatcatcaactacttcaagggcggcaagctgcggttcaagaagatcaaacctgaagccttcgaagccaacagattctacaccgtgatcaacaaaaagagcggcgagatcgtgcccatggaggtgaacttcaacttcgacgaccccaacctgatcatcctgcctctggcctttggcaagagacagggcagagaattcatctggaacgacctgctgtccctggaaaccggcagcctgaagctggccaacggaagagtgatcgagaagacactgtacaacagaagaacccggcaggatgagcctgccctgttcgtggccctgaccttcgagcggcgggaggtcctggactcctccaatatcaaaccaatgaacctgatcggcgtggcaagaggcgaaaacatccccgccgtgatcgccctgaccgaccccgagggctgcccactgagccggtttaaggatagcctgggaaacccaacccacatcctgagaatcggcgagagctataaggagaagcagcggaccatccaggccaagaaggaggtggagcagcggagagccggcggctacagccggaagtacgccagcaaagccaagaatctggcagacgatatggtgagaaacaccgctagagatctgctgtactacgccgtgacccaggatgccatgctgatcttcgccaacctgagccggggcttcggccggcagggcaagcggaccttcatggccgagagacagtacacacggatggaggactggctgaccgccaagctggcctacgagggcctgagcaagacctacctgtccaagacactggcccagtacacctccaagacatgcagcaactgtgggtttaccatcaccagcgccgactacgacagggtgctggagaagctgaagaagacagcaacaggctggatgaccacaattaacggcaaggagctgaaggtggagggccagattacctactacaacagatacaagagacagaacgtagtcaaggacctgtccgtcgagctggatagactgagcgaagaatctgtgaacaacgacatctcctcctggacaaagggcagaagcggagaagctctgagcctcctgaagaaaagattctcccatagacccgtgcaggagaagttcgtgtgcctgaactgcggcttcgagacacacgcagccgagcaagccgccctgaacatcgccagatcctggctgttcctgcggagccaggagtacaagaaataccagacaaacaagacaaccggcaacaccgataagagagccttcgtcgagacctggcagtccttttaccggaagaagcttaaggaggtgtggaaacctgccgtgcggtctggcggatctggcggaggctccacaagcgccagggagagcgtgatgttcagcgacgtgagcatcgacttcagcctggaggagtgggagttcctgaacctggagcagagggacctgtacagggacgtgatgctggagaactacagcaacctggtgagcctgggctgcttcatcagcaagcccgacgtgatcagcctgctggagcagggcaaggagccctggaacgtggtgaggaagggcaggaggcagtaccccgacctggagaccaactacaccagccccaagaaaaagagaaaagtctaagctgccttctgcggggcttgccttctggccatgcccttcttctctcccttgcacctgtacctcttggtctttgaataaagcctgagtaggaaggctagcaaaaaaaaaaaaaaaaaaaaaaaaaaaaaaaaaaaaaaaaaaaaaaaaaaaaaaaaaaaaaaaaaaaaaaaaaaaaaaaa

SEQ ID NO: 6135 - RNA, 5797 nt, synthetic construct
  source 1..5797: mol_type = other RNA
aggaaataagagagaaaagaagagtaagaagaaatataagagccaccatggcccctaagaagaagcgtaaagtgagccggatggaacgcctcgtctacgaggtgcggcagaagtgcagaaacatcgaggacatctgcatctcctgcggatctctgaacgtgaccctggagcacccactgttcatcggcggcatgtgccagaactgtaaaaactgttttctggagtgtgcctatcaatacgacgatgacggctaccagagctactgcaccatctgttgcggcggaagagaggtgctgatgtgtggaaataacaactgctgccggtgcttctgcgtggaatgcgtggacctgctggtgggccccggcgccgcccaggccgctattaaggaagatccttggaactgctacatgtgcggccacaagggcacatacggcctgctgagacggagagaggactggcctagcagactgcagatgttcttcgccaataaccacgaccaggagttcgacccccctaaggtgtaccctcccgtccccgccgagaagagaaagcccatccgggtcctgagcctgttcgatggcatcgccaccggtctgctggtgctgaaggacctgggcatccaggtggataggtacattgcctccgaggtgtgcgaggactccatcaccgtgggaatggtgcgtcatcagggcaagatcatgtacgtgggcgacgtgcggagcgtgacacagaagcatatccaggagtggggccctttcgacctggtgatcggcggcagcccttgcaatgacctgagcatcgtgaacccagcccggaagggcctgtacgagggaaccggcagactgttcttcgagttttacagactgctgcacgacgcccggcctaaggaaggcgacgaccggcccttcttttggctgttcgagaatgtggtggccatgggagtcagcgacaagcgggatattagccggttcctggagagcaaccccgtgatgatcgatgccaaggaagtgagcgccgcccaccgggccagatacttctggggcaatctgcctggcatgaacagacccctggccagcaccgtgaacgacaagctggagctgcaggagtgcctggagcacggccggatcgccaagttcagcaaggtgagaaccatcaccacccgaagcaacagcatcaaacaaggcaaggaccagcactttcctgtgttcatgaacgagaaggaggacatcctgtggtgtaccgagatggagagagtgttcgggttcccagtccactacacagatgtcagcaacatgtctagactggccagacagagactgctgggaagaagctggtccgtccctgtgatcagacacctgttcgcccctctgaaggagtacttcgcctgcgtgagcagcggcaacagcaacgccaacagccggggccccagcttctctagcggcctggtgccactgtccctgagagggagccacatgggccccatggagatctacaaaaccgtgagcgcctggaagcggcagcctgtgcgcgtgctgagcctgtttcggaatatcgataaagtcctgaaaagcctgggattcctggagagcggctctggctccggcggtggcaccctgaagtacgtggaggatgtgacaaacgtggtcagacgggatgtggagaagtggggccccttcgatctggtgtacggcagcacccaacccctgggcagctcttgtgaccggtgccctggctggtacatgtttcagttccaccggatcctgcagtacgccctgccgagacaggagtcccagcggccattcttttggattttcatggacaacttgctgctgaccgaggatgaccaggaaactaccactcggttcctgcagaccgaagccgtgaccctgcaggacgtgagaggccgggactaccagaacgccatgcgggtgtggtccaacatccctggactgaaaagcaagcacgcacctctgacccctaaagaagaggagtacctgcaggcccaggtgcggagcagaagcaagctggacgcccctaaggtggatctgctggtgaagaattgcctcctgcccctgagagagtacttcaagtatttcagccagaatagtctgcccctgggcggcccaagcagcggcgcccctcctcccagcggcggcagcccagccggctccccaacctctaccgaggagggcacctctgagtccgccacccccgagagcggccctggcacctccaccgagcccagcgagggcagcgcacccggcagccctgccggcagccccacctccacagaggagggaaccagcaccgagcccagcgaaggcagcgccccaggcaccagcaccgagcctagtgagggcggctctggcggcggcagcgcccaggagattaaacggatcaacaagatcagaagaagacttgtgaaagacagcaacaccaagaaggccggcaagacaggccccatgaaaaccctgctggttagagtgatgacacccgatctgagagagcggctggaaaacctgagaaagaagcctgaaaatatcccccagcccatcagcaatacatctagagccaacctgaataagctgctgaccgattacaccgaaatgaagaaggcgatcctgcatgtgtactgggaagagttccagaaggaccctgtgggcctgatgagccgggtggcccagcctgccagcaagaagatcgatcagaacaagctgaaacctgagatggacgagaagggcaacctgaccaccgccggctttgcctgctctcagtgtggccagcccctgttcgtgtacaagctggagcaggtgtctgagaagggcaaggcttacaccaactacttcggacggtgcaatgtggccgagcacgaaaagctgatcctgctggcccagctgaagcccgagaaggatagcgacgaagccgtgacatatagcctgggaaagtttgggcagagggccctggatttctacagcattcatgtgaccaaggagtccacccaccccgtgaagcccctggcccagatcgccggaaacagatacgcctccggacctgtgggaaaggccctgagcgacgcatgtatgggcacaatcgcctccttcctgtctaagtaccaggacatcatcatcgaacaccagaaggtggtgaagggcaaccagaagagactggagagcctgcgggagctggccggcaaggaaaacctggaataccctagcgtgaccctgccacctcagcctcacaccaaggagggcgttgatgcctacaacgaagtgatcgcccgggtgcgaatgtgggtgaacctgaacctgtggcagaagctgaagctaagcagagatgatgccaagcctctgctgagactgaagggattcccttcctttcctctggtcgagagacaggccaacgaagtggactggtgggacatggtgtgtaacgtgaagaagctgatcaacgagaaaaaggaggatggcaaggtgttttggcagaatctggctggctacaagagacaggaagccctgagaccatacctgagcagcgaggaagatcggaagaagggaaagaaattcgctcggtaccagctgggcgacctgctgctgcacctggaaaagaagcacggcgaggactggggaaaggtgtacgacgaggcctgggagcggattgacaagaaagtggaaggcctgagcaagcacatcaagctggaagaggaacggagaagcgaggacgcccagagcaaggccgccctgaccgactggctgcgggctaaggccagcttcgtgatcgagggcctgaaggaggccgacaaggacgagttctgcagatgcgagctgaagctgcagaagtggtacggggacctgcggggaaagcccttcgccatcgaagccgagaacagcatcctggacatcagcggcttcagcaagcagtacaactgtgccttcatctggcagaaggacggcgtgaagaagctgaacctgtacctgatcatcaactacttcaagggcggcaagctgcggttcaagaagatcaaacctgaagccttcgaagccaacagattctacaccgtgatcaacaaaaagagcggcgagatcgtgcccatggaggtgaacttcaacttcgacgaccccaacctgatcatcctgcctctggcctttggcaagagacagggcagagaattcatctggaacgacctgctgtccctggaaaccggcagcctgaagctggccaacggaagagtgatcgagaagacactgtacaacagaagaacccggcaggatgagcctgccctgttcgtggccctgaccttcgagcggcgggaggtcctggactcctccaatatcaaaccaatgaacctgatcggcgtggcaagaggcgaaaacatccccgccgtgatcgccctgaccgaccccgagggctgcccactgagccggtttaaggatagcctgggaaacccaacccacatcctgagaatcggcgagagctataaggagaagcagcggaccatccaggccaagaaggaggtggagcagcggagagccggcggctacagccggaagtacgccagcaaagccaagaatctggcagacgatatggtgagaaacaccgctagagatctgctgtactacgccgtgacccaggatgccatgctgatcttcgccaacctgagccggggcttcggccggcagggcaagcggaccttcatggccgagagacagtacacacggatggaggactggctgaccgccaagctggcctacgagggcctgagcaagacctacctgtccaagacactggcccagtacacctccaagacatgcagcaactgtgggtttaccatcaccagcgccgactacgacagggtgctggagaagctgaagaagacagcaacaggctggatgaccacaattaacggcaaggagctgaaggtggagggccagattacctactacaacagatacaagagacagaacgtagtcaaggacctgtccgtcgagctggatagactgagcgaagaatctgtgaacaacgacatctcctcctggacaaagggcagaagcggagaagctctgagcctcctgaagaaaagattctcccatagacccgtgcaggagaagttcgtgtgcctgaactgcggcttcgagacacacgcagccgagcaagccgccctgaacatcgccagatcctggctgttcctgcggagccaggagtacaagaaataccagacaaacaagacaaccggcaacaccgataagagagccttcgtcgagacctggcagtccttttaccggaagaagcttaaggaggtgtggaaacctgccgtgcggtctggcggatctggcggaggctccacaagctgccaggagaccctgaccttcaaggacgtggccgtggacttcaccagggaggagtggggccacctgggccccgcccagagggacctgtacaaggaggtgatgctggacaactacaggaacctggtgagcctgggcctgcaggtgagcaagcccgacgtgatcttccagctggagaggggcgagagccccagcatgctggagggcaaggacagcagcgacccctgccccgagttcctgagccagaccagccccaagaaaaagagaaaagtctaagctgccttctgcggggcttgccttctggccatgcccttcttctctcccttgcacctgtacctcttggtctttgaataaagcctgagtaggaaggctagcaaaaaaaaaaaaaaaaaaaaaaaaaaaaaaaaaaaaaaaaaaaaaaaaaaaaaaaaaaaaaaaaaaaaaaaaaaaaaaaa

SEQ ID NO: 6136 - RNA, 5797 nt, synthetic construct
  source 1..5797: mol_type = other RNA
aggaaataagagagaaaagaagagtaagaagaaatataagagccaccatggcccctaagaagaagcgtaaagtgagccggatggaacgcctcgtctacgaggtgcggcagaagtgcagaaacatcgaggacatctgcatctcctgcggatctctgaacgtgaccctggagcacccactgttcatcggcggcatgtgccagaactgtaaaaactgttttctggagtgtgcctatcaatacgacgatgacggctaccagagctactgcaccatctgttgcggcggaagagaggtgctgatgtgtggaaataacaactgctgccggtgcttctgcgtggaatgcgtggacctgctggtgggccccggcgccgcccaggccgctattaaggaagatccttggaactgctacatgtgcggccacaagggcacatacggcctgctgagacggagagaggactggcctagcagactgcagatgttcttcgccaataaccacgaccaggagttcgacccccctaaggtgtaccctcccgtccccgccgagaagagaaagcccatccgggtcctgagcctgttcgatggcatcgccaccggtctgctggtgctgaaggacctgggcatccaggtggataggtacattgcctccgaggtgtgcgaggactccatcaccgtgggaatggtgcgtcatcagggcaagatcatgtacgtgggcgacgtgcggagcgtgacacagaagcatatccaggagtggggccctttcgacctggtgatcggcggcagcccttgcaatgacctgagcatcgtgaacccagcccggaagggcctgtacgagggaaccggcagactgttcttcgagttttacagactgctgcacgacgcccggcctaaggaaggcgacgaccggcccttcttttggctgttcgagaatgtggtggccatgggagtcagcgacaagcgggatattagccggttcctggagagcaaccccgtgatgatcgatgccaaggaagtgagcgccgcccaccgggccagatacttctggggcaatctgcctggcatgaacagacccctggccagcaccgtgaacgacaagctggagctgcaggagtgcctggagcacggccggatcgccaagttcagcaaggtgagaaccatcaccacccgaagcaacagcatcaaacaaggcaaggaccagcactttcctgtgttcatgaacgagaaggaggacatcctgtggtgtaccgagatggagagagtgttcgggttcccagtccactacacagatgtcagcaacatgtctagactggccagacagagactgctgggaagaagctggtccgtccctgtgatcagacacctgttcgcccctctgaaggagtacttcgcctgcgtgagcagcggcaacagcaacgccaacagccggggccccagcttctctagcggcctggtgccactgtccctgagagggagccacatgggccccatggagatctacaaaaccgtgagcgcctggaagcggcagcctgtgcgcgtgctgagcctgtttcggaatatcgataaagtcctgaaaagcctgggattcctggagagcggctctggctccggcggtggcaccctgaagtacgtggaggatgtgacaaacgtggtcagacgggatgtggagaagtggggccccttcgatctggtgtacggcagcacccaacccctgggcagctcttgtgaccggtgccctggctggtacatgtttcagttccaccggatcctgcagtacgccctgccgagacaggagtcccagcggccattcttttggattttcatggacaacttgctgctgaccgaggatgaccaggaaactaccactcggttcctgcagaccgaagccgtgaccctgcaggacgtgagaggccgggactaccagaacgccatgcgggtgtggtccaacatccctggactgaaaagcaagcacgcacctctgacccctaaagaagaggagtacctgcaggcccaggtgcggagcagaagcaagctggacgcccctaaggtggatctgctggtgaagaattgcctcctgcccctgagagagtacttcaagtatttcagccagaatagtctgcccctgggcggcccaagcagcggcgcccctcctcccagcggcggcagcccagccggctccccaacctctaccgaggagggcacctctgagtccgccacccccgagagcggccctggcacctccaccgagcccagcgagggcagcgcacccggcagccctgccggcagccccacctccacagaggagggaaccagcaccgagcccagcgaaggcagcgccccaggcaccagcaccgagcctagtgagggcggctctggcggcggcagcgcccaggagattaaacggatcaacaagatcagaagaagacttgtgaaagacagcaacaccaagaaggccggcaagacaggccccatgaaaaccctgctggttagagtgatgacacccgatctgagagagcggctggaaaacctgagaaagaagcctgaaaatatcccccagcccatcagcaatacatctagagccaacctgaataagctgctgaccgattacaccgaaatgaagaaggcgatcctgcatgtgtactgggaagagttccagaaggaccctgtgggcctgatgagccgggtggcccagcctgccagcaagaagatcgatcagaacaagctgaaacctgagatggacgagaagggcaacctgaccaccgccggctttgcctgctctcagtgtggccagcccctgttcgtgtacaagctggagcaggtgtctgagaagggcaaggcttacaccaactacttcggacggtgcaatgtggccgagcacgaaaagctgatcctgctggcccagctgaagcccgagaaggatagcgacgaagccgtgacatatagcctgggaaagtttgggcagagggccctggatttctacagcattcatgtgaccaaggagtccacccaccccgtgaagcccctggcccagatcgccggaaacagatacgcctccggacctgtgggaaaggccctgagcgacgcatgtatgggcacaatcgcctccttcctgtctaagtaccaggacatcatcatcgaacaccagaaggtggtgaagggcaaccagaagagactggagagcctgcgggagctggccggcaaggaaaacctggaataccctagcgtgaccctgccacctcagcctcacaccaaggagggcgttgatgcctacaacgaagtgatcgcccgggtgcgaatgtgggtgaacctgaacctgtggcagaagctgaagctaagcagagatgatgccaagcctctgctgagactgaagggattcccttcctttcctctggtcgagagacaggccaacgaagtggactggtgggacatggtgtgtaacgtgaagaagctgatcaacgagaaaaaggaggatggcaaggtgttttggcagaatctggctggctacaagagacaggaagccctgagaccatacctgagcagcgaggaagatcggaagaagggaaagaaattcgctcggtaccagctgggcgacctgctgctgcacctggaaaagaagcacggcgaggactggggaaaggtgtacgacgaggcctgggagcggattgacaagaaagtggaaggcctgagcaagcacatcaagctggaagaggaacggagaagcgaggacgcccagagcaaggccgccctgaccgactggctgcgggctaaggccagcttcgtgatcgagggcctgaaggaggccgacaaggacgagttctgcagatgcgagctgaagctgcagaagtggtacggggacctgcggggaaagcccttcgccatcgaagccgagaacagcatcctggacatcagcggcttcagcaagcagtacaactgtgccttcatctggcagaaggacggcgtgaagaagctgaacctgtacctgatcatcaactacttcaagggcggcaagctgcggttcaagaagatcaaacctgaagccttcgaagccaacagattctacaccgtgatcaacaaaaagagcggcgagatcgtgcccatggaggtgaacttcaacttcgacgaccccaacctgatcatcctgcctctggcctttggcaagagacagggcagagaattcatctggaacgacctgctgtccctggaaaccggcagcctgaagctggccaacggaagagtgatcgagaagacactgtacaacagaagaacccggcaggatgagcctgccctgttcgtggccctgaccttcgagcggcgggaggtcctggactcctccaatatcaaaccaatgaacctgatcggcgtggcaagaggcgaaaacatccccgccgtgatcgccctgaccgaccccgagggctgcccactgagccggtttaaggatagcctgggaaacccaacccacatcctgagaatcggcgagagctataaggagaagcagcggaccatccaggccaagaaggaggtggagcagcggagagccggcggctacagccggaagtacgccagcaaagccaagaatctggcagacgatatggtgagaaacaccgctagagatctgctgtactacgccgtgacccaggatgccatgctgatcttcgccaacctgagccggggcttcggccggcagggcaagcggaccttcatggccgagagacagtacacacggatggaggactggctgaccgccaagctggcctacgagggcctgagcaagacctacctgtccaagacactggcccagtacacctccaagacatgcagcaactgtgggtttaccatcaccagcgccgactacgacagggtgctggagaagctgaagaagacagcaacaggctggatgaccacaattaacggcaaggagctgaaggtggagggccagattacctactacaacagatacaagagacagaacgtagtcaaggacctgtccgtcgagctggatagactgagcgaagaatctgtgaacaacgacatctcctcctggacaaagggcagaagcggagaagctctgagcctcctgaagaaaagattctcccatagacccgtgcaggagaagttcgtgtgcctgaactgcggcttcgagacacacgcagccgagcaagccgccctgaacatcgccagatcctggctgttcctgcggagccaggagtacaagaaataccagacaaacaagacaaccggcaacaccgataagagagccttcgtcgagacctggcagtccttttaccggaagaagcttaaggaggtgtggaaacctgccgtgcggtctggcggatctggcggaggctccacaagcaagcccggcgtgctgaccttcgccgacgtggccgtgtacttcagcagcgaggagtggggctgcctgaggcccgcccagagggccctgtacagggacgtgatgagggagacctacggccacctgggcgccctgggctgcgccggccccaagcccgccctgatcagctggctggagaggaacaccgacgactgggagcccgccgccctggacccccaggagtgccccaagagggtgaccgtgcagaccagccccaagaaaaagagaaaagtctaagctgccttctgcggggcttgccttctggccatgcccttcttctctcccttgcacctgtacctcttggtctttgaataaagcctgagtaggaaggctagcaaaaaaaaaaaaaaaaaaaaaaaaaaaaaaaaaaaaaaaaaaaaaaaaaaaaaaaaaaaaaaaaaaaaaaaaaaaaaaaa

SEQ ID NO: 6137 - RNA, 5797 nt, synthetic construct
  source 1..5797: mol_type = other RNA
aggaaataagagagaaaagaagagtaagaagaaatataagagccaccatggcccctaagaagaagcgtaaagtgagccggatggaacgcctcgtctacgaggtgcggcagaagtgcagaaacatcgaggacatctgcatctcctgcggatctctgaacgtgaccctggagcacccactgttcatcggcggcatgtgccagaactgtaaaaactgttttctggagtgtgcctatcaatacgacgatgacggctaccagagctactgcaccatctgttgcggcggaagagaggtgctgatgtgtggaaataacaactgctgccggtgcttctgcgtggaatgcgtggacctgctggtgggccccggcgccgcccaggccgctattaaggaagatccttggaactgctacatgtgcggccacaagggcacatacggcctgctgagacggagagaggactggcctagcagactgcagatgttcttcgccaataaccacgaccaggagttcgacccccctaaggtgtaccctcccgtccccgccgagaagagaaagcccatccgggtcctgagcctgttcgatggcatcgccaccggtctgctggtgctgaaggacctgggcatccaggtggataggtacattgcctccgaggtgtgcgaggactccatcaccgtgggaatggtgcgtcatcagggcaagatcatgtacgtgggcgacgtgcggagcgtgacacagaagcatatccaggagtggggccctttcgacctggtgatcggcggcagcccttgcaatgacctgagcatcgtgaacccagcccggaagggcctgtacgagggaaccggcagactgttcttcgagttttacagactgctgcacgacgcccggcctaaggaaggcgacgaccggcccttcttttggctgttcgagaatgtggtggccatgggagtcagcgacaagcgggatattagccggttcctggagagcaaccccgtgatgatcgatgccaaggaagtgagcgccgcccaccgggccagatacttctggggcaatctgcctggcatgaacagacccctggccagcaccgtgaacgacaagctggagctgcaggagtgcctggagcacggccggatcgccaagttcagcaaggtgagaaccatcaccacccgaagcaacagcatcaaacaaggcaaggaccagcactttcctgtgttcatgaacgagaaggaggacatcctgtggtgtaccgagatggagagagtgttcgggttcccagtccactacacagatgtcagcaacatgtctagactggccagacagagactgctgggaagaagctggtccgtccctgtgatcagacacctgttcgcccctctgaaggagtacttcgcctgcgtgagcagcggcaacagcaacgccaacagccggggccccagcttctctagcggcctggtgccactgtccctgagagggagccacatgggccccatggagatctacaaaaccgtgagcgcctggaagcggcagcctgtgcgcgtgctgagcctgtttcggaatatcgataaagtcctgaaaagcctgggattcctggagagcggctctggctccggcggtggcaccctgaagtacgtggaggatgtgacaaacgtggtcagacgggatgtggagaagtggggccccttcgatctggtgtacggcagcacccaacccctgggcagctcttgtgaccggtgccctggctggtacatgtttcagttccaccggatcctgcagtacgccctgccgagacaggagtcccagcggccattcttttggattttcatggacaacttgctgctgaccgaggatgaccaggaaactaccactcggttcctgcagaccgaagccgtgaccctgcaggacgtgagaggccgggactaccagaacgccatgcgggtgtggtccaacatccctggactgaaaagcaagcacgcacctctgacccctaaagaagaggagtacctgcaggcccaggtgcggagcagaagcaagctggacgcccctaaggtggatctgctggtgaagaattgcctcctgcccctgagagagtacttcaagtatttcagccagaatagtctgcccctgggcggcccaagcagcggcgcccctcctcccagcggcggcagcccagccggctccccaacctctaccgaggagggcacctctgagtccgccacccccgagagcggccctggcacctccaccgagcccagcgagggcagcgcacccggcagccctgccggcagccccacctccacagaggagggaaccagcaccgagcccagcgaaggcagcgccccaggcaccagcaccgagcctagtgagggcggctctggcggcggcagcgcccaggagattaaacggatcaacaagatcagaagaagacttgtgaaagacagcaacaccaagaaggccggcaagacaggccccatgaaaaccctgctggttagagtgatgacacccgatctgagagagcggctggaaaacctgagaaagaagcctgaaaatatcccccagcccatcagcaatacatctagagccaacctgaataagctgctgaccgattacaccgaaatgaagaaggcgatcctgcatgtgtactgggaagagttccagaaggaccctgtgggcctgatgagccgggtggcccagcctgccagcaagaagatcgatcagaacaagctgaaacctgagatggacgagaagggcaacctgaccaccgccggctttgcctgctctcagtgtggccagcccctgttcgtgtacaagctggagcaggtgtctgagaagggcaaggcttacaccaactacttcggacggtgcaatgtggccgagcacgaaaagctgatcctgctggcccagctgaagcccgagaaggatagcgacgaagccgtgacatatagcctgggaaagtttgggcagagggccctggatttctacagcattcatgtgaccaaggagtccacccaccccgtgaagcccctggcccagatcgccggaaacagatacgcctccggacctgtgggaaaggccctgagcgacgcatgtatgggcacaatcgcctccttcctgtctaagtaccaggacatcatcatcgaacaccagaaggtggtgaagggcaaccagaagagactggagagcctgcgggagctggccggcaaggaaaacctggaataccctagcgtgaccctgccacctcagcctcacaccaaggagggcgttgatgcctacaacgaagtgatcgcccgggtgcgaatgtgggtgaacctgaacctgtggcagaagctgaagctaagcagagatgatgccaagcctctgctgagactgaagggattcccttcctttcctctggtcgagagacaggccaacgaagtggactggtgggacatggtgtgtaacgtgaagaagctgatcaacgagaaaaaggaggatggcaaggtgttttggcagaatctggctggctacaagagacaggaagccctgagaccatacctgagcagcgaggaagatcggaagaagggaaagaaattcgctcggtaccagctgggcgacctgctgctgcacctggaaaagaagcacggcgaggactggggaaaggtgtacgacgaggcctgggagcggattgacaagaaagtggaaggcctgagcaagcacatcaagctggaagaggaacggagaagcgaggacgcccagagcaaggccgccctgaccgactggctgcgggctaaggccagcttcgtgatcgagggcctgaaggaggccgacaaggacgagttctgcagatgcgagctgaagctgcagaagtggtacggggacctgcggggaaagcccttcgccatcgaagccgagaacagcatcctggacatcagcggcttcagcaagcagtacaactgtgccttcatctggcagaaggacggcgtgaagaagctgaacctgtacctgatcatcaactacttcaagggcggcaagctgcggttcaagaagatcaaacctgaagccttcgaagccaacagattctacaccgtgatcaacaaaaagagcggcgagatcgtgcccatggaggtgaacttcaacttcgacgaccccaacctgatcatcctgcctctggcctttggcaagagacagggcagagaattcatctggaacgacctgctgtccctggaaaccggcagcctgaagctggccaacggaagagtgatcgagaagacactgtacaacagaagaacccggcaggatgagcctgccctgttcgtggccctgaccttcgagcggcgggaggtcctggactcctccaatatcaaaccaatgaacctgatcggcgtggcaagaggcgaaaacatccccgccgtgatcgccctgaccgaccccgagggctgcccactgagccggtttaaggatagcctgggaaacccaacccacatcctgagaatcggcgagagctataaggagaagcagcggaccatccaggccaagaaggaggtggagcagcggagagccggcggctacagccggaagtacgccagcaaagccaagaatctggcagacgatatggtgagaaacaccgctagagatctgctgtactacgccgtgacccaggatgccatgctgatcttcgccaacctgagccggggcttcggccggcagggcaagcggaccttcatggccgagagacagtacacacggatggaggactggctgaccgccaagctggcctacgagggcctgagcaagacctacctgtccaagacactggcccagtacacctccaagacatgcagcaactgtgggtttaccatcaccagcgccgactacgacagggtgctggagaagctgaagaagacagcaacaggctggatgaccacaattaacggcaaggagctgaaggtggagggccagattacctactacaacagatacaagagacagaacgtagtcaaggacctgtccgtcgagctggatagactgagcgaagaatctgtgaacaacgacatctcctcctggacaaagggcagaagcggagaagctctgagcctcctgaagaaaagattctcccatagacccgtgcaggagaagttcgtgtgcctgaactgcggcttcgagacacacgcagccgagcaagccgccctgaacatcgccagatcctggctgttcctgcggagccaggagtacaagaaataccagacaaacaagacaaccggcaacaccgataagagagccttcgtcgagacctggcagtccttttaccggaagaagcttaaggaggtgtggaaacctgccgtgcggtctggcggatctggcggaggctccacaagccagccccaggaggccgtgaccttcaaggacgtggaggtgaccttcagccaggacgagtggggctggctggacgccagccagaggaacctgtacagggacgtgatgctggagaactacggcaacgtgaccagcctggtgggccccttcaccaagcccgccctgatcagctggctggaggccagggagccctggggcctgaacgtgcagggcgcccaccccaagggcagccccagcgccgcccccaccagccccaagaaaaagagaaaagtctaagctgccttctgcggggcttgccttctggccatgcccttcttctctcccttgcacctgtacctcttggtctttgaataaagcctgagtaggaaggctagcaaaaaaaaaaaaaaaaaaaaaaaaaaaaaaaaaaaaaaaaaaaaaaaaaaaaaaaaaaaaaaaaaaaaaaaaaaaaaaaa

SEQ ID NO: 6138 - RNA, 5797 nt, synthetic construct
  source 1..5797: mol_type = other RNA
aggaaataagagagaaaagaagagtaagaagaaatataagagccaccatggcccctaagaagaagcgtaaagtgagccggatggaacgcctcgtctacgaggtgcggcagaagtgcagaaacatcgaggacatctgcatctcctgcggatctctgaacgtgaccctggagcacccactgttcatcggcggcatgtgccagaactgtaaaaactgttttctggagtgtgcctatcaatacgacgatgacggctaccagagctactgcaccatctgttgcggcggaagagaggtgctgatgtgtggaaataacaactgctgccggtgcttctgcgtggaatgcgtggacctgctggtgggccccggcgccgcccaggccgctattaaggaagatccttggaactgctacatgtgcggccacaagggcacatacggcctgctgagacggagagaggactggcctagcagactgcagatgttcttcgccaataaccacgaccaggagttcgacccccctaaggtgtaccctcccgtccccgccgagaagagaaagcccatccgggtcctgagcctgttcgatggcatcgccaccggtctgctggtgctgaaggacctgggcatccaggtggataggtacattgcctccgaggtgtgcgaggactccatcaccgtgggaatggtgcgtcatcagggcaagatcatgtacgtgggcgacgtgcggagcgtgacacagaagcatatccaggagtggggccctttcgacctggtgatcggcggcagcccttgcaatgacctgagcatcgtgaacccagcccggaagggcctgtacgagggaaccggcagactgttcttcgagttttacagactgctgcacgacgcccggcctaaggaaggcgacgaccggcccttcttttggctgttcgagaatgtggtggccatgggagtcagcgacaagcgggatattagccggttcctggagagcaaccccgtgatgatcgatgccaaggaagtgagcgccgcccaccgggccagatacttctggggcaatctgcctggcatgaacagacccctggccagcaccgtgaacgacaagctggagctgcaggagtgcctggagcacggccggatcgccaagttcagcaaggtgagaaccatcaccacccgaagcaacagcatcaaacaaggcaaggaccagcactttcctgtgttcatgaacgagaaggaggacatcctgtggtgtaccgagatggagagagtgttcgggttcccagtccactacacagatgtcagcaacatgtctagactggccagacagagactgctgggaagaagctggtccgtccctgtgatcagacacctgttcgcccctctgaaggagtacttcgcctgcgtgagcagcggcaacagcaacgccaacagccggggccccagcttctctagcggcctggtgccactgtccctgagagggagccacatgggccccatggagatctacaaaaccgtgagcgcctggaagcggcagcctgtgcgcgtgctgagcctgtttcggaatatcgataaagtcctgaaaagcctgggattcctggagagcggctctggctccggcggtggcaccctgaagtacgtggaggatgtgacaaacgtggtcagacgggatgtggagaagtggggccccttcgatctggtgtacggcagcacccaacccctgggcagctcttgtgaccggtgccctggctggtacatgtttcagttccaccggatcctgcagtacgccctgccgagacaggagtcccagcggccattcttttggattttcatggacaacttgctgctgaccgaggatgaccaggaaactaccactcggttcctgcagaccgaagccgtgaccctgcaggacgtgagaggccgggactaccagaacgccatgcgggtgtggtccaacatccctggactgaaaagcaagcacgcacctctgacccctaaagaagaggagtacctgcaggcccaggtgcggagcagaagcaagctggacgcccctaaggtggatctgctggtgaagaattgcctcctgcccctgagagagtacttcaagtatttcagccagaatagtctgcccctgggcggcccaagcagcggcgcccctcctcccagcggcggcagcccagccggctccccaacctctaccgaggagggcacctctgagtccgccacccccgagagcggccctggcacctccaccgagcccagcgagggcagcgcacccggcagccctgccggcagccccacctccacagaggagggaaccagcaccgagcccagcgaaggcagcgccccaggcaccagcaccgagcctagtgagggcggctctggcggcggcagcgcccaggagattaaacggatcaacaagatcagaagaagacttgtgaaagacagcaacaccaagaaggccggcaagacaggccccatgaaaaccctgctggttagagtgatgacacccgatctgagagagcggctggaaaacctgagaaagaagcctgaaaatatcccccagcccatcagcaatacatctagagccaacctgaataagctgctgaccgattacaccgaaatgaagaaggcgatcctgcatgtgtactgggaagagttccagaaggaccctgtgggcctgatgagccgggtggcccagcctgccagcaagaagatcgatcagaacaagctgaaacctgagatggacgagaagggcaacctgaccaccgccggctttgcctgctctcagtgtggccagcccctgttcgtgtacaagctggagcaggtgtctgagaagggcaaggcttacaccaactacttcggacggtgcaatgtggccgagcacgaaaagctgatcctgctggcccagctgaagcccgagaaggatagcgacgaagccgtgacatatagcctgggaaagtttgggcagagggccctggatttctacagcattcatgtgaccaaggagtccacccaccccgtgaagcccctggcccagatcgccggaaacagatacgcctccggacctgtgggaaaggccctgagcgacgcatgtatgggcacaatcgcctccttcctgtctaagtaccaggacatcatcatcgaacaccagaaggtggtgaagggcaaccagaagagactggagagcctgcgggagctggccggcaaggaaaacctggaataccctagcgtgaccctgccacctcagcctcacaccaaggagggcgttgatgcctacaacgaagtgatcgcccgggtgcgaatgtgggtgaacctgaacctgtggcagaagctgaagctaagcagagatgatgccaagcctctgctgagactgaagggattcccttcctttcctctggtcgagagacaggccaacgaagtggactggtgggacatggtgtgtaacgtgaagaagctgatcaacgagaaaaaggaggatggcaaggtgttttggcagaatctggctggctacaagagacaggaagccctgagaccatacctgagcagcgaggaagatcggaagaagggaaagaaattcgctcggtaccagctgggcgacctgctgctgcacctggaaaagaagcacggcgaggactggggaaaggtgtacgacgaggcctgggagcggattgacaagaaagtggaaggcctgagcaagcacatcaagctggaagaggaacggagaagcgaggacgcccagagcaaggccgccctgaccgactggctgcgggctaaggccagcttcgtgatcgagggcctgaaggaggccgacaaggacgagttctgcagatgcgagctgaagctgcagaagtggtacggggacctgcggggaaagcccttcgccatcgaagccgagaacagcatcctggacatcagcggcttcagcaagcagtacaactgtgccttcatctggcagaaggacggcgtgaagaagctgaacctgtacctgatcatcaactacttcaagggcggcaagctgcggttcaagaagatcaaacctgaagccttcgaagccaacagattctacaccgtgatcaacaaaaagagcggcgagatcgtgcccatggaggtgaacttcaacttcgacgaccccaacctgatcatcctgcctctggcctttggcaagagacagggcagagaattcatctggaacgacctgctgtccctggaaaccggcagcctgaagctggccaacggaagagtgatcgagaagacactgtacaacagaagaacccggcaggatgagcctgccctgttcgtggccctgaccttcgagcggcgggaggtcctggactcctccaatatcaaaccaatgaacctgatcggcgtggcaagaggcgaaaacatccccgccgtgatcgccctgaccgaccccgagggctgcccactgagccggtttaaggatagcctgggaaacccaacccacatcctgagaatcggcgagagctataaggagaagcagcggaccatccaggccaagaaggaggtggagcagcggagagccggcggctacagccggaagtacgccagcaaagccaagaatctggcagacgatatggtgagaaacaccgctagagatctgctgtactacgccgtgacccaggatgccatgctgatcttcgccaacctgagccggggcttcggccggcagggcaagcggaccttcatggccgagagacagtacacacggatggaggactggctgaccgccaagctggcctacgagggcctgagcaagacctacctgtccaagacactggcccagtacacctccaagacatgcagcaactgtgggtttaccatcaccagcgccgactacgacagggtgctggagaagctgaagaagacagcaacaggctggatgaccacaattaacggcaaggagctgaaggtggagggccagattacctactacaacagatacaagagacagaacgtagtcaaggacctgtccgtcgagctggatagactgagcgaagaatctgtgaacaacgacatctcctcctggacaaagggcagaagcggagaagctctgagcctcctgaagaaaagattctcccatagacccgtgcaggagaagttcgtgtgcctgaactgcggcttcgagacacacgcagccgagcaagccgccctgaacatcgccagatcctggctgttcctgcggagccaggagtacaagaaataccagacaaacaagacaaccggcaacaccgataagagagccttcgtcgagacctggcagtccttttaccggaagaagcttaaggaggtgtggaaacctgccgtgcggtctggcggatctggcggaggctccacaagcagccaggagcccgtgaccttcgaggacgtggccgtgtacttcacccagaaccagtgggccagcctggaccccatgcagagggccctgtacctggaggtgatgctggagaactacgccaacatcaccagcctggccctgcccttccccaagcccgacctgatcctgcagctggagcagggcgaggccccctggggcctggacccctggacccccctggacggcgaggccctgggcggcgtgcacaccagccccaagaaaaagagaaaagtctaagctgccttctgcggggcttgccttctggccatgcccttcttctctcccttgcacctgtacctcttggtctttgaataaagcctgagtaggaaggctagcaaaaaaaaaaaaaaaaaaaaaaaaaaaaaaaaaaaaaaaaaaaaaaaaaaaaaaaaaaaaaaaaaaaaaaaaaaaaaaaa

SEQ ID NO: 6139 - RNA, 5797 nt, synthetic construct
  source 1..5797: mol_type = other RNA
aggaaataagagagaaaagaagagtaagaagaaatataagagccaccatggcccctaagaagaagcgtaaagtgagccggatggaacgcctcgtctacgaggtgcggcagaagtgcagaaacatcgaggacatctgcatctcctgcggatctctgaacgtgaccctggagcacccactgttcatcggcggcatgtgccagaactgtaaaaactgttttctggagtgtgcctatcaatacgacgatgacggctaccagagctactgcaccatctgttgcggcggaagagaggtgctgatgtgtggaaataacaactgctgccggtgcttctgcgtggaatgcgtggacctgctggtgggccccggcgccgcccaggccgctattaaggaagatccttggaactgctacatgtgcggccacaagggcacatacggcctgctgagacggagagaggactggcctagcagactgcagatgttcttcgccaataaccacgaccaggagttcgacccccctaaggtgtaccctcccgtccccgccgagaagagaaagcccatccgggtcctgagcctgttcgatggcatcgccaccggtctgctggtgctgaaggacctgggcatccaggtggataggtacattgcctccgaggtgtgcgaggactccatcaccgtgggaatggtgcgtcatcagggcaagatcatgtacgtgggcgacgtgcggagcgtgacacagaagcatatccaggagtggggccctttcgacctggtgatcggcggcagcccttgcaatgacctgagcatcgtgaacccagcccggaagggcctgtacgagggaaccggcagactgttcttcgagttttacagactgctgcacgacgcccggcctaaggaaggcgacgaccggcccttcttttggctgttcgagaatgtggtggccatgggagtcagcgacaagcgggatattagccggttcctggagagcaaccccgtgatgatcgatgccaaggaagtgagcgccgcccaccgggccagatacttctggggcaatctgcctggcatgaacagacccctggccagcaccgtgaacgacaagctggagctgcaggagtgcctggagcacggccggatcgccaagttcagcaaggtgagaaccatcaccacccgaagcaacagcatcaaacaaggcaaggaccagcactttcctgtgttcatgaacgagaaggaggacatcctgtggtgtaccgagatggagagagtgttcgggttcccagtccactacacagatgtcagcaacatgtctagactggccagacagagactgctgggaagaagctggtccgtccctgtgatcagacacctgttcgcccctctgaaggagtacttcgcctgcgtgagcagcggcaacagcaacgccaacagccggggccccagcttctctagcggcctggtgccactgtccctgagagggagccacatgggccccatggagatctacaaaaccgtgagcgcctggaagcggcagcctgtgcgcgtgctgagcctgtttcggaatatcgataaagtcctgaaaagcctgggattcctggagagcggctctggctccggcggtggcaccctgaagtacgtggaggatgtgacaaacgtggtcagacgggatgtggagaagtggggccccttcgatctggtgtacggcagcacccaacccctgggcagctcttgtgaccggtgccctggctggtacatgtttcagttccaccggatcctgcagtacgccctgccgagacaggagtcccagcggccattcttttggattttcatggacaacttgctgctgaccgaggatgaccaggaaactaccactcggttcctgcagaccgaagccgtgaccctgcaggacgtgagaggccgggactaccagaacgccatgcgggtgtggtccaacatccctggactgaaaagcaagcacgcacctctgacccctaaagaagaggagtacctgcaggcccaggtgcggagcagaagcaagctggacgcccctaaggtggatctgctggtgaagaattgcctcctgcccctgagagagtacttcaagtatttcagccagaatagtctgcccctgggcggcccaagcagcggcgcccctcctcccagcggcggcagcccagccggctccccaacctctaccgaggagggcacctctgagtccgccacccccgagagcggccctggcacctccaccgagcccagcgagggcagcgcacccggcagccctgccggcagccccacctccacagaggagggaaccagcaccgagcccagcgaaggcagcgccccaggcaccagcaccgagcctagtgagggcggctctggcggcggcagcgcccaggagattaaacggatcaacaagatcagaagaagacttgtgaaagacagcaacaccaagaaggccggcaagacaggccccatgaaaaccctgctggttagagtgatgacacccgatctgagagagcggctggaaaacctgagaaagaagcctgaaaatatcccccagcccatcagcaatacatctagagccaacctgaataagctgctgaccgattacaccgaaatgaagaaggcgatcctgcatgtgtactgggaagagttccagaaggaccctgtgggcctgatgagccgggtggcccagcctgccagcaagaagatcgatcagaacaagctgaaacctgagatggacgagaagggcaacctgaccaccgccggctttgcctgctctcagtgtggccagcccctgttcgtgtacaagctggagcaggtgtctgagaagggcaaggcttacaccaactacttcggacggtgcaatgtggccgagcacgaaaagctgatcctgctggcccagctgaagcccgagaaggatagcgacgaagccgtgacatatagcctgggaaagtttgggcagagggccctggatttctacagcattcatgtgaccaaggagtccacccaccccgtgaagcccctggcccagatcgccggaaacagatacgcctccggacctgtgggaaaggccctgagcgacgcatgtatgggcacaatcgcctccttcctgtctaagtaccaggacatcatcatcgaacaccagaaggtggtgaagggcaaccagaagagactggagagcctgcgggagctggccggcaaggaaaacctggaataccctagcgtgaccctgccacctcagcctcacaccaaggagggcgttgatgcctacaacgaagtgatcgcccgggtgcgaatgtgggtgaacctgaacctgtggcagaagctgaagctaagcagagatgatgccaagcctctgctgagactgaagggattcccttcctttcctctggtcgagagacaggccaacgaagtggactggtgggacatggtgtgtaacgtgaagaagctgatcaacgagaaaaaggaggatggcaaggtgttttggcagaatctggctggctacaagagacaggaagccctgagaccatacctgagcagcgaggaagatcggaagaagggaaagaaattcgctcggtaccagctgggcgacctgctgctgcacctggaaaagaagcacggcgaggactggggaaaggtgtacgacgaggcctgggagcggattgacaagaaagtggaaggcctgagcaagcacatcaagctggaagaggaacggagaagcgaggacgcccagagcaaggccgccctgaccgactggctgcgggctaaggccagcttcgtgatcgagggcctgaaggaggccgacaaggacgagttctgcagatgcgagctgaagctgcagaagtggtacggggacctgcggggaaagcccttcgccatcgaagccgagaacagcatcctggacatcagcggcttcagcaagcagtacaactgtgccttcatctggcagaaggacggcgtgaagaagctgaacctgtacctgatcatcaactacttcaagggcggcaagctgcggttcaagaagatcaaacctgaagccttcgaagccaacagattctacaccgtgatcaacaaaaagagcggcgagatcgtgcccatggaggtgaacttcaacttcgacgaccccaacctgatcatcctgcctctggcctttggcaagagacagggcagagaattcatctggaacgacctgctgtccctggaaaccggcagcctgaagctggccaacggaagagtgatcgagaagacactgtacaacagaagaacccggcaggatgagcctgccctgttcgtggccctgaccttcgagcggcgggaggtcctggactcctccaatatcaaaccaatgaacctgatcggcgtggcaagaggcgaaaacatccccgccgtgatcgccctgaccgaccccgagggctgcccactgagccggtttaaggatagcctgggaaacccaacccacatcctgagaatcggcgagagctataaggagaagcagcggaccatccaggccaagaaggaggtggagcagcggagagccggcggctacagccggaagtacgccagcaaagccaagaatctggcagacgatatggtgagaaacaccgctagagatctgctgtactacgccgtgacccaggatgccatgctgatcttcgccaacctgagccggggcttcggccggcagggcaagcggaccttcatggccgagagacagtacacacggatggaggactggctgaccgccaagctggcctacgagggcctgagcaagacctacctgtccaagacactggcccagtacacctccaagacatgcagcaactgtgggtttaccatcaccagcgccgactacgacagggtgctggagaagctgaagaagacagcaacaggctggatgaccacaattaacggcaaggagctgaaggtggagggccagattacctactacaacagatacaagagacagaacgtagtcaaggacctgtccgtcgagctggatagactgagcgaagaatctgtgaacaacgacatctcctcctggacaaagggcagaagcggagaagctctgagcctcctgaagaaaagattctcccatagacccgtgcaggagaagttcgtgtgcctgaactgcggcttcgagacacacgcagccgagcaagccgccctgaacatcgccagatcctggctgttcctgcggagccaggagtacaagaaataccagacaaacaagacaaccggcaacaccgataagagagccttcgtcgagacctggcagtccttttaccggaagaagcttaaggaggtgtggaaacctgccgtgcggtctggcggatctggcggaggctccacaagcgcccagatgctggtgaccttcaaggacgtggccgtgaccttcacccaggaggagtggaggcagctggacctgacccagaggaccctgtacagggaggtgatgctggagacctgcggcctgctggtgagcctgggccacagggtgcccaagcccgagctggtgcacctgctggagcacggccaggagctgtggaccgtgaagaccggcctgagccagcccacctgcgccggcgacaggacccagaccagccccaagaaaaagagaaaagtctaagctgccttctgcggggcttgccttctggccatgcccttcttctctcccttgcacctgtacctcttggtctttgaataaagcctgagtaggaaggctagcaaaaaaaaaaaaaaaaaaaaaaaaaaaaaaaaaaaaaaaaaaaaaaaaaaaaaaaaaaaaaaaaaaaaaaaaaaaaaaaa

SEQ ID NO: 6140 - RNA, 5797 nt, synthetic construct
  source 1..5797: mol_type = other RNA
aggaaataagagagaaaagaagagtaagaagaaatataagagccaccatggcccctaagaagaagcgtaaagtgagccggatggaacgcctcgtctacgaggtgcggcagaagtgcagaaacatcgaggacatctgcatctcctgcggatctctgaacgtgaccctggagcacccactgttcatcggcggcatgtgccagaactgtaaaaactgttttctggagtgtgcctatcaatacgacgatgacggctaccagagctactgcaccatctgttgcggcggaagagaggtgctgatgtgtggaaataacaactgctgccggtgcttctgcgtggaatgcgtggacctgctggtgggccccggcgccgcccaggccgctattaaggaagatccttggaactgctacatgtgcggccacaagggcacatacggcctgctgagacggagagaggactggcctagcagactgcagatgttcttcgccaataaccacgaccaggagttcgacccccctaaggtgtaccctcccgtccccgccgagaagagaaagcccatccgggtcctgagcctgttcgatggcatcgccaccggtctgctggtgctgaaggacctgggcatccaggtggataggtacattgcctccgaggtgtgcgaggactccatcaccgtgggaatggtgcgtcatcagggcaagatcatgtacgtgggcgacgtgcggagcgtgacacagaagcatatccaggagtggggccctttcgacctggtgatcggcggcagcccttgcaatgacctgagcatcgtgaacccagcccggaagggcctgtacgagggaaccggcagactgttcttcgagttttacagactgctgcacgacgcccggcctaaggaaggcgacgaccggcccttcttttggctgttcgagaatgtggtggccatgggagtcagcgacaagcgggatattagccggttcctggagagcaaccccgtgatgatcgatgccaaggaagtgagcgccgcccaccgggccagatacttctggggcaatctgcctggcatgaacagacccctggccagcaccgtgaacgacaagctggagctgcaggagtgcctggagcacggccggatcgccaagttcagcaaggtgagaaccatcaccacccgaagcaacagcatcaaacaaggcaaggaccagcactttcctgtgttcatgaacgagaaggaggacatcctgtggtgtaccgagatggagagagtgttcgggttcccagtccactacacagatgtcagcaacatgtctagactggccagacagagactgctgggaagaagctggtccgtccctgtgatcagacacctgttcgcccctctgaaggagtacttcgcctgcgtgagcagcggcaacagcaacgccaacagccggggccccagcttctctagcggcctggtgccactgtccctgagagggagccacatgggccccatggagatctacaaaaccgtgagcgcctggaagcggcagcctgtgcgcgtgctgagcctgtttcggaatatcgataaagtcctgaaaagcctgggattcctggagagcggctctggctccggcggtggcaccctgaagtacgtggaggatgtgacaaacgtggtcagacgggatgtggagaagtggggccccttcgatctggtgtacggcagcacccaacccctgggcagctcttgtgaccggtgccctggctggtacatgtttcagttccaccggatcctgcagtacgccctgccgagacaggagtcccagcggccattcttttggattttcatggacaacttgctgctgaccgaggatgaccaggaaactaccactcggttcctgcagaccgaagccgtgaccctgcaggacgtgagaggccgggactaccagaacgccatgcgggtgtggtccaacatccctggactgaaaagcaagcacgcacctctgacccctaaagaagaggagtacctgcaggcccaggtgcggagcagaagcaagctggacgcccctaaggtggatctgctggtgaagaattgcctcctgcccctgagagagtacttcaagtatttcagccagaatagtctgcccctgggcggcccaagcagcggcgcccctcctcccagcggcggcagcccagccggctccccaacctctaccgaggagggcacctctgagtccgccacccccgagagcggccctggcacctccaccgagcccagcgagggcagcgcacccggcagccctgccggcagccccacctccacagaggagggaaccagcaccgagcccagcgaaggcagcgccccaggcaccagcaccgagcctagtgagggcggctctggcggcggcagcgcccaggagattaaacggatcaacaagatcagaagaagacttgtgaaagacagcaacaccaagaaggccggcaagacaggccccatgaaaaccctgctggttagagtgatgacacccgatctgagagagcggctggaaaacctgagaaagaagcctgaaaatatcccccagcccatcagcaatacatctagagccaacctgaataagctgctgaccgattacaccgaaatgaagaaggcgatcctgcatgtgtactgggaagagttccagaaggaccctgtgggcctgatgagccgggtggcccagcctgccagcaagaagatcgatcagaacaagctgaaacctgagatggacgagaagggcaacctgaccaccgccggctttgcctgctctcagtgtggccagcccctgttcgtgtacaagctggagcaggtgtctgagaagggcaaggcttacaccaactacttcggacggtgcaatgtggccgagcacgaaaagctgatcctgctggcccagctgaagcccgagaaggatagcgacgaagccgtgacatatagcctgggaaagtttgggcagagggccctggatttctacagcattcatgtgaccaaggagtccacccaccccgtgaagcccctggcccagatcgccggaaacagatacgcctccggacctgtgggaaaggccctgagcgacgcatgtatgggcacaatcgcctccttcctgtctaagtaccaggacatcatcatcgaacaccagaaggtggtgaagggcaaccagaagagactggagagcctgcgggagctggccggcaaggaaaacctggaataccctagcgtgaccctgccacctcagcctcacaccaaggagggcgttgatgcctacaacgaagtgatcgcccgggtgcgaatgtgggtgaacctgaacctgtggcagaagctgaagctaagcagagatgatgccaagcctctgctgagactgaagggattcccttcctttcctctggtcgagagacaggccaacgaagtggactggtgggacatggtgtgtaacgtgaagaagctgatcaacgagaaaaaggaggatggcaaggtgttttggcagaatctggctggctacaagagacaggaagccctgagaccatacctgagcagcgaggaagatcggaagaagggaaagaaattcgctcggtaccagctgggcgacctgctgctgcacctggaaaagaagcacggcgaggactggggaaaggtgtacgacgaggcctgggagcggattgacaagaaagtggaaggcctgagcaagcacatcaagctggaagaggaacggagaagcgaggacgcccagagcaaggccgccctgaccgactggctgcgggctaaggccagcttcgtgatcgagggcctgaaggaggccgacaaggacgagttctgcagatgcgagctgaagctgcagaagtggtacggggacctgcggggaaagcccttcgccatcgaagccgagaacagcatcctggacatcagcggcttcagcaagcagtacaactgtgccttcatctggcagaaggacggcgtgaagaagctgaacctgtacctgatcatcaactacttcaagggcggcaagctgcggttcaagaagatcaaacctgaagccttcgaagccaacagattctacaccgtgatcaacaaaaagagcggcgagatcgtgcccatggaggtgaacttcaacttcgacgaccccaacctgatcatcctgcctctggcctttggcaagagacagggcagagaattcatctggaacgacctgctgtccctggaaaccggcagcctgaagctggccaacggaagagtgatcgagaagacactgtacaacagaagaacccggcaggatgagcctgccctgttcgtggccctgaccttcgagcggcgggaggtcctggactcctccaatatcaaaccaatgaacctgatcggcgtggcaagaggcgaaaacatccccgccgtgatcgccctgaccgaccccgagggctgcccactgagccggtttaaggatagcctgggaaacccaacccacatcctgagaatcggcgagagctataaggagaagcagcggaccatccaggccaagaaggaggtggagcagcggagagccggcggctacagccggaagtacgccagcaaagccaagaatctggcagacgatatggtgagaaacaccgctagagatctgctgtactacgccgtgacccaggatgccatgctgatcttcgccaacctgagccggggcttcggccggcagggcaagcggaccttcatggccgagagacagtacacacggatggaggactggctgaccgccaagctggcctacgagggcctgagcaagacctacctgtccaagacactggcccagtacacctccaagacatgcagcaactgtgggtttaccatcaccagcgccgactacgacagggtgctggagaagctgaagaagacagcaacaggctggatgaccacaattaacggcaaggagctgaaggtggagggccagattacctactacaacagatacaagagacagaacgtagtcaaggacctgtccgtcgagctggatagactgagcgaagaatctgtgaacaacgacatctcctcctggacaaagggcagaagcggagaagctctgagcctcctgaagaaaagattctcccatagacccgtgcaggagaagttcgtgtgcctgaactgcggcttcgagacacacgcagccgagcaagccgccctgaacatcgccagatcctggctgttcctgcggagccaggagtacaagaaataccagacaaacaagacaaccggcaacaccgataagagagccttcgtcgagacctggcagtccttttaccggaagaagcttaaggaggtgtggaaacctgccgtgcggtctggcggatctggcggaggctccacaagcagcggcagccaggacgccgtgacctacgaggacgtgcacgtgaacttcacccccgaggagtgggccctgctggacagcagccagaagagcctgtacaaggaggtgatgctggagacctacaggaacctgaccagcatcggctacaagtgggaggacctgaacatcgaggagcactgccagagcagcaggaggctgaagaggtacatcatcggccacagcaggtacaagccctgcgacagggagaccagccccaagaaaaagagaaaagtctaagctgccttctgcggggcttgccttctggccatgcccttcttctctcccttgcacctgtacctcttggtctttgaataaagcctgagtaggaaggctagcaaaaaaaaaaaaaaaaaaaaaaaaaaaaaaaaaaaaaaaaaaaaaaaaaaaaaaaaaaaaaaaaaaaaaaaaaaaaaaaa

SEQ ID NO: 6141 - RNA, 5797 nt, synthetic construct
  source 1..5797: mol_type = other RNA
aggaaataagagagaaaagaagagtaagaagaaatataagagccaccatggcccctaagaagaagcgtaaagtgagccggatggaacgcctcgtctacgaggtgcggcagaagtgcagaaacatcgaggacatctgcatctcctgcggatctctgaacgtgaccctggagcacccactgttcatcggcggcatgtgccagaactgtaaaaactgttttctggagtgtgcctatcaatacgacgatgacggctaccagagctactgcaccatctgttgcggcggaagagaggtgctgatgtgtggaaataacaactgctgccggtgcttctgcgtggaatgcgtggacctgctggtgggccccggcgccgcccaggccgctattaaggaagatccttggaactgctacatgtgcggccacaagggcacatacggcctgctgagacggagagaggactggcctagcagactgcagatgttcttcgccaataaccacgaccaggagttcgacccccctaaggtgtaccctcccgtccccgccgagaagagaaagcccatccgggtcctgagcctgttcgatggcatcgccaccggtctgctggtgctgaaggacctgggcatccaggtggataggtacattgcctccgaggtgtgcgaggactccatcaccgtgggaatggtgcgtcatcagggcaagatcatgtacgtgggcgacgtgcggagcgtgacacagaagcatatccaggagtggggccctttcgacctggtgatcggcggcagcccttgcaatgacctgagcatcgtgaacccagcccggaagggcctgtacgagggaaccggcagactgttcttcgagttttacagactgctgcacgacgcccggcctaaggaaggcgacgaccggcccttcttttggctgttcgagaatgtggtggccatgggagtcagcgacaagcgggatattagccggttcctggagagcaaccccgtgatgatcgatgccaaggaagtgagcgccgcccaccgggccagatacttctggggcaatctgcctggcatgaacagacccctggccagcaccgtgaacgacaagctggagctgcaggagtgcctggagcacggccggatcgccaagttcagcaaggtgagaaccatcaccacccgaagcaacagcatcaaacaaggcaaggaccagcactttcctgtgttcatgaacgagaaggaggacatcctgtggtgtaccgagatggagagagtgttcgggttcccagtccactacacagatgtcagcaacatgtctagactggccagacagagactgctgggaagaagctggtccgtccctgtgatcagacacctgttcgcccctctgaaggagtacttcgcctgcgtgagcagcggcaacagcaacgccaacagccggggccccagcttctctagcggcctggtgccactgtccctgagagggagccacatgggccccatggagatctacaaaaccgtgagcgcctggaagcggcagcctgtgcgcgtgctgagcctgtttcggaatatcgataaagtcctgaaaagcctgggattcctggagagcggctctggctccggcggtggcaccctgaagtacgtggaggatgtgacaaacgtggtcagacgggatgtggagaagtggggccccttcgatctggtgtacggcagcacccaacccctgggcagctcttgtgaccggtgccctggctggtacatgtttcagttccaccggatcctgcagtacgccctgccgagacaggagtcccagcggccattcttttggattttcatggacaacttgctgctgaccgaggatgaccaggaaactaccactcggttcctgcagaccgaagccgtgaccctgcaggacgtgagaggccgggactaccagaacgccatgcgggtgtggtccaacatccctggactgaaaagcaagcacgcacctctgacccctaaagaagaggagtacctgcaggcccaggtgcggagcagaagcaagctggacgcccctaaggtggatctgctggtgaagaattgcctcctgcccctgagagagtacttcaagtatttcagccagaatagtctgcccctgggcggcccaagcagcggcgcccctcctcccagcggcggcagcccagccggctccccaacctctaccgaggagggcacctctgagtccgccacccccgagagcggccctggcacctccaccgagcccagcgagggcagcgcacccggcagccctgccggcagccccacctccacagaggagggaaccagcaccgagcccagcgaaggcagcgccccaggcaccagcaccgagcctagtgagggcggctctggcggcggcagcgcccaggagattaaacggatcaacaagatcagaagaagacttgtgaaagacagcaacaccaagaaggccggcaagacaggccccatgaaaaccctgctggttagagtgatgacacccgatctgagagagcggctggaaaacctgagaaagaagcctgaaaatatcccccagcccatcagcaatacatctagagccaacctgaataagctgctgaccgattacaccgaaatgaagaaggcgatcctgcatgtgtactgggaagagttccagaaggaccctgtgggcctgatgagccgggtggcccagcctgccagcaagaagatcgatcagaacaagctgaaacctgagatggacgagaagggcaacctgaccaccgccggctttgcctgctctcagtgtggccagcccctgttcgtgtacaagctggagcaggtgtctgagaagggcaaggcttacaccaactacttcggacggtgcaatgtggccgagcacgaaaagctgatcctgctggcccagctgaagcccgagaaggatagcgacgaagccgtgacatatagcctgggaaagtttgggcagagggccctggatttctacagcattcatgtgaccaaggagtccacccaccccgtgaagcccctggcccagatcgccggaaacagatacgcctccggacctgtgggaaaggccctgagcgacgcatgtatgggcacaatcgcctccttcctgtctaagtaccaggacatcatcatcgaacaccagaaggtggtgaagggcaaccagaagagactggagagcctgcgggagctggccggcaaggaaaacctggaataccctagcgtgaccctgccacctcagcctcacaccaaggagggcgttgatgcctacaacgaagtgatcgcccgggtgcgaatgtgggtgaacctgaacctgtggcagaagctgaagctaagcagagatgatgccaagcctctgctgagactgaagggattcccttcctttcctctggtcgagagacaggccaacgaagtggactggtgggacatggtgtgtaacgtgaagaagctgatcaacgagaaaaaggaggatggcaaggtgttttggcagaatctggctggctacaagagacaggaagccctgagaccatacctgagcagcgaggaagatcggaagaagggaaagaaattcgctcggtaccagctgggcgacctgctgctgcacctggaaaagaagcacggcgaggactggggaaaggtgtacgacgaggcctgggagcggattgacaagaaagtggaaggcctgagcaagcacatcaagctggaagaggaacggagaagcgaggacgcccagagcaaggccgccctgaccgactggctgcgggctaaggccagcttcgtgatcgagggcctgaaggaggccgacaaggacgagttctgcagatgcgagctgaagctgcagaagtggtacggggacctgcggggaaagcccttcgccatcgaagccgagaacagcatcctggacatcagcggcttcagcaagcagtacaactgtgccttcatctggcagaaggacggcgtgaagaagctgaacctgtacctgatcatcaactacttcaagggcggcaagctgcggttcaagaagatcaaacctgaagccttcgaagccaacagattctacaccgtgatcaacaaaaagagcggcgagatcgtgcccatggaggtgaacttcaacttcgacgaccccaacctgatcatcctgcctctggcctttggcaagagacagggcagagaattcatctggaacgacctgctgtccctggaaaccggcagcctgaagctggccaacggaagagtgatcgagaagacactgtacaacagaagaacccggcaggatgagcctgccctgttcgtggccctgaccttcgagcggcgggaggtcctggactcctccaatatcaaaccaatgaacctgatcggcgtggcaagaggcgaaaacatccccgccgtgatcgccctgaccgaccccgagggctgcccactgagccggtttaaggatagcctgggaaacccaacccacatcctgagaatcggcgagagctataaggagaagcagcggaccatccaggccaagaaggaggtggagcagcggagagccggcggctacagccggaagtacgccagcaaagccaagaatctggcagacgatatggtgagaaacaccgctagagatctgctgtactacgccgtgacccaggatgccatgctgatcttcgccaacctgagccggggcttcggccggcagggcaagcggaccttcatggccgagagacagtacacacggatggaggactggctgaccgccaagctggcctacgagggcctgagcaagacctacctgtccaagacactggcccagtacacctccaagacatgcagcaactgtgggtttaccatcaccagcgccgactacgacagggtgctggagaagctgaagaagacagcaacaggctggatgaccacaattaacggcaaggagctgaaggtggagggccagattacctactacaacagatacaagagacagaacgtagtcaaggacctgtccgtcgagctggatagactgagcgaagaatctgtgaacaacgacatctcctcctggacaaagggcagaagcggagaagctctgagcctcctgaagaaaagattctcccatagacccgtgcaggagaagttcgtgtgcctgaactgcggcttcgagacacacgcagccgagcaagccgccctgaacatcgccagatcctggctgttcctgcggagccaggagtacaagaaataccagacaaacaagacaaccggcaacaccgataagagagccttcgtcgagacctggcagtccttttaccggaagaagcttaaggaggtgtggaaacctgccgtgcggtctggcggatctggcggaggctccacaagcccccaggagagcgtggccttcgacgacgtggccgtgtacttcaccaagaaggagtgggccatcatggtgcccgaccagagggccctgtacagggacgtgatgctggagaactacgaggccgtggccttcgtggtgccccccaccagcaagcccgccctgatcagccacctggagcagggcaaggagccctgcttcacccagccccagggcgtgctgagcaggagggactggagggccggcttcaccagccccaagaaaaagagaaaagtctaagctgccttctgcggggcttgccttctggccatgcccttcttctctcccttgcacctgtacctcttggtctttgaataaagcctgagtaggaaggctagcaaaaaaaaaaaaaaaaaaaaaaaaaaaaaaaaaaaaaaaaaaaaaaaaaaaaaaaaaaaaaaaaaaaaaaaaaaaaaaaa

SEQ ID NO: 6142 - RNA, 5797 nt, synthetic construct
  source 1..5797: mol_type = other RNA
aggaaataagagagaaaagaagagtaagaagaaatataagagccaccatggcccctaagaagaagcgtaaagtgagccggatggaacgcctcgtctacgaggtgcggcagaagtgcagaaacatcgaggacatctgcatctcctgcggatctctgaacgtgaccctggagcacccactgttcatcggcggcatgtgccagaactgtaaaaactgttttctggagtgtgcctatcaatacgacgatgacggctaccagagctactgcaccatctgttgcggcggaagagaggtgctgatgtgtggaaataacaactgctgccggtgcttctgcgtggaatgcgtggacctgctggtgggccccggcgccgcccaggccgctattaaggaagatccttggaactgctacatgtgcggccacaagggcacatacggcctgctgagacggagagaggactggcctagcagactgcagatgttcttcgccaataaccacgaccaggagttcgacccccctaaggtgtaccctcccgtccccgccgagaagagaaagcccatccgggtcctgagcctgttcgatggcatcgccaccggtctgctggtgctgaaggacctgggcatccaggtggataggtacattgcctccgaggtgtgcgaggactccatcaccgtgggaatggtgcgtcatcagggcaagatcatgtacgtgggcgacgtgcggagcgtgacacagaagcatatccaggagtggggccctttcgacctggtgatcggcggcagcccttgcaatgacctgagcatcgtgaacccagcccggaagggcctgtacgagggaaccggcagactgttcttcgagttttacagactgctgcacgacgcccggcctaaggaaggcgacgaccggcccttcttttggctgttcgagaatgtggtggccatgggagtcagcgacaagcgggatattagccggttcctggagagcaaccccgtgatgatcgatgccaaggaagtgagcgccgcccaccgggccagatacttctggggcaatctgcctggcatgaacagacccctggccagcaccgtgaacgacaagctggagctgcaggagtgcctggagcacggccggatcgccaagttcagcaaggtgagaaccatcaccacccgaagcaacagcatcaaacaaggcaaggaccagcactttcctgtgttcatgaacgagaaggaggacatcctgtggtgtaccgagatggagagagtgttcgggttcccagtccactacacagatgtcagcaacatgtctagactggccagacagagactgctgggaagaagctggtccgtccctgtgatcagacacctgttcgcccctctgaaggagtacttcgcctgcgtgagcagcggcaacagcaacgccaacagccggggccccagcttctctagcggcctggtgccactgtccctgagagggagccacatgggccccatggagatctacaaaaccgtgagcgcctggaagcggcagcctgtgcgcgtgctgagcctgtttcggaatatcgataaagtcctgaaaagcctgggattcctggagagcggctctggctccggcggtggcaccctgaagtacgtggaggatgtgacaaacgtggtcagacgggatgtggagaagtggggccccttcgatctggtgtacggcagcacccaacccctgggcagctcttgtgaccggtgccctggctggtacatgtttcagttccaccggatcctgcagtacgccctgccgagacaggagtcccagcggccattcttttggattttcatggacaacttgctgctgaccgaggatgaccaggaaactaccactcggttcctgcagaccgaagccgtgaccctgcaggacgtgagaggccgggactaccagaacgccatgcgggtgtggtccaacatccctggactgaaaagcaagcacgcacctctgacccctaaagaagaggagtacctgcaggcccaggtgcggagcagaagcaagctggacgcccctaaggtggatctgctggtgaagaattgcctcctgcccctgagagagtacttcaagtatttcagccagaatagtctgcccctgggcggcccaagcagcggcgcccctcctcccagcggcggcagcccagccggctccccaacctctaccgaggagggcacctctgagtccgccacccccgagagcggccctggcacctccaccgagcccagcgagggcagcgcacccggcagccctgccggcagccccacctccacagaggagggaaccagcaccgagcccagcgaaggcagcgccccaggcaccagcaccgagcctagtgagggcggctctggcggcggcagcgcccaggagattaaacggatcaacaagatcagaagaagacttgtgaaagacagcaacaccaagaaggccggcaagacaggccccatgaaaaccctgctggttagagtgatgacacccgatctgagagagcggctggaaaacctgagaaagaagcctgaaaatatcccccagcccatcagcaatacatctagagccaacctgaataagctgctgaccgattacaccgaaatgaagaaggcgatcctgcatgtgtactgggaagagttccagaaggaccctgtgggcctgatgagccgggtggcccagcctgccagcaagaagatcgatcagaacaagctgaaacctgagatggacgagaagggcaacctgaccaccgccggctttgcctgctctcagtgtggccagcccctgttcgtgtacaagctggagcaggtgtctgagaagggcaaggcttacaccaactacttcggacggtgcaatgtggccgagcacgaaaagctgatcctgctggcccagctgaagcccgagaaggatagcgacgaagccgtgacatatagcctgggaaagtttgggcagagggccctggatttctacagcattcatgtgaccaaggagtccacccaccccgtgaagcccctggcccagatcgccggaaacagatacgcctccggacctgtgggaaaggccctgagcgacgcatgtatgggcacaatcgcctccttcctgtctaagtaccaggacatcatcatcgaacaccagaaggtggtgaagggcaaccagaagagactggagagcctgcgggagctggccggcaaggaaaacctggaataccctagcgtgaccctgccacctcagcctcacaccaaggagggcgttgatgcctacaacgaagtgatcgcccgggtgcgaatgtgggtgaacctgaacctgtggcagaagctgaagctaagcagagatgatgccaagcctctgctgagactgaagggattcccttcctttcctctggtcgagagacaggccaacgaagtggactggtgggacatggtgtgtaacgtgaagaagctgatcaacgagaaaaaggaggatggcaaggtgttttggcagaatctggctggctacaagagacaggaagccctgagaccatacctgagcagcgaggaagatcggaagaagggaaagaaattcgctcggtaccagctgggcgacctgctgctgcacctggaaaagaagcacggcgaggactggggaaaggtgtacgacgaggcctgggagcggattgacaagaaagtggaaggcctgagcaagcacatcaagctggaagaggaacggagaagcgaggacgcccagagcaaggccgccctgaccgactggctgcgggctaaggccagcttcgtgatcgagggcctgaaggaggccgacaaggacgagttctgcagatgcgagctgaagctgcagaagtggtacggggacctgcggggaaagcccttcgccatcgaagccgagaacagcatcctggacatcagcggcttcagcaagcagtacaactgtgccttcatctggcagaaggacggcgtgaagaagctgaacctgtacctgatcatcaactacttcaagggcggcaagctgcggttcaagaagatcaaacctgaagccttcgaagccaacagattctacaccgtgatcaacaaaaagagcggcgagatcgtgcccatggaggtgaacttcaacttcgacgaccccaacctgatcatcctgcctctggcctttggcaagagacagggcagagaattcatctggaacgacctgctgtccctggaaaccggcagcctgaagctggccaacggaagagtgatcgagaagacactgtacaacagaagaacccggcaggatgagcctgccctgttcgtggccctgaccttcgagcggcgggaggtcctggactcctccaatatcaaaccaatgaacctgatcggcgtggcaagaggcgaaaacatccccgccgtgatcgccctgaccgaccccgagggctgcccactgagccggtttaaggatagcctgggaaacccaacccacatcctgagaatcggcgagagctataaggagaagcagcggaccatccaggccaagaaggaggtggagcagcggagagccggcggctacagccggaagtacgccagcaaagccaagaatctggcagacgatatggtgagaaacaccgctagagatctgctgtactacgccgtgacccaggatgccatgctgatcttcgccaacctgagccggggcttcggccggcagggcaagcggaccttcatggccgagagacagtacacacggatggaggactggctgaccgccaagctggcctacgagggcctgagcaagacctacctgtccaagacactggcccagtacacctccaagacatgcagcaactgtgggtttaccatcaccagcgccgactacgacagggtgctggagaagctgaagaagacagcaacaggctggatgaccacaattaacggcaaggagctgaaggtggagggccagattacctactacaacagatacaagagacagaacgtagtcaaggacctgtccgtcgagctggatagactgagcgaagaatctgtgaacaacgacatctcctcctggacaaagggcagaagcggagaagctctgagcctcctgaagaaaagattctcccatagacccgtgcaggagaagttcgtgtgcctgaactgcggcttcgagacacacgcagccgagcaagccgccctgaacatcgccagatcctggctgttcctgcggagccaggagtacaagaaataccagacaaacaagacaaccggcaacaccgataagagagccttcgtcgagacctggcagtccttttaccggaagaagcttaaggaggtgtggaaacctgccgtgcggtctggcggatctggcggaggctccacaagcgagatgggcctgctgaccttcagggacatcgccatcgagttcagcctggccgagtggcagtgcctggaccacgcccagaggaacctgtacagggacgtgatgctggagaactacaggaacctggtgagcctgggcgtggccgtgagcaagcccgacctgatcacctgcctggagcacaacaaggagcccaggaacatcaagaggaacgagatggtgagcaagcaccccgtgacctgcagccacaccagccccaagaaaaagagaaaagtctaagctgccttctgcggggcttgccttctggccatgcccttcttctctcccttgcacctgtacctcttggtctttgaataaagcctgagtaggaaggctagcaaaaaaaaaaaaaaaaaaaaaaaaaaaaaaaaaaaaaaaaaaaaaaaaaaaaaaaaaaaaaaaaaaaaaaaaaaaaaaaa

SEQ ID NO: 6143 - RNA, 5797 nt, synthetic construct
  source 1..5797: mol_type = other RNA
aggaaataagagagaaaagaagagtaagaagaaatataagagccaccatggcccctaagaagaagcgtaaagtgagccggatggaacgcctcgtctacgaggtgcggcagaagtgcagaaacatcgaggacatctgcatctcctgcggatctctgaacgtgaccctggagcacccactgttcatcggcggcatgtgccagaactgtaaaaactgttttctggagtgtgcctatcaatacgacgatgacggctaccagagctactgcaccatctgttgcggcggaagagaggtgctgatgtgtggaaataacaactgctgccggtgcttctgcgtggaatgcgtggacctgctggtgggccccggcgccgcccaggccgctattaaggaagatccttggaactgctacatgtgcggccacaagggcacatacggcctgctgagacggagagaggactggcctagcagactgcagatgttcttcgccaataaccacgaccaggagttcgacccccctaaggtgtaccctcccgtccccgccgagaagagaaagcccatccgggtcctgagcctgttcgatggcatcgccaccggtctgctggtgctgaaggacctgggcatccaggtggataggtacattgcctccgaggtgtgcgaggactccatcaccgtgggaatggtgcgtcatcagggcaagatcatgtacgtgggcgacgtgcggagcgtgacacagaagcatatccaggagtggggccctttcgacctggtgatcggcggcagcccttgcaatgacctgagcatcgtgaacccagcccggaagggcctgtacgagggaaccggcagactgttcttcgagttttacagactgctgcacgacgcccggcctaaggaaggcgacgaccggcccttcttttggctgttcgagaatgtggtggccatgggagtcagcgacaagcgggatattagccggttcctggagagcaaccccgtgatgatcgatgccaaggaagtgagcgccgcccaccgggccagatacttctggggcaatctgcctggcatgaacagacccctggccagcaccgtgaacgacaagctggagctgcaggagtgcctggagcacggccggatcgccaagttcagcaaggtgagaaccatcaccacccgaagcaacagcatcaaacaaggcaaggaccagcactttcctgtgttcatgaacgagaaggaggacatcctgtggtgtaccgagatggagagagtgttcgggttcccagtccactacacagatgtcagcaacatgtctagactggccagacagagactgctgggaagaagctggtccgtccctgtgatcagacacctgttcgcccctctgaaggagtacttcgcctgcgtgagcagcggcaacagcaacgccaacagccggggccccagcttctctagcggcctggtgccactgtccctgagagggagccacatgggccccatggagatctacaaaaccgtgagcgcctggaagcggcagcctgtgcgcgtgctgagcctgtttcggaatatcgataaagtcctgaaaagcctgggattcctggagagcggctctggctccggcggtggcaccctgaagtacgtggaggatgtgacaaacgtggtcagacgggatgtggagaagtggggccccttcgatctggtgtacggcagcacccaacccctgggcagctcttgtgaccggtgccctggctggtacatgtttcagttccaccggatcctgcagtacgccctgccgagacaggagtcccagcggccattcttttggattttcatggacaacttgctgctgaccgaggatgaccaggaaactaccactcggttcctgcagaccgaagccgtgaccctgcaggacgtgagaggccgggactaccagaacgccatgcgggtgtggtccaacatccctggactgaaaagcaagcacgcacctctgacccctaaagaagaggagtacctgcaggcccaggtgcggagcagaagcaagctggacgcccctaaggtggatctgctggtgaagaattgcctcctgcccctgagagagtacttcaagtatttcagccagaatagtctgcccctgggcggcccaagcagcggcgcccctcctcccagcggcggcagcccagccggctccccaacctctaccgaggagggcacctctgagtccgccacccccgagagcggccctggcacctccaccgagcccagcgagggcagcgcacccggcagccctgccggcagccccacctccacagaggagggaaccagcaccgagcccagcgaaggcagcgccccaggcaccagcaccgagcctagtgagggcggctctggcggcggcagcgcccaggagattaaacggatcaacaagatcagaagaagacttgtgaaagacagcaacaccaagaaggccggcaagacaggccccatgaaaaccctgctggttagagtgatgacacccgatctgagagagcggctggaaaacctgagaaagaagcctgaaaatatcccccagcccatcagcaatacatctagagccaacctgaataagctgctgaccgattacaccgaaatgaagaaggcgatcctgcatgtgtactgggaagagttccagaaggaccctgtgggcctgatgagccgggtggcccagcctgccagcaagaagatcgatcagaacaagctgaaacctgagatggacgagaagggcaacctgaccaccgccggctttgcctgctctcagtgtggccagcccctgttcgtgtacaagctggagcaggtgtctgagaagggcaaggcttacaccaactacttcggacggtgcaatgtggccgagcacgaaaagctgatcctgctggcccagctgaagcccgagaaggatagcgacgaagccgtgacatatagcctgggaaagtttgggcagagggccctggatttctacagcattcatgtgaccaaggagtccacccaccccgtgaagcccctggcccagatcgccggaaacagatacgcctccggacctgtgggaaaggccctgagcgacgcatgtatgggcacaatcgcctccttcctgtctaagtaccaggacatcatcatcgaacaccagaaggtggtgaagggcaaccagaagagactggagagcctgcgggagctggccggcaaggaaaacctggaataccctagcgtgaccctgccacctcagcctcacaccaaggagggcgttgatgcctacaacgaagtgatcgcccgggtgcgaatgtgggtgaacctgaacctgtggcagaagctgaagctaagcagagatgatgccaagcctctgctgagactgaagggattcccttcctttcctctggtcgagagacaggccaacgaagtggactggtgggacatggtgtgtaacgtgaagaagctgatcaacgagaaaaaggaggatggcaaggtgttttggcagaatctggctggctacaagagacaggaagccctgagaccatacctgagcagcgaggaagatcggaagaagggaaagaaattcgctcggtaccagctgggcgacctgctgctgcacctggaaaagaagcacggcgaggactggggaaaggtgtacgacgaggcctgggagcggattgacaagaaagtggaaggcctgagcaagcacatcaagctggaagaggaacggagaagcgaggacgcccagagcaaggccgccctgaccgactggctgcgggctaaggccagcttcgtgatcgagggcctgaaggaggccgacaaggacgagttctgcagatgcgagctgaagctgcagaagtggtacggggacctgcggggaaagcccttcgccatcgaagccgagaacagcatcctggacatcagcggcttcagcaagcagtacaactgtgccttcatctggcagaaggacggcgtgaagaagctgaacctgtacctgatcatcaactacttcaagggcggcaagctgcggttcaagaagatcaaacctgaagccttcgaagccaacagattctacaccgtgatcaacaaaaagagcggcgagatcgtgcccatggaggtgaacttcaacttcgacgaccccaacctgatcatcctgcctctggcctttggcaagagacagggcagagaattcatctggaacgacctgctgtccctggaaaccggcagcctgaagctggccaacggaagagtgatcgagaagacactgtacaacagaagaacccggcaggatgagcctgccctgttcgtggccctgaccttcgagcggcgggaggtcctggactcctccaatatcaaaccaatgaacctgatcggcgtggcaagaggcgaaaacatccccgccgtgatcgccctgaccgaccccgagggctgcccactgagccggtttaaggatagcctgggaaacccaacccacatcctgagaatcggcgagagctataaggagaagcagcggaccatccaggccaagaaggaggtggagcagcggagagccggcggctacagccggaagtacgccagcaaagccaagaatctggcagacgatatggtgagaaacaccgctagagatctgctgtactacgccgtgacccaggatgccatgctgatcttcgccaacctgagccggggcttcggccggcagggcaagcggaccttcatggccgagagacagtacacacggatggaggactggctgaccgccaagctggcctacgagggcctgagcaagacctacctgtccaagacactggcccagtacacctccaagacatgcagcaactgtgggtttaccatcaccagcgccgactacgacagggtgctggagaagctgaagaagacagcaacaggctggatgaccacaattaacggcaaggagctgaaggtggagggccagattacctactacaacagatacaagagacagaacgtagtcaaggacctgtccgtcgagctggatagactgagcgaagaatctgtgaacaacgacatctcctcctggacaaagggcagaagcggagaagctctgagcctcctgaagaaaagattctcccatagacccgtgcaggagaagttcgtgtgcctgaactgcggcttcgagacacacgcagccgagcaagccgccctgaacatcgccagatcctggctgttcctgcggagccaggagtacaagaaataccagacaaacaagacaaccggcaacaccgataagagagccttcgtcgagacctggcagtccttttaccggaagaagcttaaggaggtgtggaaacctgccgtgcggtctggcggatctggcggaggctccacaagcatggccgacctggtgatgttcagggacgtgaccgtggacttcagccaggaggagtgggagtgcctgaacagcaaccagaggaacctgtacagggacgtgatcctggagaactacagcaacctggtgagcctgggcggctgcagcatcagcaagcccgacgtgatcaccctgctggagcagggcaaggagccctggatggtggtgagggacgagaagaggaggtggaggctggacctggagagcaccagccccaagaaaaagagaaaagtctaagctgccttctgcggggcttgccttctggccatgcccttcttctctcccttgcacctgtacctcttggtctttgaataaagcctgagtaggaaggctagcaaaaaaaaaaaaaaaaaaaaaaaaaaaaaaaaaaaaaaaaaaaaaaaaaaaaaaaaaaaaaaaaaaaaaaaaaaaaaaaa

SEQ ID NO: 6144 - RNA, 5797 nt, synthetic construct
  source 1..5797: mol_type = other RNA
aggaaataagagagaaaagaagagtaagaagaaatataagagccaccatggcccctaagaagaagcgtaaagtgagccggatggaacgcctcgtctacgaggtgcggcagaagtgcagaaacatcgaggacatctgcatctcctgcggatctctgaacgtgaccctggagcacccactgttcatcggcggcatgtgccagaactgtaaaaactgttttctggagtgtgcctatcaatacgacgatgacggctaccagagctactgcaccatctgttgcggcggaagagaggtgctgatgtgtggaaataacaactgctgccggtgcttctgcgtggaatgcgtggacctgctggtgggccccggcgccgcccaggccgctattaaggaagatccttggaactgctacatgtgcggccacaagggcacatacggcctgctgagacggagagaggactggcctagcagactgcagatgttcttcgccaataaccacgaccaggagttcgacccccctaaggtgtaccctcccgtccccgccgagaagagaaagcccatccgggtcctgagcctgttcgatggcatcgccaccggtctgctggtgctgaaggacctgggcatccaggtggataggtacattgcctccgaggtgtgcgaggactccatcaccgtgggaatggtgcgtcatcagggcaagatcatgtacgtgggcgacgtgcggagcgtgacacagaagcatatccaggagtggggccctttcgacctggtgatcggcggcagcccttgcaatgacctgagcatcgtgaacccagcccggaagggcctgtacgagggaaccggcagactgttcttcgagttttacagactgctgcacgacgcccggcctaaggaaggcgacgaccggcccttcttttggctgttcgagaatgtggtggccatgggagtcagcgacaagcgggatattagccggttcctggagagcaaccccgtgatgatcgatgccaaggaagtgagcgccgcccaccgggccagatacttctggggcaatctgcctggcatgaacagacccctggccagcaccgtgaacgacaagctggagctgcaggagtgcctggagcacggccggatcgccaagttcagcaaggtgagaaccatcaccacccgaagcaacagcatcaaacaaggcaaggaccagcactttcctgtgttcatgaacgagaaggaggacatcctgtggtgtaccgagatggagagagtgttcgggttcccagtccactacacagatgtcagcaacatgtctagactggccagacagagactgctgggaagaagctggtccgtccctgtgatcagacacctgttcgcccctctgaaggagtacttcgcctgcgtgagcagcggcaacagcaacgccaacagccggggccccagcttctctagcggcctggtgccactgtccctgagagggagccacatgggccccatggagatctacaaaaccgtgagcgcctggaagcggcagcctgtgcgcgtgctgagcctgtttcggaatatcgataaagtcctgaaaagcctgggattcctggagagcggctctggctccggcggtggcaccctgaagtacgtggaggatgtgacaaacgtggtcagacgggatgtggagaagtggggccccttcgatctggtgtacggcagcacccaacccctgggcagctcttgtgaccggtgccctggctggtacatgtttcagttccaccggatcctgcagtacgccctgccgagacaggagtcccagcggccattcttttggattttcatggacaacttgctgctgaccgaggatgaccaggaaactaccactcggttcctgcagaccgaagccgtgaccctgcaggacgtgagaggccgggactaccagaacgccatgcgggtgtggtccaacatccctggactgaaaagcaagcacgcacctctgacccctaaagaagaggagtacctgcaggcccaggtgcggagcagaagcaagctggacgcccctaaggtggatctgctggtgaagaattgcctcctgcccctgagagagtacttcaagtatttcagccagaatagtctgcccctgggcggcccaagcagcggcgcccctcctcccagcggcggcagcccagccggctccccaacctctaccgaggagggcacctctgagtccgccacccccgagagcggccctggcacctccaccgagcccagcgagggcagcgcacccggcagccctgccggcagccccacctccacagaggagggaaccagcaccgagcccagcgaaggcagcgccccaggcaccagcaccgagcctagtgagggcggctctggcggcggcagcgcccaggagattaaacggatcaacaagatcagaagaagacttgtgaaagacagcaacaccaagaaggccggcaagacaggccccatgaaaaccctgctggttagagtgatgacacccgatctgagagagcggctggaaaacctgagaaagaagcctgaaaatatcccccagcccatcagcaatacatctagagccaacctgaataagctgctgaccgattacaccgaaatgaagaaggcgatcctgcatgtgtactgggaagagttccagaaggaccctgtgggcctgatgagccgggtggcccagcctgccagcaagaagatcgatcagaacaagctgaaacctgagatggacgagaagggcaacctgaccaccgccggctttgcctgctctcagtgtggccagcccctgttcgtgtacaagctggagcaggtgtctgagaagggcaaggcttacaccaactacttcggacggtgcaatgtggccgagcacgaaaagctgatcctgctggcccagctgaagcccgagaaggatagcgacgaagccgtgacatatagcctgggaaagtttgggcagagggccctggatttctacagcattcatgtgaccaaggagtccacccaccccgtgaagcccctggcccagatcgccggaaacagatacgcctccggacctgtgggaaaggccctgagcgacgcatgtatgggcacaatcgcctccttcctgtctaagtaccaggacatcatcatcgaacaccagaaggtggtgaagggcaaccagaagagactggagagcctgcgggagctggccggcaaggaaaacctggaataccctagcgtgaccctgccacctcagcctcacaccaaggagggcgttgatgcctacaacgaagtgatcgcccgggtgcgaatgtgggtgaacctgaacctgtggcagaagctgaagctaagcagagatgatgccaagcctctgctgagactgaagggattcccttcctttcctctggtcgagagacaggccaacgaagtggactggtgggacatggtgtgtaacgtgaagaagctgatcaacgagaaaaaggaggatggcaaggtgttttggcagaatctggctggctacaagagacaggaagccctgagaccatacctgagcagcgaggaagatcggaagaagggaaagaaattcgctcggtaccagctgggcgacctgctgctgcacctggaaaagaagcacggcgaggactggggaaaggtgtacgacgaggcctgggagcggattgacaagaaagtggaaggcctgagcaagcacatcaagctggaagaggaacggagaagcgaggacgcccagagcaaggccgccctgaccgactggctgcgggctaaggccagcttcgtgatcgagggcctgaaggaggccgacaaggacgagttctgcagatgcgagctgaagctgcagaagtggtacggggacctgcggggaaagcccttcgccatcgaagccgagaacagcatcctggacatcagcggcttcagcaagcagtacaactgtgccttcatctggcagaaggacggcgtgaagaagctgaacctgtacctgatcatcaactacttcaagggcggcaagctgcggttcaagaagatcaaacctgaagccttcgaagccaacagattctacaccgtgatcaacaaaaagagcggcgagatcgtgcccatggaggtgaacttcaacttcgacgaccccaacctgatcatcctgcctctggcctttggcaagagacagggcagagaattcatctggaacgacctgctgtccctggaaaccggcagcctgaagctggccaacggaagagtgatcgagaagacactgtacaacagaagaacccggcaggatgagcctgccctgttcgtggccctgaccttcgagcggcgggaggtcctggactcctccaatatcaaaccaatgaacctgatcggcgtggcaagaggcgaaaacatccccgccgtgatcgccctgaccgaccccgagggctgcccactgagccggtttaaggatagcctgggaaacccaacccacatcctgagaatcggcgagagctataaggagaagcagcggaccatccaggccaagaaggaggtggagcagcggagagccggcggctacagccggaagtacgccagcaaagccaagaatctggcagacgatatggtgagaaacaccgctagagatctgctgtactacgccgtgacccaggatgccatgctgatcttcgccaacctgagccggggcttcggccggcagggcaagcggaccttcatggccgagagacagtacacacggatggaggactggctgaccgccaagctggcctacgagggcctgagcaagacctacctgtccaagacactggcccagtacacctccaagacatgcagcaactgtgggtttaccatcaccagcgccgactacgacagggtgctggagaagctgaagaagacagcaacaggctggatgaccacaattaacggcaaggagctgaaggtggagggccagattacctactacaacagatacaagagacagaacgtagtcaaggacctgtccgtcgagctggatagactgagcgaagaatctgtgaacaacgacatctcctcctggacaaagggcagaagcggagaagctctgagcctcctgaagaaaagattctcccatagacccgtgcaggagaagttcgtgtgcctgaactgcggcttcgagacacacgcagccgagcaagccgccctgaacatcgccagatcctggctgttcctgcggagccaggagtacaagaaataccagacaaacaagacaaccggcaacaccgataagagagccttcgtcgagacctggcagtccttttaccggaagaagcttaaggaggtgtggaaacctgccgtgcggtctggcggatctggcggaggctccacaagcagcgacgaggccttcagcttcgaggacctgagcgtggacttcacccagaaggagtggcagctgctgaaccccggccagaaggacctgtacaaggacgtgatgctggagaactacagcagcctggtgagcctgggctacgagatcatgaagcccgacgtgatcttcaagctggagcagggcgaggagccctggatcggcgacggcgaggtgcccagcagcggctgccccgccgacatgagctacaccagccccaagaaaaagagaaaagtctaagctgccttctgcggggcttgccttctggccatgcccttcttctctcccttgcacctgtacctcttggtctttgaataaagcctgagtaggaaggctagcaaaaaaaaaaaaaaaaaaaaaaaaaaaaaaaaaaaaaaaaaaaaaaaaaaaaaaaaaaaaaaaaaaaaaaaaaaaaaaaa

SEQ ID NO: 6145 - RNA, 5797 nt, synthetic construct
  source 1..5797: mol_type = other RNA
aggaaataagagagaaaagaagagtaagaagaaatataagagccaccatggcccctaagaagaagcgtaaagtgagccggatggaacgcctcgtctacgaggtgcggcagaagtgcagaaacatcgaggacatctgcatctcctgcggatctctgaacgtgaccctggagcacccactgttcatcggcggcatgtgccagaactgtaaaaactgttttctggagtgtgcctatcaatacgacgatgacggctaccagagctactgcaccatctgttgcggcggaagagaggtgctgatgtgtggaaataacaactgctgccggtgcttctgcgtggaatgcgtggacctgctggtgggccccggcgccgcccaggccgctattaaggaagatccttggaactgctacatgtgcggccacaagggcacatacggcctgctgagacggagagaggactggcctagcagactgcagatgttcttcgccaataaccacgaccaggagttcgacccccctaaggtgtaccctcccgtccccgccgagaagagaaagcccatccgggtcctgagcctgttcgatggcatcgccaccggtctgctggtgctgaaggacctgggcatccaggtggataggtacattgcctccgaggtgtgcgaggactccatcaccgtgggaatggtgcgtcatcagggcaagatcatgtacgtgggcgacgtgcggagcgtgacacagaagcatatccaggagtggggccctttcgacctggtgatcggcggcagcccttgcaatgacctgagcatcgtgaacccagcccggaagggcctgtacgagggaaccggcagactgttcttcgagttttacagactgctgcacgacgcccggcctaaggaaggcgacgaccggcccttcttttggctgttcgagaatgtggtggccatgggagtcagcgacaagcgggatattagccggttcctggagagcaaccccgtgatgatcgatgccaaggaagtgagcgccgcccaccgggccagatacttctggggcaatctgcctggcatgaacagacccctggccagcaccgtgaacgacaagctggagctgcaggagtgcctggagcacggccggatcgccaagttcagcaaggtgagaaccatcaccacccgaagcaacagcatcaaacaaggcaaggaccagcactttcctgtgttcatgaacgagaaggaggacatcctgtggtgtaccgagatggagagagtgttcgggttcccagtccactacacagatgtcagcaacatgtctagactggccagacagagactgctgggaagaagctggtccgtccctgtgatcagacacctgttcgcccctctgaaggagtacttcgcctgcgtgagcagcggcaacagcaacgccaacagccggggccccagcttctctagcggcctggtgccactgtccctgagagggagccacatgggccccatggagatctacaaaaccgtgagcgcctggaagcggcagcctgtgcgcgtgctgagcctgtttcggaatatcgataaagtcctgaaaagcctgggattcctggagagcggctctggctccggcggtggcaccctgaagtacgtggaggatgtgacaaacgtggtcagacgggatgtggagaagtggggccccttcgatctggtgtacggcagcacccaacccctgggcagctcttgtgaccggtgccctggctggtacatgtttcagttccaccggatcctgcagtacgccctgccgagacaggagtcccagcggccattcttttggattttcatggacaacttgctgctgaccgaggatgaccaggaaactaccactcggttcctgcagaccgaagccgtgaccctgcaggacgtgagaggccgggactaccagaacgccatgcgggtgtggtccaacatccctggactgaaaagcaagcacgcacctctgacccctaaagaagaggagtacctgcaggcccaggtgcggagcagaagcaagctggacgcccctaaggtggatctgctggtgaagaattgcctcctgcccctgagagagtacttcaagtatttcagccagaatagtctgcccctgggcggcccaagcagcggcgcccctcctcccagcggcggcagcccagccggctccccaacctctaccgaggagggcacctctgagtccgccacccccgagagcggccctggcacctccaccgagcccagcgagggcagcgcacccggcagccctgccggcagccccacctccacagaggagggaaccagcaccgagcccagcgaaggcagcgccccaggcaccagcaccgagcctagtgagggcggctctggcggcggcagcgcccaggagattaaacggatcaacaagatcagaagaagacttgtgaaagacagcaacaccaagaaggccggcaagacaggccccatgaaaaccctgctggttagagtgatgacacccgatctgagagagcggctggaaaacctgagaaagaagcctgaaaatatcccccagcccatcagcaatacatctagagccaacctgaataagctgctgaccgattacaccgaaatgaagaaggcgatcctgcatgtgtactgggaagagttccagaaggaccctgtgggcctgatgagccgggtggcccagcctgccagcaagaagatcgatcagaacaagctgaaacctgagatggacgagaagggcaacctgaccaccgccggctttgcctgctctcagtgtggccagcccctgttcgtgtacaagctggagcaggtgtctgagaagggcaaggcttacaccaactacttcggacggtgcaatgtggccgagcacgaaaagctgatcctgctggcccagctgaagcccgagaaggatagcgacgaagccgtgacatatagcctgggaaagtttgggcagagggccctggatttctacagcattcatgtgaccaaggagtccacccaccccgtgaagcccctggcccagatcgccggaaacagatacgcctccggacctgtgggaaaggccctgagcgacgcatgtatgggcacaatcgcctccttcctgtctaagtaccaggacatcatcatcgaacaccagaaggtggtgaagggcaaccagaagagactggagagcctgcgggagctggccggcaaggaaaacctggaataccctagcgtgaccctgccacctcagcctcacaccaaggagggcgttgatgcctacaacgaagtgatcgcccgggtgcgaatgtgggtgaacctgaacctgtggcagaagctgaagctaagcagagatgatgccaagcctctgctgagactgaagggattcccttcctttcctctggtcgagagacaggccaacgaagtggactggtgggacatggtgtgtaacgtgaagaagctgatcaacgagaaaaaggaggatggcaaggtgttttggcagaatctggctggctacaagagacaggaagccctgagaccatacctgagcagcgaggaagatcggaagaagggaaagaaattcgctcggtaccagctgggcgacctgctgctgcacctggaaaagaagcacggcgaggactggggaaaggtgtacgacgaggcctgggagcggattgacaagaaagtggaaggcctgagcaagcacatcaagctggaagaggaacggagaagcgaggacgcccagagcaaggccgccctgaccgactggctgcgggctaaggccagcttcgtgatcgagggcctgaaggaggccgacaaggacgagttctgcagatgcgagctgaagctgcagaagtggtacggggacctgcggggaaagcccttcgccatcgaagccgagaacagcatcctggacatcagcggcttcagcaagcagtacaactgtgccttcatctggcagaaggacggcgtgaagaagctgaacctgtacctgatcatcaactacttcaagggcggcaagctgcggttcaagaagatcaaacctgaagccttcgaagccaacagattctacaccgtgatcaacaaaaagagcggcgagatcgtgcccatggaggtgaacttcaacttcgacgaccccaacctgatcatcctgcctctggcctttggcaagagacagggcagagaattcatctggaacgacctgctgtccctggaaaccggcagcctgaagctggccaacggaagagtgatcgagaagacactgtacaacagaagaacccggcaggatgagcctgccctgttcgtggccctgaccttcgagcggcgggaggtcctggactcctccaatatcaaaccaatgaacctgatcggcgtggcaagaggcgaaaacatccccgccgtgatcgccctgaccgaccccgagggctgcccactgagccggtttaaggatagcctgggaaacccaacccacatcctgagaatcggcgagagctataaggagaagcagcggaccatccaggccaagaaggaggtggagcagcggagagccggcggctacagccggaagtacgccagcaaagccaagaatctggcagacgatatggtgagaaacaccgctagagatctgctgtactacgccgtgacccaggatgccatgctgatcttcgccaacctgagccggggcttcggccggcagggcaagcggaccttcatggccgagagacagtacacacggatggaggactggctgaccgccaagctggcctacgagggcctgagcaagacctacctgtccaagacactggcccagtacacctccaagacatgcagcaactgtgggtttaccatcaccagcgccgactacgacagggtgctggagaagctgaagaagacagcaacaggctggatgaccacaattaacggcaaggagctgaaggtggagggccagattacctactacaacagatacaagagacagaacgtagtcaaggacctgtccgtcgagctggatagactgagcgaagaatctgtgaacaacgacatctcctcctggacaaagggcagaagcggagaagctctgagcctcctgaagaaaagattctcccatagacccgtgcaggagaagttcgtgtgcctgaactgcggcttcgagacacacgcagccgagcaagccgccctgaacatcgccagatcctggctgttcctgcggagccaggagtacaagaaataccagacaaacaagacaaccggcaacaccgataagagagccttcgtcgagacctggcagtccttttaccggaagaagcttaaggaggtgtggaaacctgccgtgcggtctggcggatctggcggaggctccacaagcagccagggcagggtgaccttcgaggacgtgaccgtgaacttcacccagggcgagtggcagaggctgaaccccgagcagaggaacctgtacagggacgtgatgctggagaactacagcaacctggtgagcgtgggccagggcgagaccaccaagcccgacgtgatcctgaggctggagcagggcaaggagccctggctggaggaggaggaggtgctgggcagcggcagggccgagaagaacggcaccagccccaagaaaaagagaaaagtctaagctgccttctgcggggcttgccttctggccatgcccttcttctctcccttgcacctgtacctcttggtctttgaataaagcctgagtaggaaggctagcaaaaaaaaaaaaaaaaaaaaaaaaaaaaaaaaaaaaaaaaaaaaaaaaaaaaaaaaaaaaaaaaaaaaaaaaaaaaaaaa

SEQ ID NO: 6146 - RNA, 5797 nt, synthetic construct
  source 1..5797: mol_type = other RNA
aggaaataagagagaaaagaagagtaagaagaaatataagagccaccatggcccctaagaagaagcgtaaagtgagccggatggaacgcctcgtctacgaggtgcggcagaagtgcagaaacatcgaggacatctgcatctcctgcggatctctgaacgtgaccctggagcacccactgttcatcggcggcatgtgccagaactgtaaaaactgttttctggagtgtgcctatcaatacgacgatgacggctaccagagctactgcaccatctgttgcggcggaagagaggtgctgatgtgtggaaataacaactgctgccggtgcttctgcgtggaatgcgtggacctgctggtgggccccggcgccgcccaggccgctattaaggaagatccttggaactgctacatgtgcggccacaagggcacatacggcctgctgagacggagagaggactggcctagcagactgcagatgttcttcgccaataaccacgaccaggagttcgacccccctaaggtgtaccctcccgtccccgccgagaagagaaagcccatccgggtcctgagcctgttcgatggcatcgccaccggtctgctggtgctgaaggacctgggcatccaggtggataggtacattgcctccgaggtgtgcgaggactccatcaccgtgggaatggtgcgtcatcagggcaagatcatgtacgtgggcgacgtgcggagcgtgacacagaagcatatccaggagtggggccctttcgacctggtgatcggcggcagcccttgcaatgacctgagcatcgtgaacccagcccggaagggcctgtacgagggaaccggcagactgttcttcgagttttacagactgctgcacgacgcccggcctaaggaaggcgacgaccggcccttcttttggctgttcgagaatgtggtggccatgggagtcagcgacaagcgggatattagccggttcctggagagcaaccccgtgatgatcgatgccaaggaagtgagcgccgcccaccgggccagatacttctggggcaatctgcctggcatgaacagacccctggccagcaccgtgaacgacaagctggagctgcaggagtgcctggagcacggccggatcgccaagttcagcaaggtgagaaccatcaccacccgaagcaacagcatcaaacaaggcaaggaccagcactttcctgtgttcatgaacgagaaggaggacatcctgtggtgtaccgagatggagagagtgttcgggttcccagtccactacacagatgtcagcaacatgtctagactggccagacagagactgctgggaagaagctggtccgtccctgtgatcagacacctgttcgcccctctgaaggagtacttcgcctgcgtgagcagcggcaacagcaacgccaacagccggggccccagcttctctagcggcctggtgccactgtccctgagagggagccacatgggccccatggagatctacaaaaccgtgagcgcctggaagcggcagcctgtgcgcgtgctgagcctgtttcggaatatcgataaagtcctgaaaagcctgggattcctggagagcggctctggctccggcggtggcaccctgaagtacgtggaggatgtgacaaacgtggtcagacgggatgtggagaagtggggccccttcgatctggtgtacggcagcacccaacccctgggcagctcttgtgaccggtgccctggctggtacatgtttcagttccaccggatcctgcagtacgccctgccgagacaggagtcccagcggccattcttttggattttcatggacaacttgctgctgaccgaggatgaccaggaaactaccactcggttcctgcagaccgaagccgtgaccctgcaggacgtgagaggccgggactaccagaacgccatgcgggtgtggtccaacatccctggactgaaaagcaagcacgcacctctgacccctaaagaagaggagtacctgcaggcccaggtgcggagcagaagcaagctggacgcccctaaggtggatctgctggtgaagaattgcctcctgcccctgagagagtacttcaagtatttcagccagaatagtctgcccctgggcggcccaagcagcggcgcccctcctcccagcggcggcagcccagccggctccccaacctctaccgaggagggcacctctgagtccgccacccccgagagcggccctggcacctccaccgagcccagcgagggcagcgcacccggcagccctgccggcagccccacctccacagaggagggaaccagcaccgagcccagcgaaggcagcgccccaggcaccagcaccgagcctagtgagggcggctctggcggcggcagcgcccaggagattaaacggatcaacaagatcagaagaagacttgtgaaagacagcaacaccaagaaggccggcaagacaggccccatgaaaaccctgctggttagagtgatgacacccgatctgagagagcggctggaaaacctgagaaagaagcctgaaaatatcccccagcccatcagcaatacatctagagccaacctgaataagctgctgaccgattacaccgaaatgaagaaggcgatcctgcatgtgtactgggaagagttccagaaggaccctgtgggcctgatgagccgggtggcccagcctgccagcaagaagatcgatcagaacaagctgaaacctgagatggacgagaagggcaacctgaccaccgccggctttgcctgctctcagtgtggccagcccctgttcgtgtacaagctggagcaggtgtctgagaagggcaaggcttacaccaactacttcggacggtgcaatgtggccgagcacgaaaagctgatcctgctggcccagctgaagcccgagaaggatagcgacgaagccgtgacatatagcctgggaaagtttgggcagagggccctggatttctacagcattcatgtgaccaaggagtccacccaccccgtgaagcccctggcccagatcgccggaaacagatacgcctccggacctgtgggaaaggccctgagcgacgcatgtatgggcacaatcgcctccttcctgtctaagtaccaggacatcatcatcgaacaccagaaggtggtgaagggcaaccagaagagactggagagcctgcgggagctggccggcaaggaaaacctggaataccctagcgtgaccctgccacctcagcctcacaccaaggagggcgttgatgcctacaacgaagtgatcgcccgggtgcgaatgtgggtgaacctgaacctgtggcagaagctgaagctaagcagagatgatgccaagcctctgctgagactgaagggattcccttcctttcctctggtcgagagacaggccaacgaagtggactggtgggacatggtgtgtaacgtgaagaagctgatcaacgagaaaaaggaggatggcaaggtgttttggcagaatctggctggctacaagagacaggaagccctgagaccatacctgagcagcgaggaagatcggaagaagggaaagaaattcgctcggtaccagctgggcgacctgctgctgcacctggaaaagaagcacggcgaggactggggaaaggtgtacgacgaggcctgggagcggattgacaagaaagtggaaggcctgagcaagcacatcaagctggaagaggaacggagaagcgaggacgcccagagcaaggccgccctgaccgactggctgcgggctaaggccagcttcgtgatcgagggcctgaaggaggccgacaaggacgagttctgcagatgcgagctgaagctgcagaagtggtacggggacctgcggggaaagcccttcgccatcgaagccgagaacagcatcctggacatcagcggcttcagcaagcagtacaactgtgccttcatctggcagaaggacggcgtgaagaagctgaacctgtacctgatcatcaactacttcaagggcggcaagctgcggttcaagaagatcaaacctgaagccttcgaagccaacagattctacaccgtgatcaacaaaaagagcggcgagatcgtgcccatggaggtgaacttcaacttcgacgaccccaacctgatcatcctgcctctggcctttggcaagagacagggcagagaattcatctggaacgacctgctgtccctggaaaccggcagcctgaagctggccaacggaagagtgatcgagaagacactgtacaacagaagaacccggcaggatgagcctgccctgttcgtggccctgaccttcgagcggcgggaggtcctggactcctccaatatcaaaccaatgaacctgatcggcgtggcaagaggcgaaaacatccccgccgtgatcgccctgaccgaccccgagggctgcccactgagccggtttaaggatagcctgggaaacccaacccacatcctgagaatcggcgagagctataaggagaagcagcggaccatccaggccaagaaggaggtggagcagcggagagccggcggctacagccggaagtacgccagcaaagccaagaatctggcagacgatatggtgagaaacaccgctagagatctgctgtactacgccgtgacccaggatgccatgctgatcttcgccaacctgagccggggcttcggccggcagggcaagcggaccttcatggccgagagacagtacacacggatggaggactggctgaccgccaagctggcctacgagggcctgagcaagacctacctgtccaagacactggcccagtacacctccaagacatgcagcaactgtgggtttaccatcaccagcgccgactacgacagggtgctggagaagctgaagaagacagcaacaggctggatgaccacaattaacggcaaggagctgaaggtggagggccagattacctactacaacagatacaagagacagaacgtagtcaaggacctgtccgtcgagctggatagactgagcgaagaatctgtgaacaacgacatctcctcctggacaaagggcagaagcggagaagctctgagcctcctgaagaaaagattctcccatagacccgtgcaggagaagttcgtgtgcctgaactgcggcttcgagacacacgcagccgagcaagccgccctgaacatcgccagatcctggctgttcctgcggagccaggagtacaagaaataccagacaaacaagacaaccggcaacaccgataagagagccttcgtcgagacctggcagtccttttaccggaagaagcttaaggaggtgtggaaacctgccgtgcggtctggcggatctggcggaggctccacaagcatggccctgaggagcgtgatgttcagcgacgtgagcatcgacttcagccccgaggagtgggagtacctggacctggagcagaaggacctgtacagggacgtgatgctggagaactacagcaacctggtgagcctggccggctgcttcatcagcaagcccgacgtgatcagcagcctggagcagggcaaggagccctggaaggtggtgaggaagggcaggaggcagtaccccgacctggagaccaccagccccaagaaaaagagaaaagtctaagctgccttctgcggggcttgccttctggccatgcccttcttctctcccttgcacctgtacctcttggtctttgaataaagcctgagtaggaaggctagcaaaaaaaaaaaaaaaaaaaaaaaaaaaaaaaaaaaaaaaaaaaaaaaaaaaaaaaaaaaaaaaaaaaaaaaaaaaaaaaa

SEQ ID NO: 6147 - RNA, 5797 nt, synthetic construct
  source 1..5797: mol_type = other RNA
aggaaataagagagaaaagaagagtaagaagaaatataagagccaccatggcccctaagaagaagcgtaaagtgagccggatggaacgcctcgtctacgaggtgcggcagaagtgcagaaacatcgaggacatctgcatctcctgcggatctctgaacgtgaccctggagcacccactgttcatcggcggcatgtgccagaactgtaaaaactgttttctggagtgtgcctatcaatacgacgatgacggctaccagagctactgcaccatctgttgcggcggaagagaggtgctgatgtgtggaaataacaactgctgccggtgcttctgcgtggaatgcgtggacctgctggtgggccccggcgccgcccaggccgctattaaggaagatccttggaactgctacatgtgcggccacaagggcacatacggcctgctgagacggagagaggactggcctagcagactgcagatgttcttcgccaataaccacgaccaggagttcgacccccctaaggtgtaccctcccgtccccgccgagaagagaaagcccatccgggtcctgagcctgttcgatggcatcgccaccggtctgctggtgctgaaggacctgggcatccaggtggataggtacattgcctccgaggtgtgcgaggactccatcaccgtgggaatggtgcgtcatcagggcaagatcatgtacgtgggcgacgtgcggagcgtgacacagaagcatatccaggagtggggccctttcgacctggtgatcggcggcagcccttgcaatgacctgagcatcgtgaacccagcccggaagggcctgtacgagggaaccggcagactgttcttcgagttttacagactgctgcacgacgcccggcctaaggaaggcgacgaccggcccttcttttggctgttcgagaatgtggtggccatgggagtcagcgacaagcgggatattagccggttcctggagagcaaccccgtgatgatcgatgccaaggaagtgagcgccgcccaccgggccagatacttctggggcaatctgcctggcatgaacagacccctggccagcaccgtgaacgacaagctggagctgcaggagtgcctggagcacggccggatcgccaagttcagcaaggtgagaaccatcaccacccgaagcaacagcatcaaacaaggcaaggaccagcactttcctgtgttcatgaacgagaaggaggacatcctgtggtgtaccgagatggagagagtgttcgggttcccagtccactacacagatgtcagcaacatgtctagactggccagacagagactgctgggaagaagctggtccgtccctgtgatcagacacctgttcgcccctctgaaggagtacttcgcctgcgtgagcagcggcaacagcaacgccaacagccggggccccagcttctctagcggcctggtgccactgtccctgagagggagccacatgggccccatggagatctacaaaaccgtgagcgcctggaagcggcagcctgtgcgcgtgctgagcctgtttcggaatatcgataaagtcctgaaaagcctgggattcctggagagcggctctggctccggcggtggcaccctgaagtacgtggaggatgtgacaaacgtggtcagacgggatgtggagaagtggggccccttcgatctggtgtacggcagcacccaacccctgggcagctcttgtgaccggtgccctggctggtacatgtttcagttccaccggatcctgcagtacgccctgccgagacaggagtcccagcggccattcttttggattttcatggacaacttgctgctgaccgaggatgaccaggaaactaccactcggttcctgcagaccgaagccgtgaccctgcaggacgtgagaggccgggactaccagaacgccatgcgggtgtggtccaacatccctggactgaaaagcaagcacgcacctctgacccctaaagaagaggagtacctgcaggcccaggtgcggagcagaagcaagctggacgcccctaaggtggatctgctggtgaagaattgcctcctgcccctgagagagtacttcaagtatttcagccagaatagtctgcccctgggcggcccaagcagcggcgcccctcctcccagcggcggcagcccagccggctccccaacctctaccgaggagggcacctctgagtccgccacccccgagagcggccctggcacctccaccgagcccagcgagggcagcgcacccggcagccctgccggcagccccacctccacagaggagggaaccagcaccgagcccagcgaaggcagcgccccaggcaccagcaccgagcctagtgagggcggctctggcggcggcagcgcccaggagattaaacggatcaacaagatcagaagaagacttgtgaaagacagcaacaccaagaaggccggcaagacaggccccatgaaaaccctgctggttagagtgatgacacccgatctgagagagcggctggaaaacctgagaaagaagcctgaaaatatcccccagcccatcagcaatacatctagagccaacctgaataagctgctgaccgattacaccgaaatgaagaaggcgatcctgcatgtgtactgggaagagttccagaaggaccctgtgggcctgatgagccgggtggcccagcctgccagcaagaagatcgatcagaacaagctgaaacctgagatggacgagaagggcaacctgaccaccgccggctttgcctgctctcagtgtggccagcccctgttcgtgtacaagctggagcaggtgtctgagaagggcaaggcttacaccaactacttcggacggtgcaatgtggccgagcacgaaaagctgatcctgctggcccagctgaagcccgagaaggatagcgacgaagccgtgacatatagcctgggaaagtttgggcagagggccctggatttctacagcattcatgtgaccaaggagtccacccaccccgtgaagcccctggcccagatcgccggaaacagatacgcctccggacctgtgggaaaggccctgagcgacgcatgtatgggcacaatcgcctccttcctgtctaagtaccaggacatcatcatcgaacaccagaaggtggtgaagggcaaccagaagagactggagagcctgcgggagctggccggcaaggaaaacctggaataccctagcgtgaccctgccacctcagcctcacaccaaggagggcgttgatgcctacaacgaagtgatcgcccgggtgcgaatgtgggtgaacctgaacctgtggcagaagctgaagctaagcagagatgatgccaagcctctgctgagactgaagggattcccttcctttcctctggtcgagagacaggccaacgaagtggactggtgggacatggtgtgtaacgtgaagaagctgatcaacgagaaaaaggaggatggcaaggtgttttggcagaatctggctggctacaagagacaggaagccctgagaccatacctgagcagcgaggaagatcggaagaagggaaagaaattcgctcggtaccagctgggcgacctgctgctgcacctggaaaagaagcacggcgaggactggggaaaggtgtacgacgaggcctgggagcggattgacaagaaagtggaaggcctgagcaagcacatcaagctggaagaggaacggagaagcgaggacgcccagagcaaggccgccctgaccgactggctgcgggctaaggccagcttcgtgatcgagggcctgaaggaggccgacaaggacgagttctgcagatgcgagctgaagctgcagaagtggtacggggacctgcggggaaagcccttcgccatcgaagccgagaacagcatcctggacatcagcggcttcagcaagcagtacaactgtgccttcatctggcagaaggacggcgtgaagaagctgaacctgtacctgatcatcaactacttcaagggcggcaagctgcggttcaagaagatcaaacctgaagccttcgaagccaacagattctacaccgtgatcaacaaaaagagcggcgagatcgtgcccatggaggtgaacttcaacttcgacgaccccaacctgatcatcctgcctctggcctttggcaagagacagggcagagaattcatctggaacgacctgctgtccctggaaaccggcagcctgaagctggccaacggaagagtgatcgagaagacactgtacaacagaagaacccggcaggatgagcctgccctgttcgtggccctgaccttcgagcggcgggaggtcctggactcctccaatatcaaaccaatgaacctgatcggcgtggcaagaggcgaaaacatccccgccgtgatcgccctgaccgaccccgagggctgcccactgagccggtttaaggatagcctgggaaacccaacccacatcctgagaatcggcgagagctataaggagaagcagcggaccatccaggccaagaaggaggtggagcagcggagagccggcggctacagccggaagtacgccagcaaagccaagaatctggcagacgatatggtgagaaacaccgctagagatctgctgtactacgccgtgacccaggatgccatgctgatcttcgccaacctgagccggggcttcggccggcagggcaagcggaccttcatggccgagagacagtacacacggatggaggactggctgaccgccaagctggcctacgagggcctgagcaagacctacctgtccaagacactggcccagtacacctccaagacatgcagcaactgtgggtttaccatcaccagcgccgactacgacagggtgctggagaagctgaagaagacagcaacaggctggatgaccacaattaacggcaaggagctgaaggtggagggccagattacctactacaacagatacaagagacagaacgtagtcaaggacctgtccgtcgagctggatagactgagcgaagaatctgtgaacaacgacatctcctcctggacaaagggcagaagcggagaagctctgagcctcctgaagaaaagattctcccatagacccgtgcaggagaagttcgtgtgcctgaactgcggcttcgagacacacgcagccgagcaagccgccctgaacatcgccagatcctggctgttcctgcggagccaggagtacaagaaataccagacaaacaagacaaccggcaacaccgataagagagccttcgtcgagacctggcagtccttttaccggaagaagcttaaggaggtgtggaaacctgccgtgcggtctggcggatctggcggaggctccacaagcggccaggaggaggtggccttcaaggacgtggccgtggacttcaccagggaggagtggaggctgctgagccccccccagaaggagctgtacaaggaggtgatgctggagaacatcaggaacctgctgagcgtgggcctgcccgccccccccgaggacatgatcagctacctggagcagagggaggccccctggatgctggagcaggagggcctgaggagctacagccccggcgaggagatcaggaccagccccaagaaaaagagaaaagtctaagctgccttctgcggggcttgccttctggccatgcccttcttctctcccttgcacctgtacctcttggtctttgaataaagcctgagtaggaaggctagcaaaaaaaaaaaaaaaaaaaaaaaaaaaaaaaaaaaaaaaaaaaaaaaaaaaaaaaaaaaaaaaaaaaaaaaaaaaaaaaa

SEQ ID NO: 6148 - RNA, 5797 nt, synthetic construct
  source 1..5797: mol_type = other RNA
aggaaataagagagaaaagaagagtaagaagaaatataagagccaccatggcccctaagaagaagcgtaaagtgagccggatggaacgcctcgtctacgaggtgcggcagaagtgcagaaacatcgaggacatctgcatctcctgcggatctctgaacgtgaccctggagcacccactgttcatcggcggcatgtgccagaactgtaaaaactgttttctggagtgtgcctatcaatacgacgatgacggctaccagagctactgcaccatctgttgcggcggaagagaggtgctgatgtgtggaaataacaactgctgccggtgcttctgcgtggaatgcgtggacctgctggtgggccccggcgccgcccaggccgctattaaggaagatccttggaactgctacatgtgcggccacaagggcacatacggcctgctgagacggagagaggactggcctagcagactgcagatgttcttcgccaataaccacgaccaggagttcgacccccctaaggtgtaccctcccgtccccgccgagaagagaaagcccatccgggtcctgagcctgttcgatggcatcgccaccggtctgctggtgctgaaggacctgggcatccaggtggataggtacattgcctccgaggtgtgcgaggactccatcaccgtgggaatggtgcgtcatcagggcaagatcatgtacgtgggcgacgtgcggagcgtgacacagaagcatatccaggagtggggccctttcgacctggtgatcggcggcagcccttgcaatgacctgagcatcgtgaacccagcccggaagggcctgtacgagggaaccggcagactgttcttcgagttttacagactgctgcacgacgcccggcctaaggaaggcgacgaccggcccttcttttggctgttcgagaatgtggtggccatgggagtcagcgacaagcgggatattagccggttcctggagagcaaccccgtgatgatcgatgccaaggaagtgagcgccgcccaccgggccagatacttctggggcaatctgcctggcatgaacagacccctggccagcaccgtgaacgacaagctggagctgcaggagtgcctggagcacggccggatcgccaagttcagcaaggtgagaaccatcaccacccgaagcaacagcatcaaacaaggcaaggaccagcactttcctgtgttcatgaacgagaaggaggacatcctgtggtgtaccgagatggagagagtgttcgggttcccagtccactacacagatgtcagcaacatgtctagactggccagacagagactgctgggaagaagctggtccgtccctgtgatcagacacctgttcgcccctctgaaggagtacttcgcctgcgtgagcagcggcaacagcaacgccaacagccggggccccagcttctctagcggcctggtgccactgtccctgagagggagccacatgggccccatggagatctacaaaaccgtgagcgcctggaagcggcagcctgtgcgcgtgctgagcctgtttcggaatatcgataaagtcctgaaaagcctgggattcctggagagcggctctggctccggcggtggcaccctgaagtacgtggaggatgtgacaaacgtggtcagacgggatgtggagaagtggggccccttcgatctggtgtacggcagcacccaacccctgggcagctcttgtgaccggtgccctggctggtacatgtttcagttccaccggatcctgcagtacgccctgccgagacaggagtcccagcggccattcttttggattttcatggacaacttgctgctgaccgaggatgaccaggaaactaccactcggttcctgcagaccgaagccgtgaccctgcaggacgtgagaggccgggactaccagaacgccatgcgggtgtggtccaacatccctggactgaaaagcaagcacgcacctctgacccctaaagaagaggagtacctgcaggcccaggtgcggagcagaagcaagctggacgcccctaaggtggatctgctggtgaagaattgcctcctgcccctgagagagtacttcaagtatttcagccagaatagtctgcccctgggcggcccaagcagcggcgcccctcctcccagcggcggcagcccagccggctccccaacctctaccgaggagggcacctctgagtccgccacccccgagagcggccctggcacctccaccgagcccagcgagggcagcgcacccggcagccctgccggcagccccacctccacagaggagggaaccagcaccgagcccagcgaaggcagcgccccaggcaccagcaccgagcctagtgagggcggctctggcggcggcagcgcccaggagattaaacggatcaacaagatcagaagaagacttgtgaaagacagcaacaccaagaaggccggcaagacaggccccatgaaaaccctgctggttagagtgatgacacccgatctgagagagcggctggaaaacctgagaaagaagcctgaaaatatcccccagcccatcagcaatacatctagagccaacctgaataagctgctgaccgattacaccgaaatgaagaaggcgatcctgcatgtgtactgggaagagttccagaaggaccctgtgggcctgatgagccgggtggcccagcctgccagcaagaagatcgatcagaacaagctgaaacctgagatggacgagaagggcaacctgaccaccgccggctttgcctgctctcagtgtggccagcccctgttcgtgtacaagctggagcaggtgtctgagaagggcaaggcttacaccaactacttcggacggtgcaatgtggccgagcacgaaaagctgatcctgctggcccagctgaagcccgagaaggatagcgacgaagccgtgacatatagcctgggaaagtttgggcagagggccctggatttctacagcattcatgtgaccaaggagtccacccaccccgtgaagcccctggcccagatcgccggaaacagatacgcctccggacctgtgggaaaggccctgagcgacgcatgtatgggcacaatcgcctccttcctgtctaagtaccaggacatcatcatcgaacaccagaaggtggtgaagggcaaccagaagagactggagagcctgcgggagctggccggcaaggaaaacctggaataccctagcgtgaccctgccacctcagcctcacaccaaggagggcgttgatgcctacaacgaagtgatcgcccgggtgcgaatgtgggtgaacctgaacctgtggcagaagctgaagctaagcagagatgatgccaagcctctgctgagactgaagggattcccttcctttcctctggtcgagagacaggccaacgaagtggactggtgggacatggtgtgtaacgtgaagaagctgatcaacgagaaaaaggaggatggcaaggtgttttggcagaatctggctggctacaagagacaggaagccctgagaccatacctgagcagcgaggaagatcggaagaagggaaagaaattcgctcggtaccagctgggcgacctgctgctgcacctggaaaagaagcacggcgaggactggggaaaggtgtacgacgaggcctgggagcggattgacaagaaagtggaaggcctgagcaagcacatcaagctggaagaggaacggagaagcgaggacgcccagagcaaggccgccctgaccgactggctgcgggctaaggccagcttcgtgatcgagggcctgaaggaggccgacaaggacgagttctgcagatgcgagctgaagctgcagaagtggtacggggacctgcggggaaagcccttcgccatcgaagccgagaacagcatcctggacatcagcggcttcagcaagcagtacaactgtgccttcatctggcagaaggacggcgtgaagaagctgaacctgtacctgatcatcaactacttcaagggcggcaagctgcggttcaagaagatcaaacctgaagccttcgaagccaacagattctacaccgtgatcaacaaaaagagcggcgagatcgtgcccatggaggtgaacttcaacttcgacgaccccaacctgatcatcctgcctctggcctttggcaagagacagggcagagaattcatctggaacgacctgctgtccctggaaaccggcagcctgaagctggccaacggaagagtgatcgagaagacactgtacaacagaagaacccggcaggatgagcctgccctgttcgtggccctgaccttcgagcggcgggaggtcctggactcctccaatatcaaaccaatgaacctgatcggcgtggcaagaggcgaaaacatccccgccgtgatcgccctgaccgaccccgagggctgcccactgagccggtttaaggatagcctgggaaacccaacccacatcctgagaatcggcgagagctataaggagaagcagcggaccatccaggccaagaaggaggtggagcagcggagagccggcggctacagccggaagtacgccagcaaagccaagaatctggcagacgatatggtgagaaacaccgctagagatctgctgtactacgccgtgacccaggatgccatgctgatcttcgccaacctgagccggggcttcggccggcagggcaagcggaccttcatggccgagagacagtacacacggatggaggactggctgaccgccaagctggcctacgagggcctgagcaagacctacctgtccaagacactggcccagtacacctccaagacatgcagcaactgtgggtttaccatcaccagcgccgactacgacagggtgctggagaagctgaagaagacagcaacaggctggatgaccacaattaacggcaaggagctgaaggtggagggccagattacctactacaacagatacaagagacagaacgtagtcaaggacctgtccgtcgagctggatagactgagcgaagaatctgtgaacaacgacatctcctcctggacaaagggcagaagcggagaagctctgagcctcctgaagaaaagattctcccatagacccgtgcaggagaagttcgtgtgcctgaactgcggcttcgagacacacgcagccgagcaagccgccctgaacatcgccagatcctggctgttcctgcggagccaggagtacaagaaataccagacaaacaagacaaccggcaacaccgataagagagccttcgtcgagacctggcagtccttttaccggaagaagcttaaggaggtgtggaaacctgccgtgcggtctggcggatctggcggaggctccacaagcagccagggcagcgtgaccttcagggacgtggccatcgacttcagccaggaggagtgggagtggctgcagcccacccagagggacctgtacaggcacgtgatgctggagaactacagccacctggtgagcctgggcctgaacatcagcaagccctacgtggtgagcctgctggagcagggcaaggagccctggctggagaagaggggcgtgaggaggaacctgttcagcgagcccaacagggagaccagccccaagaaaaagagaaaagtctaagctgccttctgcggggcttgccttctggccatgcccttcttctctcccttgcacctgtacctcttggtctttgaataaagcctgagtaggaaggctagcaaaaaaaaaaaaaaaaaaaaaaaaaaaaaaaaaaaaaaaaaaaaaaaaaaaaaaaaaaaaaaaaaaaaaaaaaaaaaaaa

SEQ ID NO: 6149 - RNA, 5797 nt, synthetic construct
  source 1..5797: mol_type = other RNA
aggaaataagagagaaaagaagagtaagaagaaatataagagccaccatggcccctaagaagaagcgtaaagtgagccggatggaacgcctcgtctacgaggtgcggcagaagtgcagaaacatcgaggacatctgcatctcctgcggatctctgaacgtgaccctggagcacccactgttcatcggcggcatgtgccagaactgtaaaaactgttttctggagtgtgcctatcaatacgacgatgacggctaccagagctactgcaccatctgttgcggcggaagagaggtgctgatgtgtggaaataacaactgctgccggtgcttctgcgtggaatgcgtggacctgctggtgggccccggcgccgcccaggccgctattaaggaagatccttggaactgctacatgtgcggccacaagggcacatacggcctgctgagacggagagaggactggcctagcagactgcagatgttcttcgccaataaccacgaccaggagttcgacccccctaaggtgtaccctcccgtccccgccgagaagagaaagcccatccgggtcctgagcctgttcgatggcatcgccaccggtctgctggtgctgaaggacctgggcatccaggtggataggtacattgcctccgaggtgtgcgaggactccatcaccgtgggaatggtgcgtcatcagggcaagatcatgtacgtgggcgacgtgcggagcgtgacacagaagcatatccaggagtggggccctttcgacctggtgatcggcggcagcccttgcaatgacctgagcatcgtgaacccagcccggaagggcctgtacgagggaaccggcagactgttcttcgagttttacagactgctgcacgacgcccggcctaaggaaggcgacgaccggcccttcttttggctgttcgagaatgtggtggccatgggagtcagcgacaagcgggatattagccggttcctggagagcaaccccgtgatgatcgatgccaaggaagtgagcgccgcccaccgggccagatacttctggggcaatctgcctggcatgaacagacccctggccagcaccgtgaacgacaagctggagctgcaggagtgcctggagcacggccggatcgccaagttcagcaaggtgagaaccatcaccacccgaagcaacagcatcaaacaaggcaaggaccagcactttcctgtgttcatgaacgagaaggaggacatcctgtggtgtaccgagatggagagagtgttcgggttcccagtccactacacagatgtcagcaacatgtctagactggccagacagagactgctgggaagaagctggtccgtccctgtgatcagacacctgttcgcccctctgaaggagtacttcgcctgcgtgagcagcggcaacagcaacgccaacagccggggccccagcttctctagcggcctggtgccactgtccctgagagggagccacatgggccccatggagatctacaaaaccgtgagcgcctggaagcggcagcctgtgcgcgtgctgagcctgtttcggaatatcgataaagtcctgaaaagcctgggattcctggagagcggctctggctccggcggtggcaccctgaagtacgtggaggatgtgacaaacgtggtcagacgggatgtggagaagtggggccccttcgatctggtgtacggcagcacccaacccctgggcagctcttgtgaccggtgccctggctggtacatgtttcagttccaccggatcctgcagtacgccctgccgagacaggagtcccagcggccattcttttggattttcatggacaacttgctgctgaccgaggatgaccaggaaactaccactcggttcctgcagaccgaagccgtgaccctgcaggacgtgagaggccgggactaccagaacgccatgcgggtgtggtccaacatccctggactgaaaagcaagcacgcacctctgacccctaaagaagaggagtacctgcaggcccaggtgcggagcagaagcaagctggacgcccctaaggtggatctgctggtgaagaattgcctcctgcccctgagagagtacttcaagtatttcagccagaatagtctgcccctgggcggcccaagcagcggcgcccctcctcccagcggcggcagcccagccggctccccaacctctaccgaggagggcacctctgagtccgccacccccgagagcggccctggcacctccaccgagcccagcgagggcagcgcacccggcagccctgccggcagccccacctccacagaggagggaaccagcaccgagcccagcgaaggcagcgccccaggcaccagcaccgagcctagtgagggcggctctggcggcggcagcgcccaggagattaaacggatcaacaagatcagaagaagacttgtgaaagacagcaacaccaagaaggccggcaagacaggccccatgaaaaccctgctggttagagtgatgacacccgatctgagagagcggctggaaaacctgagaaagaagcctgaaaatatcccccagcccatcagcaatacatctagagccaacctgaataagctgctgaccgattacaccgaaatgaagaaggcgatcctgcatgtgtactgggaagagttccagaaggaccctgtgggcctgatgagccgggtggcccagcctgccagcaagaagatcgatcagaacaagctgaaacctgagatggacgagaagggcaacctgaccaccgccggctttgcctgctctcagtgtggccagcccctgttcgtgtacaagctggagcaggtgtctgagaagggcaaggcttacaccaactacttcggacggtgcaatgtggccgagcacgaaaagctgatcctgctggcccagctgaagcccgagaaggatagcgacgaagccgtgacatatagcctgggaaagtttgggcagagggccctggatttctacagcattcatgtgaccaaggagtccacccaccccgtgaagcccctggcccagatcgccggaaacagatacgcctccggacctgtgggaaaggccctgagcgacgcatgtatgggcacaatcgcctccttcctgtctaagtaccaggacatcatcatcgaacaccagaaggtggtgaagggcaaccagaagagactggagagcctgcgggagctggccggcaaggaaaacctggaataccctagcgtgaccctgccacctcagcctcacaccaaggagggcgttgatgcctacaacgaagtgatcgcccgggtgcgaatgtgggtgaacctgaacctgtggcagaagctgaagctaagcagagatgatgccaagcctctgctgagactgaagggattcccttcctttcctctggtcgagagacaggccaacgaagtggactggtgggacatggtgtgtaacgtgaagaagctgatcaacgagaaaaaggaggatggcaaggtgttttggcagaatctggctggctacaagagacaggaagccctgagaccatacctgagcagcgaggaagatcggaagaagggaaagaaattcgctcggtaccagctgggcgacctgctgctgcacctggaaaagaagcacggcgaggactggggaaaggtgtacgacgaggcctgggagcggattgacaagaaagtggaaggcctgagcaagcacatcaagctggaagaggaacggagaagcgaggacgcccagagcaaggccgccctgaccgactggctgcgggctaaggccagcttcgtgatcgagggcctgaaggaggccgacaaggacgagttctgcagatgcgagctgaagctgcagaagtggtacggggacctgcggggaaagcccttcgccatcgaagccgagaacagcatcctggacatcagcggcttcagcaagcagtacaactgtgccttcatctggcagaaggacggcgtgaagaagctgaacctgtacctgatcatcaactacttcaagggcggcaagctgcggttcaagaagatcaaacctgaagccttcgaagccaacagattctacaccgtgatcaacaaaaagagcggcgagatcgtgcccatggaggtgaacttcaacttcgacgaccccaacctgatcatcctgcctctggcctttggcaagagacagggcagagaattcatctggaacgacctgctgtccctggaaaccggcagcctgaagctggccaacggaagagtgatcgagaagacactgtacaacagaagaacccggcaggatgagcctgccctgttcgtggccctgaccttcgagcggcgggaggtcctggactcctccaatatcaaaccaatgaacctgatcggcgtggcaagaggcgaaaacatccccgccgtgatcgccctgaccgaccccgagggctgcccactgagccggtttaaggatagcctgggaaacccaacccacatcctgagaatcggcgagagctataaggagaagcagcggaccatccaggccaagaaggaggtggagcagcggagagccggcggctacagccggaagtacgccagcaaagccaagaatctggcagacgatatggtgagaaacaccgctagagatctgctgtactacgccgtgacccaggatgccatgctgatcttcgccaacctgagccggggcttcggccggcagggcaagcggaccttcatggccgagagacagtacacacggatggaggactggctgaccgccaagctggcctacgagggcctgagcaagacctacctgtccaagacactggcccagtacacctccaagacatgcagcaactgtgggtttaccatcaccagcgccgactacgacagggtgctggagaagctgaagaagacagcaacaggctggatgaccacaattaacggcaaggagctgaaggtggagggccagattacctactacaacagatacaagagacagaacgtagtcaaggacctgtccgtcgagctggatagactgagcgaagaatctgtgaacaacgacatctcctcctggacaaagggcagaagcggagaagctctgagcctcctgaagaaaagattctcccatagacccgtgcaggagaagttcgtgtgcctgaactgcggcttcgagacacacgcagccgagcaagccgccctgaacatcgccagatcctggctgttcctgcggagccaggagtacaagaaataccagacaaacaagacaaccggcaacaccgataagagagccttcgtcgagacctggcagtccttttaccggaagaagcttaaggaggtgtggaaacctgccgtgcggtctggcggatctggcggaggctccacaagcctgcaggaggccatcgtgttcgaggacgtggccgtgtacttcaccaggatcgagtggagctgcctggccccccaccagagggccctgtacagggacgtgatgctggagaactacggccacatggccagcctgggcttcctggtggccaagcccgccctgatcagcctgctggagcagggcgaggagcccggcgccctgatcctgcagggcaccgaggagcagggcagcaccgccagcctgtgcaccagccccaagaaaaagagaaaagtctaagctgccttctgcggggcttgccttctggccatgcccttcttctctcccttgcacctgtacctcttggtctttgaataaagcctgagtaggaaggctagcaaaaaaaaaaaaaaaaaaaaaaaaaaaaaaaaaaaaaaaaaaaaaaaaaaaaaaaaaaaaaaaaaaaaaaaaaaaaaaaa

SEQ ID NO: 6150 - RNA, 5797 nt, synthetic construct
  source 1..5797: mol_type = other RNA
aggaaataagagagaaaagaagagtaagaagaaatataagagccaccatggcccctaagaagaagcgtaaagtgagccggatggaacgcctcgtctacgaggtgcggcagaagtgcagaaacatcgaggacatctgcatctcctgcggatctctgaacgtgaccctggagcacccactgttcatcggcggcatgtgccagaactgtaaaaactgttttctggagtgtgcctatcaatacgacgatgacggctaccagagctactgcaccatctgttgcggcggaagagaggtgctgatgtgtggaaataacaactgctgccggtgcttctgcgtggaatgcgtggacctgctggtgggccccggcgccgcccaggccgctattaaggaagatccttggaactgctacatgtgcggccacaagggcacatacggcctgctgagacggagagaggactggcctagcagactgcagatgttcttcgccaataaccacgaccaggagttcgacccccctaaggtgtaccctcccgtccccgccgagaagagaaagcccatccgggtcctgagcctgttcgatggcatcgccaccggtctgctggtgctgaaggacctgggcatccaggtggataggtacattgcctccgaggtgtgcgaggactccatcaccgtgggaatggtgcgtcatcagggcaagatcatgtacgtgggcgacgtgcggagcgtgacacagaagcatatccaggagtggggccctttcgacctggtgatcggcggcagcccttgcaatgacctgagcatcgtgaacccagcccggaagggcctgtacgagggaaccggcagactgttcttcgagttttacagactgctgcacgacgcccggcctaaggaaggcgacgaccggcccttcttttggctgttcgagaatgtggtggccatgggagtcagcgacaagcgggatattagccggttcctggagagcaaccccgtgatgatcgatgccaaggaagtgagcgccgcccaccgggccagatacttctggggcaatctgcctggcatgaacagacccctggccagcaccgtgaacgacaagctggagctgcaggagtgcctggagcacggccggatcgccaagttcagcaaggtgagaaccatcaccacccgaagcaacagcatcaaacaaggcaaggaccagcactttcctgtgttcatgaacgagaaggaggacatcctgtggtgtaccgagatggagagagtgttcgggttcccagtccactacacagatgtcagcaacatgtctagactggccagacagagactgctgggaagaagctggtccgtccctgtgatcagacacctgttcgcccctctgaaggagtacttcgcctgcgtgagcagcggcaacagcaacgccaacagccggggccccagcttctctagcggcctggtgccactgtccctgagagggagccacatgggccccatggagatctacaaaaccgtgagcgcctggaagcggcagcctgtgcgcgtgctgagcctgtttcggaatatcgataaagtcctgaaaagcctgggattcctggagagcggctctggctccggcggtggcaccctgaagtacgtggaggatgtgacaaacgtggtcagacgggatgtggagaagtggggccccttcgatctggtgtacggcagcacccaacccctgggcagctcttgtgaccggtgccctggctggtacatgtttcagttccaccggatcctgcagtacgccctgccgagacaggagtcccagcggccattcttttggattttcatggacaacttgctgctgaccgaggatgaccaggaaactaccactcggttcctgcagaccgaagccgtgaccctgcaggacgtgagaggccgggactaccagaacgccatgcgggtgtggtccaacatccctggactgaaaagcaagcacgcacctctgacccctaaagaagaggagtacctgcaggcccaggtgcggagcagaagcaagctggacgcccctaaggtggatctgctggtgaagaattgcctcctgcccctgagagagtacttcaagtatttcagccagaatagtctgcccctgggcggcccaagcagcggcgcccctcctcccagcggcggcagcccagccggctccccaacctctaccgaggagggcacctctgagtccgccacccccgagagcggccctggcacctccaccgagcccagcgagggcagcgcacccggcagccctgccggcagccccacctccacagaggagggaaccagcaccgagcccagcgaaggcagcgccccaggcaccagcaccgagcctagtgagggcggctctggcggcggcagcgcccaggagattaaacggatcaacaagatcagaagaagacttgtgaaagacagcaacaccaagaaggccggcaagacaggccccatgaaaaccctgctggttagagtgatgacacccgatctgagagagcggctggaaaacctgagaaagaagcctgaaaatatcccccagcccatcagcaatacatctagagccaacctgaataagctgctgaccgattacaccgaaatgaagaaggcgatcctgcatgtgtactgggaagagttccagaaggaccctgtgggcctgatgagccgggtggcccagcctgccagcaagaagatcgatcagaacaagctgaaacctgagatggacgagaagggcaacctgaccaccgccggctttgcctgctctcagtgtggccagcccctgttcgtgtacaagctggagcaggtgtctgagaagggcaaggcttacaccaactacttcggacggtgcaatgtggccgagcacgaaaagctgatcctgctggcccagctgaagcccgagaaggatagcgacgaagccgtgacatatagcctgggaaagtttgggcagagggccctggatttctacagcattcatgtgaccaaggagtccacccaccccgtgaagcccctggcccagatcgccggaaacagatacgcctccggacctgtgggaaaggccctgagcgacgcatgtatgggcacaatcgcctccttcctgtctaagtaccaggacatcatcatcgaacaccagaaggtggtgaagggcaaccagaagagactggagagcctgcgggagctggccggcaaggaaaacctggaataccctagcgtgaccctgccacctcagcctcacaccaaggagggcgttgatgcctacaacgaagtgatcgcccgggtgcgaatgtgggtgaacctgaacctgtggcagaagctgaagctaagcagagatgatgccaagcctctgctgagactgaagggattcccttcctttcctctggtcgagagacaggccaacgaagtggactggtgggacatggtgtgtaacgtgaagaagctgatcaacgagaaaaaggaggatggcaaggtgttttggcagaatctggctggctacaagagacaggaagccctgagaccatacctgagcagcgaggaagatcggaagaagggaaagaaattcgctcggtaccagctgggcgacctgctgctgcacctggaaaagaagcacggcgaggactggggaaaggtgtacgacgaggcctgggagcggattgacaagaaagtggaaggcctgagcaagcacatcaagctggaagaggaacggagaagcgaggacgcccagagcaaggccgccctgaccgactggctgcgggctaaggccagcttcgtgatcgagggcctgaaggaggccgacaaggacgagttctgcagatgcgagctgaagctgcagaagtggtacggggacctgcggggaaagcccttcgccatcgaagccgagaacagcatcctggacatcagcggcttcagcaagcagtacaactgtgccttcatctggcagaaggacggcgtgaagaagctgaacctgtacctgatcatcaactacttcaagggcggcaagctgcggttcaagaagatcaaacctgaagccttcgaagccaacagattctacaccgtgatcaacaaaaagagcggcgagatcgtgcccatggaggtgaacttcaacttcgacgaccccaacctgatcatcctgcctctggcctttggcaagagacagggcagagaattcatctggaacgacctgctgtccctggaaaccggcagcctgaagctggccaacggaagagtgatcgagaagacactgtacaacagaagaacccggcaggatgagcctgccctgttcgtggccctgaccttcgagcggcgggaggtcctggactcctccaatatcaaaccaatgaacctgatcggcgtggcaagaggcgaaaacatccccgccgtgatcgccctgaccgaccccgagggctgcccactgagccggtttaaggatagcctgggaaacccaacccacatcctgagaatcggcgagagctataaggagaagcagcggaccatccaggccaagaaggaggtggagcagcggagagccggcggctacagccggaagtacgccagcaaagccaagaatctggcagacgatatggtgagaaacaccgctagagatctgctgtactacgccgtgacccaggatgccatgctgatcttcgccaacctgagccggggcttcggccggcagggcaagcggaccttcatggccgagagacagtacacacggatggaggactggctgaccgccaagctggcctacgagggcctgagcaagacctacctgtccaagacactggcccagtacacctccaagacatgcagcaactgtgggtttaccatcaccagcgccgactacgacagggtgctggagaagctgaagaagacagcaacaggctggatgaccacaattaacggcaaggagctgaaggtggagggccagattacctactacaacagatacaagagacagaacgtagtcaaggacctgtccgtcgagctggatagactgagcgaagaatctgtgaacaacgacatctcctcctggacaaagggcagaagcggagaagctctgagcctcctgaagaaaagattctcccatagacccgtgcaggagaagttcgtgtgcctgaactgcggcttcgagacacacgcagccgagcaagccgccctgaacatcgccagatcctggctgttcctgcggagccaggagtacaagaaataccagacaaacaagacaaccggcaacaccgataagagagccttcgtcgagacctggcagtccttttaccggaagaagcttaaggaggtgtggaaacctgccgtgcggtctggcggatctggcggaggctccacaagcatgctgaccttcagggacgtgttcatcgagttcagccaggaggagtgggagtgcctggaccccgcccagaggaagctgtacatggacgtgatgctggagagctacaggaacctggtgagcctgggccacagcatcagcaagcccgacgtgatcaccctgctggagcagggcaaggacccctgcatggtggtgagggaggagaccaggaggtggtgcaccggcaagaacaagagcggcaggaggaccagccccaagaaaaagagaaaagtctaagctgccttctgcggggcttgccttctggccatgcccttcttctctcccttgcacctgtacctcttggtctttgaataaagcctgagtaggaaggctagcaaaaaaaaaaaaaaaaaaaaaaaaaaaaaaaaaaaaaaaaaaaaaaaaaaaaaaaaaaaaaaaaaaaaaaaaaaaaaaaa

SEQ ID NO: 6151 - RNA, 5797 nt, synthetic construct
  source 1..5797: mol_type = other RNA
aggaaataagagagaaaagaagagtaagaagaaatataagagccaccatggcccctaagaagaagcgtaaagtgagccggatggaacgcctcgtctacgaggtgcggcagaagtgcagaaacatcgaggacatctgcatctcctgcggatctctgaacgtgaccctggagcacccactgttcatcggcggcatgtgccagaactgtaaaaactgttttctggagtgtgcctatcaatacgacgatgacggctaccagagctactgcaccatctgttgcggcggaagagaggtgctgatgtgtggaaataacaactgctgccggtgcttctgcgtggaatgcgtggacctgctggtgggccccggcgccgcccaggccgctattaaggaagatccttggaactgctacatgtgcggccacaagggcacatacggcctgctgagacggagagaggactggcctagcagactgcagatgttcttcgccaataaccacgaccaggagttcgacccccctaaggtgtaccctcccgtccccgccgagaagagaaagcccatccgggtcctgagcctgttcgatggcatcgccaccggtctgctggtgctgaaggacctgggcatccaggtggataggtacattgcctccgaggtgtgcgaggactccatcaccgtgggaatggtgcgtcatcagggcaagatcatgtacgtgggcgacgtgcggagcgtgacacagaagcatatccaggagtggggccctttcgacctggtgatcggcggcagcccttgcaatgacctgagcatcgtgaacccagcccggaagggcctgtacgagggaaccggcagactgttcttcgagttttacagactgctgcacgacgcccggcctaaggaaggcgacgaccggcccttcttttggctgttcgagaatgtggtggccatgggagtcagcgacaagcgggatattagccggttcctggagagcaaccccgtgatgatcgatgccaaggaagtgagcgccgcccaccgggccagatacttctggggcaatctgcctggcatgaacagacccctggccagcaccgtgaacgacaagctggagctgcaggagtgcctggagcacggccggatcgccaagttcagcaaggtgagaaccatcaccacccgaagcaacagcatcaaacaaggcaaggaccagcactttcctgtgttcatgaacgagaaggaggacatcctgtggtgtaccgagatggagagagtgttcgggttcccagtccactacacagatgtcagcaacatgtctagactggccagacagagactgctgggaagaagctggtccgtccctgtgatcagacacctgttcgcccctctgaaggagtacttcgcctgcgtgagcagcggcaacagcaacgccaacagccggggccccagcttctctagcggcctggtgccactgtccctgagagggagccacatgggccccatggagatctacaaaaccgtgagcgcctggaagcggcagcctgtgcgcgtgctgagcctgtttcggaatatcgataaagtcctgaaaagcctgggattcctggagagcggctctggctccggcggtggcaccctgaagtacgtggaggatgtgacaaacgtggtcagacgggatgtggagaagtggggccccttcgatctggtgtacggcagcacccaacccctgggcagctcttgtgaccggtgccctggctggtacatgtttcagttccaccggatcctgcagtacgccctgccgagacaggagtcccagcggccattcttttggattttcatggacaacttgctgctgaccgaggatgaccaggaaactaccactcggttcctgcagaccgaagccgtgaccctgcaggacgtgagaggccgggactaccagaacgccatgcgggtgtggtccaacatccctggactgaaaagcaagcacgcacctctgacccctaaagaagaggagtacctgcaggcccaggtgcggagcagaagcaagctggacgcccctaaggtggatctgctggtgaagaattgcctcctgcccctgagagagtacttcaagtatttcagccagaatagtctgcccctgggcggcccaagcagcggcgcccctcctcccagcggcggcagcccagccggctccccaacctctaccgaggagggcacctctgagtccgccacccccgagagcggccctggcacctccaccgagcccagcgagggcagcgcacccggcagccctgccggcagccccacctccacagaggagggaaccagcaccgagcccagcgaaggcagcgccccaggcaccagcaccgagcctagtgagggcggctctggcggcggcagcgcccaggagattaaacggatcaacaagatcagaagaagacttgtgaaagacagcaacaccaagaaggccggcaagacaggccccatgaaaaccctgctggttagagtgatgacacccgatctgagagagcggctggaaaacctgagaaagaagcctgaaaatatcccccagcccatcagcaatacatctagagccaacctgaataagctgctgaccgattacaccgaaatgaagaaggcgatcctgcatgtgtactgggaagagttccagaaggaccctgtgggcctgatgagccgggtggcccagcctgccagcaagaagatcgatcagaacaagctgaaacctgagatggacgagaagggcaacctgaccaccgccggctttgcctgctctcagtgtggccagcccctgttcgtgtacaagctggagcaggtgtctgagaagggcaaggcttacaccaactacttcggacggtgcaatgtggccgagcacgaaaagctgatcctgctggcccagctgaagcccgagaaggatagcgacgaagccgtgacatatagcctgggaaagtttgggcagagggccctggatttctacagcattcatgtgaccaaggagtccacccaccccgtgaagcccctggcccagatcgccggaaacagatacgcctccggacctgtgggaaaggccctgagcgacgcatgtatgggcacaatcgcctccttcctgtctaagtaccaggacatcatcatcgaacaccagaaggtggtgaagggcaaccagaagagactggagagcctgcgggagctggccggcaaggaaaacctggaataccctagcgtgaccctgccacctcagcctcacaccaaggagggcgttgatgcctacaacgaagtgatcgcccgggtgcgaatgtgggtgaacctgaacctgtggcagaagctgaagctaagcagagatgatgccaagcctctgctgagactgaagggattcccttcctttcctctggtcgagagacaggccaacgaagtggactggtgggacatggtgtgtaacgtgaagaagctgatcaacgagaaaaaggaggatggcaaggtgttttggcagaatctggctggctacaagagacaggaagccctgagaccatacctgagcagcgaggaagatcggaagaagggaaagaaattcgctcggtaccagctgggcgacctgctgctgcacctggaaaagaagcacggcgaggactggggaaaggtgtacgacgaggcctgggagcggattgacaagaaagtggaaggcctgagcaagcacatcaagctggaagaggaacggagaagcgaggacgcccagagcaaggccgccctgaccgactggctgcgggctaaggccagcttcgtgatcgagggcctgaaggaggccgacaaggacgagttctgcagatgcgagctgaagctgcagaagtggtacggggacctgcggggaaagcccttcgccatcgaagccgagaacagcatcctggacatcagcggcttcagcaagcagtacaactgtgccttcatctggcagaaggacggcgtgaagaagctgaacctgtacctgatcatcaactacttcaagggcggcaagctgcggttcaagaagatcaaacctgaagccttcgaagccaacagattctacaccgtgatcaacaaaaagagcggcgagatcgtgcccatggaggtgaacttcaacttcgacgaccccaacctgatcatcctgcctctggcctttggcaagagacagggcagagaattcatctggaacgacctgctgtccctggaaaccggcagcctgaagctggccaacggaagagtgatcgagaagacactgtacaacagaagaacccggcaggatgagcctgccctgttcgtggccctgaccttcgagcggcgggaggtcctggactcctccaatatcaaaccaatgaacctgatcggcgtggcaagaggcgaaaacatccccgccgtgatcgccctgaccgaccccgagggctgcccactgagccggtttaaggatagcctgggaaacccaacccacatcctgagaatcggcgagagctataaggagaagcagcggaccatccaggccaagaaggaggtggagcagcggagagccggcggctacagccggaagtacgccagcaaagccaagaatctggcagacgatatggtgagaaacaccgctagagatctgctgtactacgccgtgacccaggatgccatgctgatcttcgccaacctgagccggggcttcggccggcagggcaagcggaccttcatggccgagagacagtacacacggatggaggactggctgaccgccaagctggcctacgagggcctgagcaagacctacctgtccaagacactggcccagtacacctccaagacatgcagcaactgtgggtttaccatcaccagcgccgactacgacagggtgctggagaagctgaagaagacagcaacaggctggatgaccacaattaacggcaaggagctgaaggtggagggccagattacctactacaacagatacaagagacagaacgtagtcaaggacctgtccgtcgagctggatagactgagcgaagaatctgtgaacaacgacatctcctcctggacaaagggcagaagcggagaagctctgagcctcctgaagaaaagattctcccatagacccgtgcaggagaagttcgtgtgcctgaactgcggcttcgagacacacgcagccgagcaagccgccctgaacatcgccagatcctggctgttcctgcggagccaggagtacaagaaataccagacaaacaagacaaccggcaacaccgataagagagccttcgtcgagacctggcagtccttttaccggaagaagcttaaggaggtgtggaaacctgccgtgcggtctggcggatctggcggaggctccacaagcagcgtggccttcgaggacgtggccgtgaacttcacccaggaggagtggagcctgctggaccccagccagaagaacctgtacagggaggtgatgcaggagaccctgaggaacctggccagcatcggcaagaagtggaaggaccagaacatcgagaacgagtacaagaaccccaggagcaaccagaggggcctgatggaggagaggctgttcgagagcgagggccaccagcccggcgagatcctgaccagccccaagaaaaagagaaaagtctaagctgccttctgcggggcttgccttctggccatgcccttcttctctcccttgcacctgtacctcttggtctttgaataaagcctgagtaggaaggctagcaaaaaaaaaaaaaaaaaaaaaaaaaaaaaaaaaaaaaaaaaaaaaaaaaaaaaaaaaaaaaaaaaaaaaaaaaaaaaaaa

SEQ ID NO: 6152 - RNA, 5797 nt, synthetic construct
  source 1..5797: mol_type = other RNA
aggaaataagagagaaaagaagagtaagaagaaatataagagccaccatggcccctaagaagaagcgtaaagtgagccggatggaacgcctcgtctacgaggtgcggcagaagtgcagaaacatcgaggacatctgcatctcctgcggatctctgaacgtgaccctggagcacccactgttcatcggcggcatgtgccagaactgtaaaaactgttttctggagtgtgcctatcaatacgacgatgacggctaccagagctactgcaccatctgttgcggcggaagagaggtgctgatgtgtggaaataacaactgctgccggtgcttctgcgtggaatgcgtggacctgctggtgggccccggcgccgcccaggccgctattaaggaagatccttggaactgctacatgtgcggccacaagggcacatacggcctgctgagacggagagaggactggcctagcagactgcagatgttcttcgccaataaccacgaccaggagttcgacccccctaaggtgtaccctcccgtccccgccgagaagagaaagcccatccgggtcctgagcctgttcgatggcatcgccaccggtctgctggtgctgaaggacctgggcatccaggtggataggtacattgcctccgaggtgtgcgaggactccatcaccgtgggaatggtgcgtcatcagggcaagatcatgtacgtgggcgacgtgcggagcgtgacacagaagcatatccaggagtggggccctttcgacctggtgatcggcggcagcccttgcaatgacctgagcatcgtgaacccagcccggaagggcctgtacgagggaaccggcagactgttcttcgagttttacagactgctgcacgacgcccggcctaaggaaggcgacgaccggcccttcttttggctgttcgagaatgtggtggccatgggagtcagcgacaagcgggatattagccggttcctggagagcaaccccgtgatgatcgatgccaaggaagtgagcgccgcccaccgggccagatacttctggggcaatctgcctggcatgaacagacccctggccagcaccgtgaacgacaagctggagctgcaggagtgcctggagcacggccggatcgccaagttcagcaaggtgagaaccatcaccacccgaagcaacagcatcaaacaaggcaaggaccagcactttcctgtgttcatgaacgagaaggaggacatcctgtggtgtaccgagatggagagagtgttcgggttcccagtccactacacagatgtcagcaacatgtctagactggccagacagagactgctgggaagaagctggtccgtccctgtgatcagacacctgttcgcccctctgaaggagtacttcgcctgcgtgagcagcggcaacagcaacgccaacagccggggccccagcttctctagcggcctggtgccactgtccctgagagggagccacatgggccccatggagatctacaaaaccgtgagcgcctggaagcggcagcctgtgcgcgtgctgagcctgtttcggaatatcgataaagtcctgaaaagcctgggattcctggagagcggctctggctccggcggtggcaccctgaagtacgtggaggatgtgacaaacgtggtcagacgggatgtggagaagtggggccccttcgatctggtgtacggcagcacccaacccctgggcagctcttgtgaccggtgccctggctggtacatgtttcagttccaccggatcctgcagtacgccctgccgagacaggagtcccagcggccattcttttggattttcatggacaacttgctgctgaccgaggatgaccaggaaactaccactcggttcctgcagaccgaagccgtgaccctgcaggacgtgagaggccgggactaccagaacgccatgcgggtgtggtccaacatccctggactgaaaagcaagcacgcacctctgacccctaaagaagaggagtacctgcaggcccaggtgcggagcagaagcaagctggacgcccctaaggtggatctgctggtgaagaattgcctcctgcccctgagagagtacttcaagtatttcagccagaatagtctgcccctgggcggcccaagcagcggcgcccctcctcccagcggcggcagcccagccggctccccaacctctaccgaggagggcacctctgagtccgccacccccgagagcggccctggcacctccaccgagcccagcgagggcagcgcacccggcagccctgccggcagccccacctccacagaggagggaaccagcaccgagcccagcgaaggcagcgccccaggcaccagcaccgagcctagtgagggcggctctggcggcggcagcgcccaggagattaaacggatcaacaagatcagaagaagacttgtgaaagacagcaacaccaagaaggccggcaagacaggccccatgaaaaccctgctggttagagtgatgacacccgatctgagagagcggctggaaaacctgagaaagaagcctgaaaatatcccccagcccatcagcaatacatctagagccaacctgaataagctgctgaccgattacaccgaaatgaagaaggcgatcctgcatgtgtactgggaagagttccagaaggaccctgtgggcctgatgagccgggtggcccagcctgccagcaagaagatcgatcagaacaagctgaaacctgagatggacgagaagggcaacctgaccaccgccggctttgcctgctctcagtgtggccagcccctgttcgtgtacaagctggagcaggtgtctgagaagggcaaggcttacaccaactacttcggacggtgcaatgtggccgagcacgaaaagctgatcctgctggcccagctgaagcccgagaaggatagcgacgaagccgtgacatatagcctgggaaagtttgggcagagggccctggatttctacagcattcatgtgaccaaggagtccacccaccccgtgaagcccctggcccagatcgccggaaacagatacgcctccggacctgtgggaaaggccctgagcgacgcatgtatgggcacaatcgcctccttcctgtctaagtaccaggacatcatcatcgaacaccagaaggtggtgaagggcaaccagaagagactggagagcctgcgggagctggccggcaaggaaaacctggaataccctagcgtgaccctgccacctcagcctcacaccaaggagggcgttgatgcctacaacgaagtgatcgcccgggtgcgaatgtgggtgaacctgaacctgtggcagaagctgaagctaagcagagatgatgccaagcctctgctgagactgaagggattcccttcctttcctctggtcgagagacaggccaacgaagtggactggtgggacatggtgtgtaacgtgaagaagctgatcaacgagaaaaaggaggatggcaaggtgttttggcagaatctggctggctacaagagacaggaagccctgagaccatacctgagcagcgaggaagatcggaagaagggaaagaaattcgctcggtaccagctgggcgacctgctgctgcacctggaaaagaagcacggcgaggactggggaaaggtgtacgacgaggcctgggagcggattgacaagaaagtggaaggcctgagcaagcacatcaagctggaagaggaacggagaagcgaggacgcccagagcaaggccgccctgaccgactggctgcgggctaaggccagcttcgtgatcgagggcctgaaggaggccgacaaggacgagttctgcagatgcgagctgaagctgcagaagtggtacggggacctgcggggaaagcccttcgccatcgaagccgagaacagcatcctggacatcagcggcttcagcaagcagtacaactgtgccttcatctggcagaaggacggcgtgaagaagctgaacctgtacctgatcatcaactacttcaagggcggcaagctgcggttcaagaagatcaaacctgaagccttcgaagccaacagattctacaccgtgatcaacaaaaagagcggcgagatcgtgcccatggaggtgaacttcaacttcgacgaccccaacctgatcatcctgcctctggcctttggcaagagacagggcagagaattcatctggaacgacctgctgtccctggaaaccggcagcctgaagctggccaacggaagagtgatcgagaagacactgtacaacagaagaacccggcaggatgagcctgccctgttcgtggccctgaccttcgagcggcgggaggtcctggactcctccaatatcaaaccaatgaacctgatcggcgtggcaagaggcgaaaacatccccgccgtgatcgccctgaccgaccccgagggctgcccactgagccggtttaaggatagcctgggaaacccaacccacatcctgagaatcggcgagagctataaggagaagcagcggaccatccaggccaagaaggaggtggagcagcggagagccggcggctacagccggaagtacgccagcaaagccaagaatctggcagacgatatggtgagaaacaccgctagagatctgctgtactacgccgtgacccaggatgccatgctgatcttcgccaacctgagccggggcttcggccggcagggcaagcggaccttcatggccgagagacagtacacacggatggaggactggctgaccgccaagctggcctacgagggcctgagcaagacctacctgtccaagacactggcccagtacacctccaagacatgcagcaactgtgggtttaccatcaccagcgccgactacgacagggtgctggagaagctgaagaagacagcaacaggctggatgaccacaattaacggcaaggagctgaaggtggagggccagattacctactacaacagatacaagagacagaacgtagtcaaggacctgtccgtcgagctggatagactgagcgaagaatctgtgaacaacgacatctcctcctggacaaagggcagaagcggagaagctctgagcctcctgaagaaaagattctcccatagacccgtgcaggagaagttcgtgtgcctgaactgcggcttcgagacacacgcagccgagcaagccgccctgaacatcgccagatcctggctgttcctgcggagccaggagtacaagaaataccagacaaacaagacaaccggcaacaccgataagagagccttcgtcgagacctggcagtccttttaccggaagaagcttaaggaggtgtggaaacctgccgtgcggtctggcggatctggcggaggctccacaagcccccaggagagcgtgaccttcgaggacgtggccgtgaacttcagctacgaggagtggcagtgcctgacccacgcccagaggcacctgtacaccgacgtgatgctggagaactacggcaacatggtgagcctgggcttcagcttcagcaagccccccctgatcagcaggctggagcagggcaccgagccctacgtgcaggacaggcaggactgggagttcctgaactgcagctaccccgccgccaccagccccaagaaaaagagaaaagtctaagctgccttctgcggggcttgccttctggccatgcccttcttctctcccttgcacctgtacctcttggtctttgaataaagcctgagtaggaaggctagcaaaaaaaaaaaaaaaaaaaaaaaaaaaaaaaaaaaaaaaaaaaaaaaaaaaaaaaaaaaaaaaaaaaaaaaaaaaaaaaa

SEQ ID NO: 6153 - RNA, 5797 nt, synthetic construct
  source 1..5797: mol_type = other RNA
aggaaataagagagaaaagaagagtaagaagaaatataagagccaccatggcccctaagaagaagcgtaaagtgagccggatggaacgcctcgtctacgaggtgcggcagaagtgcagaaacatcgaggacatctgcatctcctgcggatctctgaacgtgaccctggagcacccactgttcatcggcggcatgtgccagaactgtaaaaactgttttctggagtgtgcctatcaatacgacgatgacggctaccagagctactgcaccatctgttgcggcggaagagaggtgctgatgtgtggaaataacaactgctgccggtgcttctgcgtggaatgcgtggacctgctggtgggccccggcgccgcccaggccgctattaaggaagatccttggaactgctacatgtgcggccacaagggcacatacggcctgctgagacggagagaggactggcctagcagactgcagatgttcttcgccaataaccacgaccaggagttcgacccccctaaggtgtaccctcccgtccccgccgagaagagaaagcccatccgggtcctgagcctgttcgatggcatcgccaccggtctgctggtgctgaaggacctgggcatccaggtggataggtacattgcctccgaggtgtgcgaggactccatcaccgtgggaatggtgcgtcatcagggcaagatcatgtacgtgggcgacgtgcggagcgtgacacagaagcatatccaggagtggggccctttcgacctggtgatcggcggcagcccttgcaatgacctgagcatcgtgaacccagcccggaagggcctgtacgagggaaccggcagactgttcttcgagttttacagactgctgcacgacgcccggcctaaggaaggcgacgaccggcccttcttttggctgttcgagaatgtggtggccatgggagtcagcgacaagcgggatattagccggttcctggagagcaaccccgtgatgatcgatgccaaggaagtgagcgccgcccaccgggccagatacttctggggcaatctgcctggcatgaacagacccctggccagcaccgtgaacgacaagctggagctgcaggagtgcctggagcacggccggatcgccaagttcagcaaggtgagaaccatcaccacccgaagcaacagcatcaaacaaggcaaggaccagcactttcctgtgttcatgaacgagaaggaggacatcctgtggtgtaccgagatggagagagtgttcgggttcccagtccactacacagatgtcagcaacatgtctagactggccagacagagactgctgggaagaagctggtccgtccctgtgatcagacacctgttcgcccctctgaaggagtacttcgcctgcgtgagcagcggcaacagcaacgccaacagccggggccccagcttctctagcggcctggtgccactgtccctgagagggagccacatgggccccatggagatctacaaaaccgtgagcgcctggaagcggcagcctgtgcgcgtgctgagcctgtttcggaatatcgataaagtcctgaaaagcctgggattcctggagagcggctctggctccggcggtggcaccctgaagtacgtggaggatgtgacaaacgtggtcagacgggatgtggagaagtggggccccttcgatctggtgtacggcagcacccaacccctgggcagctcttgtgaccggtgccctggctggtacatgtttcagttccaccggatcctgcagtacgccctgccgagacaggagtcccagcggccattcttttggattttcatggacaacttgctgctgaccgaggatgaccaggaaactaccactcggttcctgcagaccgaagccgtgaccctgcaggacgtgagaggccgggactaccagaacgccatgcgggtgtggtccaacatccctggactgaaaagcaagcacgcacctctgacccctaaagaagaggagtacctgcaggcccaggtgcggagcagaagcaagctggacgcccctaaggtggatctgctggtgaagaattgcctcctgcccctgagagagtacttcaagtatttcagccagaatagtctgcccctgggcggcccaagcagcggcgcccctcctcccagcggcggcagcccagccggctccccaacctctaccgaggagggcacctctgagtccgccacccccgagagcggccctggcacctccaccgagcccagcgagggcagcgcacccggcagccctgccggcagccccacctccacagaggagggaaccagcaccgagcccagcgaaggcagcgccccaggcaccagcaccgagcctagtgagggcggctctggcggcggcagcgcccaggagattaaacggatcaacaagatcagaagaagacttgtgaaagacagcaacaccaagaaggccggcaagacaggccccatgaaaaccctgctggttagagtgatgacacccgatctgagagagcggctggaaaacctgagaaagaagcctgaaaatatcccccagcccatcagcaatacatctagagccaacctgaataagctgctgaccgattacaccgaaatgaagaaggcgatcctgcatgtgtactgggaagagttccagaaggaccctgtgggcctgatgagccgggtggcccagcctgccagcaagaagatcgatcagaacaagctgaaacctgagatggacgagaagggcaacctgaccaccgccggctttgcctgctctcagtgtggccagcccctgttcgtgtacaagctggagcaggtgtctgagaagggcaaggcttacaccaactacttcggacggtgcaatgtggccgagcacgaaaagctgatcctgctggcccagctgaagcccgagaaggatagcgacgaagccgtgacatatagcctgggaaagtttgggcagagggccctggatttctacagcattcatgtgaccaaggagtccacccaccccgtgaagcccctggcccagatcgccggaaacagatacgcctccggacctgtgggaaaggccctgagcgacgcatgtatgggcacaatcgcctccttcctgtctaagtaccaggacatcatcatcgaacaccagaaggtggtgaagggcaaccagaagagactggagagcctgcgggagctggccggcaaggaaaacctggaataccctagcgtgaccctgccacctcagcctcacaccaaggagggcgttgatgcctacaacgaagtgatcgcccgggtgcgaatgtgggtgaacctgaacctgtggcagaagctgaagctaagcagagatgatgccaagcctctgctgagactgaagggattcccttcctttcctctggtcgagagacaggccaacgaagtggactggtgggacatggtgtgtaacgtgaagaagctgatcaacgagaaaaaggaggatggcaaggtgttttggcagaatctggctggctacaagagacaggaagccctgagaccatacctgagcagcgaggaagatcggaagaagggaaagaaattcgctcggtaccagctgggcgacctgctgctgcacctggaaaagaagcacggcgaggactggggaaaggtgtacgacgaggcctgggagcggattgacaagaaagtggaaggcctgagcaagcacatcaagctggaagaggaacggagaagcgaggacgcccagagcaaggccgccctgaccgactggctgcgggctaaggccagcttcgtgatcgagggcctgaaggaggccgacaaggacgagttctgcagatgcgagctgaagctgcagaagtggtacggggacctgcggggaaagcccttcgccatcgaagccgagaacagcatcctggacatcagcggcttcagcaagcagtacaactgtgccttcatctggcagaaggacggcgtgaagaagctgaacctgtacctgatcatcaactacttcaagggcggcaagctgcggttcaagaagatcaaacctgaagccttcgaagccaacagattctacaccgtgatcaacaaaaagagcggcgagatcgtgcccatggaggtgaacttcaacttcgacgaccccaacctgatcatcctgcctctggcctttggcaagagacagggcagagaattcatctggaacgacctgctgtccctggaaaccggcagcctgaagctggccaacggaagagtgatcgagaagacactgtacaacagaagaacccggcaggatgagcctgccctgttcgtggccctgaccttcgagcggcgggaggtcctggactcctccaatatcaaaccaatgaacctgatcggcgtggcaagaggcgaaaacatccccgccgtgatcgccctgaccgaccccgagggctgcccactgagccggtttaaggatagcctgggaaacccaacccacatcctgagaatcggcgagagctataaggagaagcagcggaccatccaggccaagaaggaggtggagcagcggagagccggcggctacagccggaagtacgccagcaaagccaagaatctggcagacgatatggtgagaaacaccgctagagatctgctgtactacgccgtgacccaggatgccatgctgatcttcgccaacctgagccggggcttcggccggcagggcaagcggaccttcatggccgagagacagtacacacggatggaggactggctgaccgccaagctggcctacgagggcctgagcaagacctacctgtccaagacactggcccagtacacctccaagacatgcagcaactgtgggtttaccatcaccagcgccgactacgacagggtgctggagaagctgaagaagacagcaacaggctggatgaccacaattaacggcaaggagctgaaggtggagggccagattacctactacaacagatacaagagacagaacgtagtcaaggacctgtccgtcgagctggatagactgagcgaagaatctgtgaacaacgacatctcctcctggacaaagggcagaagcggagaagctctgagcctcctgaagaaaagattctcccatagacccgtgcaggagaagttcgtgtgcctgaactgcggcttcgagacacacgcagccgagcaagccgccctgaacatcgccagatcctggctgttcctgcggagccaggagtacaagaaataccagacaaacaagacaaccggcaacaccgataagagagccttcgtcgagacctggcagtccttttaccggaagaagcttaaggaggtgtggaaacctgccgtgcggtctggcggatctggcggaggctccacaagcacccacggcctggtgatgttcaaggacgtggccatcgacgtgagccaggaggagtgggagtgcctgaaccccacccagaggagcctgtacagggacgtgatgctggagaactacagcaacctggtgagcctgggcctgagcctgagcaagcccgccgtgatcagcagcctggagcagggcatggagccctggatggtggtgagggaggtgaccggcaagcagtgccccgacctggtgagcaggaccagccccaagaaaaagagaaaagtctaagctgccttctgcggggcttgccttctggccatgcccttcttctctcccttgcacctgtacctcttggtctttgaataaagcctgagtaggaaggctagcaaaaaaaaaaaaaaaaaaaaaaaaaaaaaaaaaaaaaaaaaaaaaaaaaaaaaaaaaaaaaaaaaaaaaaaaaaaaaaaa

SEQ ID NO: 6154 - RNA, 5797 nt, synthetic construct
  source 1..5797: mol_type = other RNA
aggaaataagagagaaaagaagagtaagaagaaatataagagccaccatggcccctaagaagaagcgtaaagtgagccggatggaacgcctcgtctacgaggtgcggcagaagtgcagaaacatcgaggacatctgcatctcctgcggatctctgaacgtgaccctggagcacccactgttcatcggcggcatgtgccagaactgtaaaaactgttttctggagtgtgcctatcaatacgacgatgacggctaccagagctactgcaccatctgttgcggcggaagagaggtgctgatgtgtggaaataacaactgctgccggtgcttctgcgtggaatgcgtggacctgctggtgggccccggcgccgcccaggccgctattaaggaagatccttggaactgctacatgtgcggccacaagggcacatacggcctgctgagacggagagaggactggcctagcagactgcagatgttcttcgccaataaccacgaccaggagttcgacccccctaaggtgtaccctcccgtccccgccgagaagagaaagcccatccgggtcctgagcctgttcgatggcatcgccaccggtctgctggtgctgaaggacctgggcatccaggtggataggtacattgcctccgaggtgtgcgaggactccatcaccgtgggaatggtgcgtcatcagggcaagatcatgtacgtgggcgacgtgcggagcgtgacacagaagcatatccaggagtggggccctttcgacctggtgatcggcggcagcccttgcaatgacctgagcatcgtgaacccagcccggaagggcctgtacgagggaaccggcagactgttcttcgagttttacagactgctgcacgacgcccggcctaaggaaggcgacgaccggcccttcttttggctgttcgagaatgtggtggccatgggagtcagcgacaagcgggatattagccggttcctggagagcaaccccgtgatgatcgatgccaaggaagtgagcgccgcccaccgggccagatacttctggggcaatctgcctggcatgaacagacccctggccagcaccgtgaacgacaagctggagctgcaggagtgcctggagcacggccggatcgccaagttcagcaaggtgagaaccatcaccacccgaagcaacagcatcaaacaaggcaaggaccagcactttcctgtgttcatgaacgagaaggaggacatcctgtggtgtaccgagatggagagagtgttcgggttcccagtccactacacagatgtcagcaacatgtctagactggccagacagagactgctgggaagaagctggtccgtccctgtgatcagacacctgttcgcccctctgaaggagtacttcgcctgcgtgagcagcggcaacagcaacgccaacagccggggccccagcttctctagcggcctggtgccactgtccctgagagggagccacatgggccccatggagatctacaaaaccgtgagcgcctggaagcggcagcctgtgcgcgtgctgagcctgtttcggaatatcgataaagtcctgaaaagcctgggattcctggagagcggctctggctccggcggtggcaccctgaagtacgtggaggatgtgacaaacgtggtcagacgggatgtggagaagtggggccccttcgatctggtgtacggcagcacccaacccctgggcagctcttgtgaccggtgccctggctggtacatgtttcagttccaccggatcctgcagtacgccctgccgagacaggagtcccagcggccattcttttggattttcatggacaacttgctgctgaccgaggatgaccaggaaactaccactcggttcctgcagaccgaagccgtgaccctgcaggacgtgagaggccgggactaccagaacgccatgcgggtgtggtccaacatccctggactgaaaagcaagcacgcacctctgacccctaaagaagaggagtacctgcaggcccaggtgcggagcagaagcaagctggacgcccctaaggtggatctgctggtgaagaattgcctcctgcccctgagagagtacttcaagtatttcagccagaatagtctgcccctgggcggcccaagcagcggcgcccctcctcccagcggcggcagcccagccggctccccaacctctaccgaggagggcacctctgagtccgccacccccgagagcggccctggcacctccaccgagcccagcgagggcagcgcacccggcagccctgccggcagccccacctccacagaggagggaaccagcaccgagcccagcgaaggcagcgccccaggcaccagcaccgagcctagtgagggcggctctggcggcggcagcgcccaggagattaaacggatcaacaagatcagaagaagacttgtgaaagacagcaacaccaagaaggccggcaagacaggccccatgaaaaccctgctggttagagtgatgacacccgatctgagagagcggctggaaaacctgagaaagaagcctgaaaatatcccccagcccatcagcaatacatctagagccaacctgaataagctgctgaccgattacaccgaaatgaagaaggcgatcctgcatgtgtactgggaagagttccagaaggaccctgtgggcctgatgagccgggtggcccagcctgccagcaagaagatcgatcagaacaagctgaaacctgagatggacgagaagggcaacctgaccaccgccggctttgcctgctctcagtgtggccagcccctgttcgtgtacaagctggagcaggtgtctgagaagggcaaggcttacaccaactacttcggacggtgcaatgtggccgagcacgaaaagctgatcctgctggcccagctgaagcccgagaaggatagcgacgaagccgtgacatatagcctgggaaagtttgggcagagggccctggatttctacagcattcatgtgaccaaggagtccacccaccccgtgaagcccctggcccagatcgccggaaacagatacgcctccggacctgtgggaaaggccctgagcgacgcatgtatgggcacaatcgcctccttcctgtctaagtaccaggacatcatcatcgaacaccagaaggtggtgaagggcaaccagaagagactggagagcctgcgggagctggccggcaaggaaaacctggaataccctagcgtgaccctgccacctcagcctcacaccaaggagggcgttgatgcctacaacgaagtgatcgcccgggtgcgaatgtgggtgaacctgaacctgtggcagaagctgaagctaagcagagatgatgccaagcctctgctgagactgaagggattcccttcctttcctctggtcgagagacaggccaacgaagtggactggtgggacatggtgtgtaacgtgaagaagctgatcaacgagaaaaaggaggatggcaaggtgttttggcagaatctggctggctacaagagacaggaagccctgagaccatacctgagcagcgaggaagatcggaagaagggaaagaaattcgctcggtaccagctgggcgacctgctgctgcacctggaaaagaagcacggcgaggactggggaaaggtgtacgacgaggcctgggagcggattgacaagaaagtggaaggcctgagcaagcacatcaagctggaagaggaacggagaagcgaggacgcccagagcaaggccgccctgaccgactggctgcgggctaaggccagcttcgtgatcgagggcctgaaggaggccgacaaggacgagttctgcagatgcgagctgaagctgcagaagtggtacggggacctgcggggaaagcccttcgccatcgaagccgagaacagcatcctggacatcagcggcttcagcaagcagtacaactgtgccttcatctggcagaaggacggcgtgaagaagctgaacctgtacctgatcatcaactacttcaagggcggcaagctgcggttcaagaagatcaaacctgaagccttcgaagccaacagattctacaccgtgatcaacaaaaagagcggcgagatcgtgcccatggaggtgaacttcaacttcgacgaccccaacctgatcatcctgcctctggcctttggcaagagacagggcagagaattcatctggaacgacctgctgtccctggaaaccggcagcctgaagctggccaacggaagagtgatcgagaagacactgtacaacagaagaacccggcaggatgagcctgccctgttcgtggccctgaccttcgagcggcgggaggtcctggactcctccaatatcaaaccaatgaacctgatcggcgtggcaagaggcgaaaacatccccgccgtgatcgccctgaccgaccccgagggctgcccactgagccggtttaaggatagcctgggaaacccaacccacatcctgagaatcggcgagagctataaggagaagcagcggaccatccaggccaagaaggaggtggagcagcggagagccggcggctacagccggaagtacgccagcaaagccaagaatctggcagacgatatggtgagaaacaccgctagagatctgctgtactacgccgtgacccaggatgccatgctgatcttcgccaacctgagccggggcttcggccggcagggcaagcggaccttcatggccgagagacagtacacacggatggaggactggctgaccgccaagctggcctacgagggcctgagcaagacctacctgtccaagacactggcccagtacacctccaagacatgcagcaactgtgggtttaccatcaccagcgccgactacgacagggtgctggagaagctgaagaagacagcaacaggctggatgaccacaattaacggcaaggagctgaaggtggagggccagattacctactacaacagatacaagagacagaacgtagtcaaggacctgtccgtcgagctggatagactgagcgaagaatctgtgaacaacgacatctcctcctggacaaagggcagaagcggagaagctctgagcctcctgaagaaaagattctcccatagacccgtgcaggagaagttcgtgtgcctgaactgcggcttcgagacacacgcagccgagcaagccgccctgaacatcgccagatcctggctgttcctgcggagccaggagtacaagaaataccagacaaacaagacaaccggcaacaccgataagagagccttcgtcgagacctggcagtccttttaccggaagaagcttaaggaggtgtggaaacctgccgtgcggtctggcggatctggcggaggctccacaagcacccaggagagcgtgaccttcagggacgtggccgtgcacttcagcagggacgagtggctgtacctggaccccgcccagagggccctgtacagggaggtgatgctggagaactacagcagcctggtgagcctgggcatcctgttcagcaagcccaaggtgatcttccagctgcagcagggcgaggacccctggatggtggagaacggcgtgagctgcggcgcctgcctgggctgggagagcctgaccagccccaagaaaaagagaaaagtctaagctgccttctgcggggcttgccttctggccatgcccttcttctctcccttgcacctgtacctcttggtctttgaataaagcctgagtaggaaggctagcaaaaaaaaaaaaaaaaaaaaaaaaaaaaaaaaaaaaaaaaaaaaaaaaaaaaaaaaaaaaaaaaaaaaaaaaaaaaaaaa

SEQ ID NO: 6155 - RNA, 5797 nt, synthetic construct
  source 1..5797: mol_type = other RNA
aggaaataagagagaaaagaagagtaagaagaaatataagagccaccatggcccctaagaagaagcgtaaagtgagccggatggaacgcctcgtctacgaggtgcggcagaagtgcagaaacatcgaggacatctgcatctcctgcggatctctgaacgtgaccctggagcacccactgttcatcggcggcatgtgccagaactgtaaaaactgttttctggagtgtgcctatcaatacgacgatgacggctaccagagctactgcaccatctgttgcggcggaagagaggtgctgatgtgtggaaataacaactgctgccggtgcttctgcgtggaatgcgtggacctgctggtgggccccggcgccgcccaggccgctattaaggaagatccttggaactgctacatgtgcggccacaagggcacatacggcctgctgagacggagagaggactggcctagcagactgcagatgttcttcgccaataaccacgaccaggagttcgacccccctaaggtgtaccctcccgtccccgccgagaagagaaagcccatccgggtcctgagcctgttcgatggcatcgccaccggtctgctggtgctgaaggacctgggcatccaggtggataggtacattgcctccgaggtgtgcgaggactccatcaccgtgggaatggtgcgtcatcagggcaagatcatgtacgtgggcgacgtgcggagcgtgacacagaagcatatccaggagtggggccctttcgacctggtgatcggcggcagcccttgcaatgacctgagcatcgtgaacccagcccggaagggcctgtacgagggaaccggcagactgttcttcgagttttacagactgctgcacgacgcccggcctaaggaaggcgacgaccggcccttcttttggctgttcgagaatgtggtggccatgggagtcagcgacaagcgggatattagccggttcctggagagcaaccccgtgatgatcgatgccaaggaagtgagcgccgcccaccgggccagatacttctggggcaatctgcctggcatgaacagacccctggccagcaccgtgaacgacaagctggagctgcaggagtgcctggagcacggccggatcgccaagttcagcaaggtgagaaccatcaccacccgaagcaacagcatcaaacaaggcaaggaccagcactttcctgtgttcatgaacgagaaggaggacatcctgtggtgtaccgagatggagagagtgttcgggttcccagtccactacacagatgtcagcaacatgtctagactggccagacagagactgctgggaagaagctggtccgtccctgtgatcagacacctgttcgcccctctgaaggagtacttcgcctgcgtgagcagcggcaacagcaacgccaacagccggggccccagcttctctagcggcctggtgccactgtccctgagagggagccacatgggccccatggagatctacaaaaccgtgagcgcctggaagcggcagcctgtgcgcgtgctgagcctgtttcggaatatcgataaagtcctgaaaagcctgggattcctggagagcggctctggctccggcggtggcaccctgaagtacgtggaggatgtgacaaacgtggtcagacgggatgtggagaagtggggccccttcgatctggtgtacggcagcacccaacccctgggcagctcttgtgaccggtgccctggctggtacatgtttcagttccaccggatcctgcagtacgccctgccgagacaggagtcccagcggccattcttttggattttcatggacaacttgctgctgaccgaggatgaccaggaaactaccactcggttcctgcagaccgaagccgtgaccctgcaggacgtgagaggccgggactaccagaacgccatgcgggtgtggtccaacatccctggactgaaaagcaagcacgcacctctgacccctaaagaagaggagtacctgcaggcccaggtgcggagcagaagcaagctggacgcccctaaggtggatctgctggtgaagaattgcctcctgcccctgagagagtacttcaagtatttcagccagaatagtctgcccctgggcggcccaagcagcggcgcccctcctcccagcggcggcagcccagccggctccccaacctctaccgaggagggcacctctgagtccgccacccccgagagcggccctggcacctccaccgagcccagcgagggcagcgcacccggcagccctgccggcagccccacctccacagaggagggaaccagcaccgagcccagcgaaggcagcgccccaggcaccagcaccgagcctagtgagggcggctctggcggcggcagcgcccaggagattaaacggatcaacaagatcagaagaagacttgtgaaagacagcaacaccaagaaggccggcaagacaggccccatgaaaaccctgctggttagagtgatgacacccgatctgagagagcggctggaaaacctgagaaagaagcctgaaaatatcccccagcccatcagcaatacatctagagccaacctgaataagctgctgaccgattacaccgaaatgaagaaggcgatcctgcatgtgtactgggaagagttccagaaggaccctgtgggcctgatgagccgggtggcccagcctgccagcaagaagatcgatcagaacaagctgaaacctgagatggacgagaagggcaacctgaccaccgccggctttgcctgctctcagtgtggccagcccctgttcgtgtacaagctggagcaggtgtctgagaagggcaaggcttacaccaactacttcggacggtgcaatgtggccgagcacgaaaagctgatcctgctggcccagctgaagcccgagaaggatagcgacgaagccgtgacatatagcctgggaaagtttgggcagagggccctggatttctacagcattcatgtgaccaaggagtccacccaccccgtgaagcccctggcccagatcgccggaaacagatacgcctccggacctgtgggaaaggccctgagcgacgcatgtatgggcacaatcgcctccttcctgtctaagtaccaggacatcatcatcgaacaccagaaggtggtgaagggcaaccagaagagactggagagcctgcgggagctggccggcaaggaaaacctggaataccctagcgtgaccctgccacctcagcctcacaccaaggagggcgttgatgcctacaacgaagtgatcgcccgggtgcgaatgtgggtgaacctgaacctgtggcagaagctgaagctaagcagagatgatgccaagcctctgctgagactgaagggattcccttcctttcctctggtcgagagacaggccaacgaagtggactggtgggacatggtgtgtaacgtgaagaagctgatcaacgagaaaaaggaggatggcaaggtgttttggcagaatctggctggctacaagagacaggaagccctgagaccatacctgagcagcgaggaagatcggaagaagggaaagaaattcgctcggtaccagctgggcgacctgctgctgcacctggaaaagaagcacggcgaggactggggaaaggtgtacgacgaggcctgggagcggattgacaagaaagtggaaggcctgagcaagcacatcaagctggaagaggaacggagaagcgaggacgcccagagcaaggccgccctgaccgactggctgcgggctaaggccagcttcgtgatcgagggcctgaaggaggccgacaaggacgagttctgcagatgcgagctgaagctgcagaagtggtacggggacctgcggggaaagcccttcgccatcgaagccgagaacagcatcctggacatcagcggcttcagcaagcagtacaactgtgccttcatctggcagaaggacggcgtgaagaagctgaacctgtacctgatcatcaactacttcaagggcggcaagctgcggttcaagaagatcaaacctgaagccttcgaagccaacagattctacaccgtgatcaacaaaaagagcggcgagatcgtgcccatggaggtgaacttcaacttcgacgaccccaacctgatcatcctgcctctggcctttggcaagagacagggcagagaattcatctggaacgacctgctgtccctggaaaccggcagcctgaagctggccaacggaagagtgatcgagaagacactgtacaacagaagaacccggcaggatgagcctgccctgttcgtggccctgaccttcgagcggcgggaggtcctggactcctccaatatcaaaccaatgaacctgatcggcgtggcaagaggcgaaaacatccccgccgtgatcgccctgaccgaccccgagggctgcccactgagccggtttaaggatagcctgggaaacccaacccacatcctgagaatcggcgagagctataaggagaagcagcggaccatccaggccaagaaggaggtggagcagcggagagccggcggctacagccggaagtacgccagcaaagccaagaatctggcagacgatatggtgagaaacaccgctagagatctgctgtactacgccgtgacccaggatgccatgctgatcttcgccaacctgagccggggcttcggccggcagggcaagcggaccttcatggccgagagacagtacacacggatggaggactggctgaccgccaagctggcctacgagggcctgagcaagacctacctgtccaagacactggcccagtacacctccaagacatgcagcaactgtgggtttaccatcaccagcgccgactacgacagggtgctggagaagctgaagaagacagcaacaggctggatgaccacaattaacggcaaggagctgaaggtggagggccagattacctactacaacagatacaagagacagaacgtagtcaaggacctgtccgtcgagctggatagactgagcgaagaatctgtgaacaacgacatctcctcctggacaaagggcagaagcggagaagctctgagcctcctgaagaaaagattctcccatagacccgtgcaggagaagttcgtgtgcctgaactgcggcttcgagacacacgcagccgagcaagccgccctgaacatcgccagatcctggctgttcctgcggagccaggagtacaagaaataccagacaaacaagacaaccggcaacaccgataagagagccttcgtcgagacctggcagtccttttaccggaagaagcttaaggaggtgtggaaacctgccgtgcggtctggcggatctggcggaggctccacaagccaggtgcccgtgaccttcgaggacatcaccatctacttcagccaggaggagtgggagggcctgcaggagtggcagaaggagctgtacaaggacgtgatgaaggagaactacgagatcctgatcagcctgggcgccagcagccccatcctgacccccgacgtgatcagccacatcgagaggggcgaggagccctacatcagggacgagcccaggagcgaggagagggagagcggcaagagcagcaccagccccaagaaaaagagaaaagtctaagctgccttctgcggggcttgccttctggccatgcccttcttctctcccttgcacctgtacctcttggtctttgaataaagcctgagtaggaaggctagcaaaaaaaaaaaaaaaaaaaaaaaaaaaaaaaaaaaaaaaaaaaaaaaaaaaaaaaaaaaaaaaaaaaaaaaaaaaaaaaa

SEQ ID NO: 6156 - RNA, 5797 nt, synthetic construct
  source 1..5797: mol_type = other RNA
aggaaataagagagaaaagaagagtaagaagaaatataagagccaccatggcccctaagaagaagcgtaaagtgagccggatggaacgcctcgtctacgaggtgcggcagaagtgcagaaacatcgaggacatctgcatctcctgcggatctctgaacgtgaccctggagcacccactgttcatcggcggcatgtgccagaactgtaaaaactgttttctggagtgtgcctatcaatacgacgatgacggctaccagagctactgcaccatctgttgcggcggaagagaggtgctgatgtgtggaaataacaactgctgccggtgcttctgcgtggaatgcgtggacctgctggtgggccccggcgccgcccaggccgctattaaggaagatccttggaactgctacatgtgcggccacaagggcacatacggcctgctgagacggagagaggactggcctagcagactgcagatgttcttcgccaataaccacgaccaggagttcgacccccctaaggtgtaccctcccgtccccgccgagaagagaaagcccatccgggtcctgagcctgttcgatggcatcgccaccggtctgctggtgctgaaggacctgggcatccaggtggataggtacattgcctccgaggtgtgcgaggactccatcaccgtgggaatggtgcgtcatcagggcaagatcatgtacgtgggcgacgtgcggagcgtgacacagaagcatatccaggagtggggccctttcgacctggtgatcggcggcagcccttgcaatgacctgagcatcgtgaacccagcccggaagggcctgtacgagggaaccggcagactgttcttcgagttttacagactgctgcacgacgcccggcctaaggaaggcgacgaccggcccttcttttggctgttcgagaatgtggtggccatgggagtcagcgacaagcgggatattagccggttcctggagagcaaccccgtgatgatcgatgccaaggaagtgagcgccgcccaccgggccagatacttctggggcaatctgcctggcatgaacagacccctggccagcaccgtgaacgacaagctggagctgcaggagtgcctggagcacggccggatcgccaagttcagcaaggtgagaaccatcaccacccgaagcaacagcatcaaacaaggcaaggaccagcactttcctgtgttcatgaacgagaaggaggacatcctgtggtgtaccgagatggagagagtgttcgggttcccagtccactacacagatgtcagcaacatgtctagactggccagacagagactgctgggaagaagctggtccgtccctgtgatcagacacctgttcgcccctctgaaggagtacttcgcctgcgtgagcagcggcaacagcaacgccaacagccggggccccagcttctctagcggcctggtgccactgtccctgagagggagccacatgggccccatggagatctacaaaaccgtgagcgcctggaagcggcagcctgtgcgcgtgctgagcctgtttcggaatatcgataaagtcctgaaaagcctgggattcctggagagcggctctggctccggcggtggcaccctgaagtacgtggaggatgtgacaaacgtggtcagacgggatgtggagaagtggggccccttcgatctggtgtacggcagcacccaacccctgggcagctcttgtgaccggtgccctggctggtacatgtttcagttccaccggatcctgcagtacgccctgccgagacaggagtcccagcggccattcttttggattttcatggacaacttgctgctgaccgaggatgaccaggaaactaccactcggttcctgcagaccgaagccgtgaccctgcaggacgtgagaggccgggactaccagaacgccatgcgggtgtggtccaacatccctggactgaaaagcaagcacgcacctctgacccctaaagaagaggagtacctgcaggcccaggtgcggagcagaagcaagctggacgcccctaaggtggatctgctggtgaagaattgcctcctgcccctgagagagtacttcaagtatttcagccagaatagtctgcccctgggcggcccaagcagcggcgcccctcctcccagcggcggcagcccagccggctccccaacctctaccgaggagggcacctctgagtccgccacccccgagagcggccctggcacctccaccgagcccagcgagggcagcgcacccggcagccctgccggcagccccacctccacagaggagggaaccagcaccgagcccagcgaaggcagcgccccaggcaccagcaccgagcctagtgagggcggctctggcggcggcagcgcccaggagattaaacggatcaacaagatcagaagaagacttgtgaaagacagcaacaccaagaaggccggcaagacaggccccatgaaaaccctgctggttagagtgatgacacccgatctgagagagcggctggaaaacctgagaaagaagcctgaaaatatcccccagcccatcagcaatacatctagagccaacctgaataagctgctgaccgattacaccgaaatgaagaaggcgatcctgcatgtgtactgggaagagttccagaaggaccctgtgggcctgatgagccgggtggcccagcctgccagcaagaagatcgatcagaacaagctgaaacctgagatggacgagaagggcaacctgaccaccgccggctttgcctgctctcagtgtggccagcccctgttcgtgtacaagctggagcaggtgtctgagaagggcaaggcttacaccaactacttcggacggtgcaatgtggccgagcacgaaaagctgatcctgctggcccagctgaagcccgagaaggatagcgacgaagccgtgacatatagcctgggaaagtttgggcagagggccctggatttctacagcattcatgtgaccaaggagtccacccaccccgtgaagcccctggcccagatcgccggaaacagatacgcctccggacctgtgggaaaggccctgagcgacgcatgtatgggcacaatcgcctccttcctgtctaagtaccaggacatcatcatcgaacaccagaaggtggtgaagggcaaccagaagagactggagagcctgcgggagctggccggcaaggaaaacctggaataccctagcgtgaccctgccacctcagcctcacaccaaggagggcgttgatgcctacaacgaagtgatcgcccgggtgcgaatgtgggtgaacctgaacctgtggcagaagctgaagctaagcagagatgatgccaagcctctgctgagactgaagggattcccttcctttcctctggtcgagagacaggccaacgaagtggactggtgggacatggtgtgtaacgtgaagaagctgatcaacgagaaaaaggaggatggcaaggtgttttggcagaatctggctggctacaagagacaggaagccctgagaccatacctgagcagcgaggaagatcggaagaagggaaagaaattcgctcggtaccagctgggcgacctgctgctgcacctggaaaagaagcacggcgaggactggggaaaggtgtacgacgaggcctgggagcggattgacaagaaagtggaaggcctgagcaagcacatcaagctggaagaggaacggagaagcgaggacgcccagagcaaggccgccctgaccgactggctgcgggctaaggccagcttcgtgatcgagggcctgaaggaggccgacaaggacgagttctgcagatgcgagctgaagctgcagaagtggtacggggacctgcggggaaagcccttcgccatcgaagccgagaacagcatcctggacatcagcggcttcagcaagcagtacaactgtgccttcatctggcagaaggacggcgtgaagaagctgaacctgtacctgatcatcaactacttcaagggcggcaagctgcggttcaagaagatcaaacctgaagccttcgaagccaacagattctacaccgtgatcaacaaaaagagcggcgagatcgtgcccatggaggtgaacttcaacttcgacgaccccaacctgatcatcctgcctctggcctttggcaagagacagggcagagaattcatctggaacgacctgctgtccctggaaaccggcagcctgaagctggccaacggaagagtgatcgagaagacactgtacaacagaagaacccggcaggatgagcctgccctgttcgtggccctgaccttcgagcggcgggaggtcctggactcctccaatatcaaaccaatgaacctgatcggcgtggcaagaggcgaaaacatccccgccgtgatcgccctgaccgaccccgagggctgcccactgagccggtttaaggatagcctgggaaacccaacccacatcctgagaatcggcgagagctataaggagaagcagcggaccatccaggccaagaaggaggtggagcagcggagagccggcggctacagccggaagtacgccagcaaagccaagaatctggcagacgatatggtgagaaacaccgctagagatctgctgtactacgccgtgacccaggatgccatgctgatcttcgccaacctgagccggggcttcggccggcagggcaagcggaccttcatggccgagagacagtacacacggatggaggactggctgaccgccaagctggcctacgagggcctgagcaagacctacctgtccaagacactggcccagtacacctccaagacatgcagcaactgtgggtttaccatcaccagcgccgactacgacagggtgctggagaagctgaagaagacagcaacaggctggatgaccacaattaacggcaaggagctgaaggtggagggccagattacctactacaacagatacaagagacagaacgtagtcaaggacctgtccgtcgagctggatagactgagcgaagaatctgtgaacaacgacatctcctcctggacaaagggcagaagcggagaagctctgagcctcctgaagaaaagattctcccatagacccgtgcaggagaagttcgtgtgcctgaactgcggcttcgagacacacgcagccgagcaagccgccctgaacatcgccagatcctggctgttcctgcggagccaggagtacaagaaataccagacaaacaagacaaccggcaacaccgataagagagccttcgtcgagacctggcagtccttttaccggaagaagcttaaggaggtgtggaaacctgccgtgcggtctggcggatctggcggaggctccacaagcgaggagctgcccgtggtgttcgaggacgtggccgtgtacttcaccagggaggagtggggcatgctggacaagaggcagaaggagctgtacagggacgtgatgaggatgaactacgagctgctggccagcctgggccccgccgccgccaagcccgacctgatcagcaagctggagaggagggccgccccctggatcaaggaccccaacggcgccaagagcggcggcaagggcaggccccccggcaccagccccaagaaaaagagaaaagtctaagctgccttctgcggggcttgccttctggccatgcccttcttctctcccttgcacctgtacctcttggtctttgaataaagcctgagtaggaaggctagcaaaaaaaaaaaaaaaaaaaaaaaaaaaaaaaaaaaaaaaaaaaaaaaaaaaaaaaaaaaaaaaaaaaaaaaaaaaaaaaa

SEQ ID NO: 6157 - RNA, 5797 nt, synthetic construct
  source 1..5797: mol_type = other RNA
aggaaataagagagaaaagaagagtaagaagaaatataagagccaccatggcccctaagaagaagcgtaaagtgagccggatggaacgcctcgtctacgaggtgcggcagaagtgcagaaacatcgaggacatctgcatctcctgcggatctctgaacgtgaccctggagcacccactgttcatcggcggcatgtgccagaactgtaaaaactgttttctggagtgtgcctatcaatacgacgatgacggctaccagagctactgcaccatctgttgcggcggaagagaggtgctgatgtgtggaaataacaactgctgccggtgcttctgcgtggaatgcgtggacctgctggtgggccccggcgccgcccaggccgctattaaggaagatccttggaactgctacatgtgcggccacaagggcacatacggcctgctgagacggagagaggactggcctagcagactgcagatgttcttcgccaataaccacgaccaggagttcgacccccctaaggtgtaccctcccgtccccgccgagaagagaaagcccatccgggtcctgagcctgttcgatggcatcgccaccggtctgctggtgctgaaggacctgggcatccaggtggataggtacattgcctccgaggtgtgcgaggactccatcaccgtgggaatggtgcgtcatcagggcaagatcatgtacgtgggcgacgtgcggagcgtgacacagaagcatatccaggagtggggccctttcgacctggtgatcggcggcagcccttgcaatgacctgagcatcgtgaacccagcccggaagggcctgtacgagggaaccggcagactgttcttcgagttttacagactgctgcacgacgcccggcctaaggaaggcgacgaccggcccttcttttggctgttcgagaatgtggtggccatgggagtcagcgacaagcgggatattagccggttcctggagagcaaccccgtgatgatcgatgccaaggaagtgagcgccgcccaccgggccagatacttctggggcaatctgcctggcatgaacagacccctggccagcaccgtgaacgacaagctggagctgcaggagtgcctggagcacggccggatcgccaagttcagcaaggtgagaaccatcaccacccgaagcaacagcatcaaacaaggcaaggaccagcactttcctgtgttcatgaacgagaaggaggacatcctgtggtgtaccgagatggagagagtgttcgggttcccagtccactacacagatgtcagcaacatgtctagactggccagacagagactgctgggaagaagctggtccgtccctgtgatcagacacctgttcgcccctctgaaggagtacttcgcctgcgtgagcagcggcaacagcaacgccaacagccggggccccagcttctctagcggcctggtgccactgtccctgagagggagccacatgggccccatggagatctacaaaaccgtgagcgcctggaagcggcagcctgtgcgcgtgctgagcctgtttcggaatatcgataaagtcctgaaaagcctgggattcctggagagcggctctggctccggcggtggcaccctgaagtacgtggaggatgtgacaaacgtggtcagacgggatgtggagaagtggggccccttcgatctggtgtacggcagcacccaacccctgggcagctcttgtgaccggtgccctggctggtacatgtttcagttccaccggatcctgcagtacgccctgccgagacaggagtcccagcggccattcttttggattttcatggacaacttgctgctgaccgaggatgaccaggaaactaccactcggttcctgcagaccgaagccgtgaccctgcaggacgtgagaggccgggactaccagaacgccatgcgggtgtggtccaacatccctggactgaaaagcaagcacgcacctctgacccctaaagaagaggagtacctgcaggcccaggtgcggagcagaagcaagctggacgcccctaaggtggatctgctggtgaagaattgcctcctgcccctgagagagtacttcaagtatttcagccagaatagtctgcccctgggcggcccaagcagcggcgcccctcctcccagcggcggcagcccagccggctccccaacctctaccgaggagggcacctctgagtccgccacccccgagagcggccctggcacctccaccgagcccagcgagggcagcgcacccggcagccctgccggcagccccacctccacagaggagggaaccagcaccgagcccagcgaaggcagcgccccaggcaccagcaccgagcctagtgagggcggctctggcggcggcagcgcccaggagattaaacggatcaacaagatcagaagaagacttgtgaaagacagcaacaccaagaaggccggcaagacaggccccatgaaaaccctgctggttagagtgatgacacccgatctgagagagcggctggaaaacctgagaaagaagcctgaaaatatcccccagcccatcagcaatacatctagagccaacctgaataagctgctgaccgattacaccgaaatgaagaaggcgatcctgcatgtgtactgggaagagttccagaaggaccctgtgggcctgatgagccgggtggcccagcctgccagcaagaagatcgatcagaacaagctgaaacctgagatggacgagaagggcaacctgaccaccgccggctttgcctgctctcagtgtggccagcccctgttcgtgtacaagctggagcaggtgtctgagaagggcaaggcttacaccaactacttcggacggtgcaatgtggccgagcacgaaaagctgatcctgctggcccagctgaagcccgagaaggatagcgacgaagccgtgacatatagcctgggaaagtttgggcagagggccctggatttctacagcattcatgtgaccaaggagtccacccaccccgtgaagcccctggcccagatcgccggaaacagatacgcctccggacctgtgggaaaggccctgagcgacgcatgtatgggcacaatcgcctccttcctgtctaagtaccaggacatcatcatcgaacaccagaaggtggtgaagggcaaccagaagagactggagagcctgcgggagctggccggcaaggaaaacctggaataccctagcgtgaccctgccacctcagcctcacaccaaggagggcgttgatgcctacaacgaagtgatcgcccgggtgcgaatgtgggtgaacctgaacctgtggcagaagctgaagctaagcagagatgatgccaagcctctgctgagactgaagggattcccttcctttcctctggtcgagagacaggccaacgaagtggactggtgggacatggtgtgtaacgtgaagaagctgatcaacgagaaaaaggaggatggcaaggtgttttggcagaatctggctggctacaagagacaggaagccctgagaccatacctgagcagcgaggaagatcggaagaagggaaagaaattcgctcggtaccagctgggcgacctgctgctgcacctggaaaagaagcacggcgaggactggggaaaggtgtacgacgaggcctgggagcggattgacaagaaagtggaaggcctgagcaagcacatcaagctggaagaggaacggagaagcgaggacgcccagagcaaggccgccctgaccgactggctgcgggctaaggccagcttcgtgatcgagggcctgaaggaggccgacaaggacgagttctgcagatgcgagctgaagctgcagaagtggtacggggacctgcggggaaagcccttcgccatcgaagccgagaacagcatcctggacatcagcggcttcagcaagcagtacaactgtgccttcatctggcagaaggacggcgtgaagaagctgaacctgtacctgatcatcaactacttcaagggcggcaagctgcggttcaagaagatcaaacctgaagccttcgaagccaacagattctacaccgtgatcaacaaaaagagcggcgagatcgtgcccatggaggtgaacttcaacttcgacgaccccaacctgatcatcctgcctctggcctttggcaagagacagggcagagaattcatctggaacgacctgctgtccctggaaaccggcagcctgaagctggccaacggaagagtgatcgagaagacactgtacaacagaagaacccggcaggatgagcctgccctgttcgtggccctgaccttcgagcggcgggaggtcctggactcctccaatatcaaaccaatgaacctgatcggcgtggcaagaggcgaaaacatccccgccgtgatcgccctgaccgaccccgagggctgcccactgagccggtttaaggatagcctgggaaacccaacccacatcctgagaatcggcgagagctataaggagaagcagcggaccatccaggccaagaaggaggtggagcagcggagagccggcggctacagccggaagtacgccagcaaagccaagaatctggcagacgatatggtgagaaacaccgctagagatctgctgtactacgccgtgacccaggatgccatgctgatcttcgccaacctgagccggggcttcggccggcagggcaagcggaccttcatggccgagagacagtacacacggatggaggactggctgaccgccaagctggcctacgagggcctgagcaagacctacctgtccaagacactggcccagtacacctccaagacatgcagcaactgtgggtttaccatcaccagcgccgactacgacagggtgctggagaagctgaagaagacagcaacaggctggatgaccacaattaacggcaaggagctgaaggtggagggccagattacctactacaacagatacaagagacagaacgtagtcaaggacctgtccgtcgagctggatagactgagcgaagaatctgtgaacaacgacatctcctcctggacaaagggcagaagcggagaagctctgagcctcctgaagaaaagattctcccatagacccgtgcaggagaagttcgtgtgcctgaactgcggcttcgagacacacgcagccgagcaagccgccctgaacatcgccagatcctggctgttcctgcggagccaggagtacaagaaataccagacaaacaagacaaccggcaacaccgataagagagccttcgtcgagacctggcagtccttttaccggaagaagcttaaggaggtgtggaaacctgccgtgcggtctggcggatctggcggaggctccacaagcaagcacggccccgtgaccttcgaggaggtggccgtgtacttcaccagggaggagtgggccctgctggaccccacccagagggccctgtacagggacgtgatgcaggagaactacgagatggtggtgctgctgggcttcctgaacagcaagcccgacgtgatcagccagctggagcagggcgaggagccctgcatcgtggacctgcagggcagcgagaaggaggtgctgcccagggccgcctgcaccagccccaagaaaaagagaaaagtctaagctgccttctgcggggcttgccttctggccatgcccttcttctctcccttgcacctgtacctcttggtctttgaataaagcctgagtaggaaggctagcaaaaaaaaaaaaaaaaaaaaaaaaaaaaaaaaaaaaaaaaaaaaaaaaaaaaaaaaaaaaaaaaaaaaaaaaaaaaaaaa

SEQ ID NO: 6158 - RNA, 5797 nt, synthetic construct
  source 1..5797: mol_type = other RNA
aggaaataagagagaaaagaagagtaagaagaaatataagagccaccatggcccctaagaagaagcgtaaagtgagccggatggaacgcctcgtctacgaggtgcggcagaagtgcagaaacatcgaggacatctgcatctcctgcggatctctgaacgtgaccctggagcacccactgttcatcggcggcatgtgccagaactgtaaaaactgttttctggagtgtgcctatcaatacgacgatgacggctaccagagctactgcaccatctgttgcggcggaagagaggtgctgatgtgtggaaataacaactgctgccggtgcttctgcgtggaatgcgtggacctgctggtgggccccggcgccgcccaggccgctattaaggaagatccttggaactgctacatgtgcggccacaagggcacatacggcctgctgagacggagagaggactggcctagcagactgcagatgttcttcgccaataaccacgaccaggagttcgacccccctaaggtgtaccctcccgtccccgccgagaagagaaagcccatccgggtcctgagcctgttcgatggcatcgccaccggtctgctggtgctgaaggacctgggcatccaggtggataggtacattgcctccgaggtgtgcgaggactccatcaccgtgggaatggtgcgtcatcagggcaagatcatgtacgtgggcgacgtgcggagcgtgacacagaagcatatccaggagtggggccctttcgacctggtgatcggcggcagcccttgcaatgacctgagcatcgtgaacccagcccggaagggcctgtacgagggaaccggcagactgttcttcgagttttacagactgctgcacgacgcccggcctaaggaaggcgacgaccggcccttcttttggctgttcgagaatgtggtggccatgggagtcagcgacaagcgggatattagccggttcctggagagcaaccccgtgatgatcgatgccaaggaagtgagcgccgcccaccgggccagatacttctggggcaatctgcctggcatgaacagacccctggccagcaccgtgaacgacaagctggagctgcaggagtgcctggagcacggccggatcgccaagttcagcaaggtgagaaccatcaccacccgaagcaacagcatcaaacaaggcaaggaccagcactttcctgtgttcatgaacgagaaggaggacatcctgtggtgtaccgagatggagagagtgttcgggttcccagtccactacacagatgtcagcaacatgtctagactggccagacagagactgctgggaagaagctggtccgtccctgtgatcagacacctgttcgcccctctgaaggagtacttcgcctgcgtgagcagcggcaacagcaacgccaacagccggggccccagcttctctagcggcctggtgccactgtccctgagagggagccacatgggccccatggagatctacaaaaccgtgagcgcctggaagcggcagcctgtgcgcgtgctgagcctgtttcggaatatcgataaagtcctgaaaagcctgggattcctggagagcggctctggctccggcggtggcaccctgaagtacgtggaggatgtgacaaacgtggtcagacgggatgtggagaagtggggccccttcgatctggtgtacggcagcacccaacccctgggcagctcttgtgaccggtgccctggctggtacatgtttcagttccaccggatcctgcagtacgccctgccgagacaggagtcccagcggccattcttttggattttcatggacaacttgctgctgaccgaggatgaccaggaaactaccactcggttcctgcagaccgaagccgtgaccctgcaggacgtgagaggccgggactaccagaacgccatgcgggtgtggtccaacatccctggactgaaaagcaagcacgcacctctgacccctaaagaagaggagtacctgcaggcccaggtgcggagcagaagcaagctggacgcccctaaggtggatctgctggtgaagaattgcctcctgcccctgagagagtacttcaagtatttcagccagaatagtctgcccctgggcggcccaagcagcggcgcccctcctcccagcggcggcagcccagccggctccccaacctctaccgaggagggcacctctgagtccgccacccccgagagcggccctggcacctccaccgagcccagcgagggcagcgcacccggcagccctgccggcagccccacctccacagaggagggaaccagcaccgagcccagcgaaggcagcgccccaggcaccagcaccgagcctagtgagggcggctctggcggcggcagcgcccaggagattaaacggatcaacaagatcagaagaagacttgtgaaagacagcaacaccaagaaggccggcaagacaggccccatgaaaaccctgctggttagagtgatgacacccgatctgagagagcggctggaaaacctgagaaagaagcctgaaaatatcccccagcccatcagcaatacatctagagccaacctgaataagctgctgaccgattacaccgaaatgaagaaggcgatcctgcatgtgtactgggaagagttccagaaggaccctgtgggcctgatgagccgggtggcccagcctgccagcaagaagatcgatcagaacaagctgaaacctgagatggacgagaagggcaacctgaccaccgccggctttgcctgctctcagtgtggccagcccctgttcgtgtacaagctggagcaggtgtctgagaagggcaaggcttacaccaactacttcggacggtgcaatgtggccgagcacgaaaagctgatcctgctggcccagctgaagcccgagaaggatagcgacgaagccgtgacatatagcctgggaaagtttgggcagagggccctggatttctacagcattcatgtgaccaaggagtccacccaccccgtgaagcccctggcccagatcgccggaaacagatacgcctccggacctgtgggaaaggccctgagcgacgcatgtatgggcacaatcgcctccttcctgtctaagtaccaggacatcatcatcgaacaccagaaggtggtgaagggcaaccagaagagactggagagcctgcgggagctggccggcaaggaaaacctggaataccctagcgtgaccctgccacctcagcctcacaccaaggagggcgttgatgcctacaacgaagtgatcgcccgggtgcgaatgtgggtgaacctgaacctgtggcagaagctgaagctaagcagagatgatgccaagcctctgctgagactgaagggattcccttcctttcctctggtcgagagacaggccaacgaagtggactggtgggacatggtgtgtaacgtgaagaagctgatcaacgagaaaaaggaggatggcaaggtgttttggcagaatctggctggctacaagagacaggaagccctgagaccatacctgagcagcgaggaagatcggaagaagggaaagaaattcgctcggtaccagctgggcgacctgctgctgcacctggaaaagaagcacggcgaggactggggaaaggtgtacgacgaggcctgggagcggattgacaagaaagtggaaggcctgagcaagcacatcaagctggaagaggaacggagaagcgaggacgcccagagcaaggccgccctgaccgactggctgcgggctaaggccagcttcgtgatcgagggcctgaaggaggccgacaaggacgagttctgcagatgcgagctgaagctgcagaagtggtacggggacctgcggggaaagcccttcgccatcgaagccgagaacagcatcctggacatcagcggcttcagcaagcagtacaactgtgccttcatctggcagaaggacggcgtgaagaagctgaacctgtacctgatcatcaactacttcaagggcggcaagctgcggttcaagaagatcaaacctgaagccttcgaagccaacagattctacaccgtgatcaacaaaaagagcggcgagatcgtgcccatggaggtgaacttcaacttcgacgaccccaacctgatcatcctgcctctggcctttggcaagagacagggcagagaattcatctggaacgacctgctgtccctggaaaccggcagcctgaagctggccaacggaagagtgatcgagaagacactgtacaacagaagaacccggcaggatgagcctgccctgttcgtggccctgaccttcgagcggcgggaggtcctggactcctccaatatcaaaccaatgaacctgatcggcgtggcaagaggcgaaaacatccccgccgtgatcgccctgaccgaccccgagggctgcccactgagccggtttaaggatagcctgggaaacccaacccacatcctgagaatcggcgagagctataaggagaagcagcggaccatccaggccaagaaggaggtggagcagcggagagccggcggctacagccggaagtacgccagcaaagccaagaatctggcagacgatatggtgagaaacaccgctagagatctgctgtactacgccgtgacccaggatgccatgctgatcttcgccaacctgagccggggcttcggccggcagggcaagcggaccttcatggccgagagacagtacacacggatggaggactggctgaccgccaagctggcctacgagggcctgagcaagacctacctgtccaagacactggcccagtacacctccaagacatgcagcaactgtgggtttaccatcaccagcgccgactacgacagggtgctggagaagctgaagaagacagcaacaggctggatgaccacaattaacggcaaggagctgaaggtggagggccagattacctactacaacagatacaagagacagaacgtagtcaaggacctgtccgtcgagctggatagactgagcgaagaatctgtgaacaacgacatctcctcctggacaaagggcagaagcggagaagctctgagcctcctgaagaaaagattctcccatagacccgtgcaggagaagttcgtgtgcctgaactgcggcttcgagacacacgcagccgagcaagccgccctgaacatcgccagatcctggctgttcctgcggagccaggagtacaagaaataccagacaaacaagacaaccggcaacaccgataagagagccttcgtcgagacctggcagtccttttaccggaagaagcttaaggaggtgtggaaacctgccgtgcggtctggcggatctggcggaggctccacaagcagccaggaggtggtgaccttccaggacgtggccgtgaacttcaccagggaggagtggaggctgctgagccccccccagaaggagctgtacagggaggtgatgctggagaacgccaggaacctgctgagcgtgggcctgcccgccagcatcgaggacgtgatcagcaacgtggagcagagggaggccctgtggatgctggagagggagggcctgaggagctgctgccccgaggaggacatcaggaccagccccaagaaaaagagaaaagtctaagctgccttctgcggggcttgccttctggccatgcccttcttctctcccttgcacctgtacctcttggtctttgaataaagcctgagtaggaaggctagcaaaaaaaaaaaaaaaaaaaaaaaaaaaaaaaaaaaaaaaaaaaaaaaaaaaaaaaaaaaaaaaaaaaaaaaaaaaaaaaa

SEQ ID NO: 6159 - RNA, 5797 nt, synthetic construct
  source 1..5797: mol_type = other RNA
aggaaataagagagaaaagaagagtaagaagaaatataagagccaccatggcccctaagaagaagcgtaaagtgagccggatggaacgcctcgtctacgaggtgcggcagaagtgcagaaacatcgaggacatctgcatctcctgcggatctctgaacgtgaccctggagcacccactgttcatcggcggcatgtgccagaactgtaaaaactgttttctggagtgtgcctatcaatacgacgatgacggctaccagagctactgcaccatctgttgcggcggaagagaggtgctgatgtgtggaaataacaactgctgccggtgcttctgcgtggaatgcgtggacctgctggtgggccccggcgccgcccaggccgctattaaggaagatccttggaactgctacatgtgcggccacaagggcacatacggcctgctgagacggagagaggactggcctagcagactgcagatgttcttcgccaataaccacgaccaggagttcgacccccctaaggtgtaccctcccgtccccgccgagaagagaaagcccatccgggtcctgagcctgttcgatggcatcgccaccggtctgctggtgctgaaggacctgggcatccaggtggataggtacattgcctccgaggtgtgcgaggactccatcaccgtgggaatggtgcgtcatcagggcaagatcatgtacgtgggcgacgtgcggagcgtgacacagaagcatatccaggagtggggccctttcgacctggtgatcggcggcagcccttgcaatgacctgagcatcgtgaacccagcccggaagggcctgtacgagggaaccggcagactgttcttcgagttttacagactgctgcacgacgcccggcctaaggaaggcgacgaccggcccttcttttggctgttcgagaatgtggtggccatgggagtcagcgacaagcgggatattagccggttcctggagagcaaccccgtgatgatcgatgccaaggaagtgagcgccgcccaccgggccagatacttctggggcaatctgcctggcatgaacagacccctggccagcaccgtgaacgacaagctggagctgcaggagtgcctggagcacggccggatcgccaagttcagcaaggtgagaaccatcaccacccgaagcaacagcatcaaacaaggcaaggaccagcactttcctgtgttcatgaacgagaaggaggacatcctgtggtgtaccgagatggagagagtgttcgggttcccagtccactacacagatgtcagcaacatgtctagactggccagacagagactgctgggaagaagctggtccgtccctgtgatcagacacctgttcgcccctctgaaggagtacttcgcctgcgtgagcagcggcaacagcaacgccaacagccggggccccagcttctctagcggcctggtgccactgtccctgagagggagccacatgggccccatggagatctacaaaaccgtgagcgcctggaagcggcagcctgtgcgcgtgctgagcctgtttcggaatatcgataaagtcctgaaaagcctgggattcctggagagcggctctggctccggcggtggcaccctgaagtacgtggaggatgtgacaaacgtggtcagacgggatgtggagaagtggggccccttcgatctggtgtacggcagcacccaacccctgggcagctcttgtgaccggtgccctggctggtacatgtttcagttccaccggatcctgcagtacgccctgccgagacaggagtcccagcggccattcttttggattttcatggacaacttgctgctgaccgaggatgaccaggaaactaccactcggttcctgcagaccgaagccgtgaccctgcaggacgtgagaggccgggactaccagaacgccatgcgggtgtggtccaacatccctggactgaaaagcaagcacgcacctctgacccctaaagaagaggagtacctgcaggcccaggtgcggagcagaagcaagctggacgcccctaaggtggatctgctggtgaagaattgcctcctgcccctgagagagtacttcaagtatttcagccagaatagtctgcccctgggcggcccaagcagcggcgcccctcctcccagcggcggcagcccagccggctccccaacctctaccgaggagggcacctctgagtccgccacccccgagagcggccctggcacctccaccgagcccagcgagggcagcgcacccggcagccctgccggcagccccacctccacagaggagggaaccagcaccgagcccagcgaaggcagcgccccaggcaccagcaccgagcctagtgagggcggctctggcggcggcagcgcccaggagattaaacggatcaacaagatcagaagaagacttgtgaaagacagcaacaccaagaaggccggcaagacaggccccatgaaaaccctgctggttagagtgatgacacccgatctgagagagcggctggaaaacctgagaaagaagcctgaaaatatcccccagcccatcagcaatacatctagagccaacctgaataagctgctgaccgattacaccgaaatgaagaaggcgatcctgcatgtgtactgggaagagttccagaaggaccctgtgggcctgatgagccgggtggcccagcctgccagcaagaagatcgatcagaacaagctgaaacctgagatggacgagaagggcaacctgaccaccgccggctttgcctgctctcagtgtggccagcccctgttcgtgtacaagctggagcaggtgtctgagaagggcaaggcttacaccaactacttcggacggtgcaatgtggccgagcacgaaaagctgatcctgctggcccagctgaagcccgagaaggatagcgacgaagccgtgacatatagcctgggaaagtttgggcagagggccctggatttctacagcattcatgtgaccaaggagtccacccaccccgtgaagcccctggcccagatcgccggaaacagatacgcctccggacctgtgggaaaggccctgagcgacgcatgtatgggcacaatcgcctccttcctgtctaagtaccaggacatcatcatcgaacaccagaaggtggtgaagggcaaccagaagagactggagagcctgcgggagctggccggcaaggaaaacctggaataccctagcgtgaccctgccacctcagcctcacaccaaggagggcgttgatgcctacaacgaagtgatcgcccgggtgcgaatgtgggtgaacctgaacctgtggcagaagctgaagctaagcagagatgatgccaagcctctgctgagactgaagggattcccttcctttcctctggtcgagagacaggccaacgaagtggactggtgggacatggtgtgtaacgtgaagaagctgatcaacgagaaaaaggaggatggcaaggtgttttggcagaatctggctggctacaagagacaggaagccctgagaccatacctgagcagcgaggaagatcggaagaagggaaagaaattcgctcggtaccagctgggcgacctgctgctgcacctggaaaagaagcacggcgaggactggggaaaggtgtacgacgaggcctgggagcggattgacaagaaagtggaaggcctgagcaagcacatcaagctggaagaggaacggagaagcgaggacgcccagagcaaggccgccctgaccgactggctgcgggctaaggccagcttcgtgatcgagggcctgaaggaggccgacaaggacgagttctgcagatgcgagctgaagctgcagaagtggtacggggacctgcggggaaagcccttcgccatcgaagccgagaacagcatcctggacatcagcggcttcagcaagcagtacaactgtgccttcatctggcagaaggacggcgtgaagaagctgaacctgtacctgatcatcaactacttcaagggcggcaagctgcggttcaagaagatcaaacctgaagccttcgaagccaacagattctacaccgtgatcaacaaaaagagcggcgagatcgtgcccatggaggtgaacttcaacttcgacgaccccaacctgatcatcctgcctctggcctttggcaagagacagggcagagaattcatctggaacgacctgctgtccctggaaaccggcagcctgaagctggccaacggaagagtgatcgagaagacactgtacaacagaagaacccggcaggatgagcctgccctgttcgtggccctgaccttcgagcggcgggaggtcctggactcctccaatatcaaaccaatgaacctgatcggcgtggcaagaggcgaaaacatccccgccgtgatcgccctgaccgaccccgagggctgcccactgagccggtttaaggatagcctgggaaacccaacccacatcctgagaatcggcgagagctataaggagaagcagcggaccatccaggccaagaaggaggtggagcagcggagagccggcggctacagccggaagtacgccagcaaagccaagaatctggcagacgatatggtgagaaacaccgctagagatctgctgtactacgccgtgacccaggatgccatgctgatcttcgccaacctgagccggggcttcggccggcagggcaagcggaccttcatggccgagagacagtacacacggatggaggactggctgaccgccaagctggcctacgagggcctgagcaagacctacctgtccaagacactggcccagtacacctccaagacatgcagcaactgtgggtttaccatcaccagcgccgactacgacagggtgctggagaagctgaagaagacagcaacaggctggatgaccacaattaacggcaaggagctgaaggtggagggccagattacctactacaacagatacaagagacagaacgtagtcaaggacctgtccgtcgagctggatagactgagcgaagaatctgtgaacaacgacatctcctcctggacaaagggcagaagcggagaagctctgagcctcctgaagaaaagattctcccatagacccgtgcaggagaagttcgtgtgcctgaactgcggcttcgagacacacgcagccgagcaagccgccctgaacatcgccagatcctggctgttcctgcggagccaggagtacaagaaataccagacaaacaagacaaccggcaacaccgataagagagccttcgtcgagacctggcagtccttttaccggaagaagcttaaggaggtgtggaaacctgccgtgcggtctggcggatctggcggaggctccacaagcgagagcgtggccttcgaggacgtggccgtgtacttcacccagaaccagtggggcagcctggaccccgcccagagggccctgtacagggaggtgatgctggagaactacgccaacgtggccagcctggtggccttccccttccccaagcccgccctgatcagccacctggagaagggcgaggccccctggggccccgacccctgggacgccgagatccccagcggcatcagccagggcggcgagaccagccccaagaaaaagagaaaagtctaagctgccttctgcggggcttgccttctggccatgcccttcttctctcccttgcacctgtacctcttggtctttgaataaagcctgagtaggaaggctagcaaaaaaaaaaaaaaaaaaaaaaaaaaaaaaaaaaaaaaaaaaaaaaaaaaaaaaaaaaaaaaaaaaaaaaaaaaaaaaaa

SEQ ID NO: 6160 - RNA, 5797 nt, synthetic construct
  source 1..5797: mol_type = other RNA
aggaaataagagagaaaagaagagtaagaagaaatataagagccaccatggcccctaagaagaagcgtaaagtgagccggatggaacgcctcgtctacgaggtgcggcagaagtgcagaaacatcgaggacatctgcatctcctgcggatctctgaacgtgaccctggagcacccactgttcatcggcggcatgtgccagaactgtaaaaactgttttctggagtgtgcctatcaatacgacgatgacggctaccagagctactgcaccatctgttgcggcggaagagaggtgctgatgtgtggaaataacaactgctgccggtgcttctgcgtggaatgcgtggacctgctggtgggccccggcgccgcccaggccgctattaaggaagatccttggaactgctacatgtgcggccacaagggcacatacggcctgctgagacggagagaggactggcctagcagactgcagatgttcttcgccaataaccacgaccaggagttcgacccccctaaggtgtaccctcccgtccccgccgagaagagaaagcccatccgggtcctgagcctgttcgatggcatcgccaccggtctgctggtgctgaaggacctgggcatccaggtggataggtacattgcctccgaggtgtgcgaggactccatcaccgtgggaatggtgcgtcatcagggcaagatcatgtacgtgggcgacgtgcggagcgtgacacagaagcatatccaggagtggggccctttcgacctggtgatcggcggcagcccttgcaatgacctgagcatcgtgaacccagcccggaagggcctgtacgagggaaccggcagactgttcttcgagttttacagactgctgcacgacgcccggcctaaggaaggcgacgaccggcccttcttttggctgttcgagaatgtggtggccatgggagtcagcgacaagcgggatattagccggttcctggagagcaaccccgtgatgatcgatgccaaggaagtgagcgccgcccaccgggccagatacttctggggcaatctgcctggcatgaacagacccctggccagcaccgtgaacgacaagctggagctgcaggagtgcctggagcacggccggatcgccaagttcagcaaggtgagaaccatcaccacccgaagcaacagcatcaaacaaggcaaggaccagcactttcctgtgttcatgaacgagaaggaggacatcctgtggtgtaccgagatggagagagtgttcgggttcccagtccactacacagatgtcagcaacatgtctagactggccagacagagactgctgggaagaagctggtccgtccctgtgatcagacacctgttcgcccctctgaaggagtacttcgcctgcgtgagcagcggcaacagcaacgccaacagccggggccccagcttctctagcggcctggtgccactgtccctgagagggagccacatgggccccatggagatctacaaaaccgtgagcgcctggaagcggcagcctgtgcgcgtgctgagcctgtttcggaatatcgataaagtcctgaaaagcctgggattcctggagagcggctctggctccggcggtggcaccctgaagtacgtggaggatgtgacaaacgtggtcagacgggatgtggagaagtggggccccttcgatctggtgtacggcagcacccaacccctgggcagctcttgtgaccggtgccctggctggtacatgtttcagttccaccggatcctgcagtacgccctgccgagacaggagtcccagcggccattcttttggattttcatggacaacttgctgctgaccgaggatgaccaggaaactaccactcggttcctgcagaccgaagccgtgaccctgcaggacgtgagaggccgggactaccagaacgccatgcgggtgtggtccaacatccctggactgaaaagcaagcacgcacctctgacccctaaagaagaggagtacctgcaggcccaggtgcggagcagaagcaagctggacgcccctaaggtggatctgctggtgaagaattgcctcctgcccctgagagagtacttcaagtatttcagccagaatagtctgcccctgggcggcccaagcagcggcgcccctcctcccagcggcggcagcccagccggctccccaacctctaccgaggagggcacctctgagtccgccacccccgagagcggccctggcacctccaccgagcccagcgagggcagcgcacccggcagccctgccggcagccccacctccacagaggagggaaccagcaccgagcccagcgaaggcagcgccccaggcaccagcaccgagcctagtgagggcggctctggcggcggcagcgcccaggagattaaacggatcaacaagatcagaagaagacttgtgaaagacagcaacaccaagaaggccggcaagacaggccccatgaaaaccctgctggttagagtgatgacacccgatctgagagagcggctggaaaacctgagaaagaagcctgaaaatatcccccagcccatcagcaatacatctagagccaacctgaataagctgctgaccgattacaccgaaatgaagaaggcgatcctgcatgtgtactgggaagagttccagaaggaccctgtgggcctgatgagccgggtggcccagcctgccagcaagaagatcgatcagaacaagctgaaacctgagatggacgagaagggcaacctgaccaccgccggctttgcctgctctcagtgtggccagcccctgttcgtgtacaagctggagcaggtgtctgagaagggcaaggcttacaccaactacttcggacggtgcaatgtggccgagcacgaaaagctgatcctgctggcccagctgaagcccgagaaggatagcgacgaagccgtgacatatagcctgggaaagtttgggcagagggccctggatttctacagcattcatgtgaccaaggagtccacccaccccgtgaagcccctggcccagatcgccggaaacagatacgcctccggacctgtgggaaaggccctgagcgacgcatgtatgggcacaatcgcctccttcctgtctaagtaccaggacatcatcatcgaacaccagaaggtggtgaagggcaaccagaagagactggagagcctgcgggagctggccggcaaggaaaacctggaataccctagcgtgaccctgccacctcagcctcacaccaaggagggcgttgatgcctacaacgaagtgatcgcccgggtgcgaatgtgggtgaacctgaacctgtggcagaagctgaagctaagcagagatgatgccaagcctctgctgagactgaagggattcccttcctttcctctggtcgagagacaggccaacgaagtggactggtgggacatggtgtgtaacgtgaagaagctgatcaacgagaaaaaggaggatggcaaggtgttttggcagaatctggctggctacaagagacaggaagccctgagaccatacctgagcagcgaggaagatcggaagaagggaaagaaattcgctcggtaccagctgggcgacctgctgctgcacctggaaaagaagcacggcgaggactggggaaaggtgtacgacgaggcctgggagcggattgacaagaaagtggaaggcctgagcaagcacatcaagctggaagaggaacggagaagcgaggacgcccagagcaaggccgccctgaccgactggctgcgggctaaggccagcttcgtgatcgagggcctgaaggaggccgacaaggacgagttctgcagatgcgagctgaagctgcagaagtggtacggggacctgcggggaaagcccttcgccatcgaagccgagaacagcatcctggacatcagcggcttcagcaagcagtacaactgtgccttcatctggcagaaggacggcgtgaagaagctgaacctgtacctgatcatcaactacttcaagggcggcaagctgcggttcaagaagatcaaacctgaagccttcgaagccaacagattctacaccgtgatcaacaaaaagagcggcgagatcgtgcccatggaggtgaacttcaacttcgacgaccccaacctgatcatcctgcctctggcctttggcaagagacagggcagagaattcatctggaacgacctgctgtccctggaaaccggcagcctgaagctggccaacggaagagtgatcgagaagacactgtacaacagaagaacccggcaggatgagcctgccctgttcgtggccctgaccttcgagcggcgggaggtcctggactcctccaatatcaaaccaatgaacctgatcggcgtggcaagaggcgaaaacatccccgccgtgatcgccctgaccgaccccgagggctgcccactgagccggtttaaggatagcctgggaaacccaacccacatcctgagaatcggcgagagctataaggagaagcagcggaccatccaggccaagaaggaggtggagcagcggagagccggcggctacagccggaagtacgccagcaaagccaagaatctggcagacgatatggtgagaaacaccgctagagatctgctgtactacgccgtgacccaggatgccatgctgatcttcgccaacctgagccggggcttcggccggcagggcaagcggaccttcatggccgagagacagtacacacggatggaggactggctgaccgccaagctggcctacgagggcctgagcaagacctacctgtccaagacactggcccagtacacctccaagacatgcagcaactgtgggtttaccatcaccagcgccgactacgacagggtgctggagaagctgaagaagacagcaacaggctggatgaccacaattaacggcaaggagctgaaggtggagggccagattacctactacaacagatacaagagacagaacgtagtcaaggacctgtccgtcgagctggatagactgagcgaagaatctgtgaacaacgacatctcctcctggacaaagggcagaagcggagaagctctgagcctcctgaagaaaagattctcccatagacccgtgcaggagaagttcgtgtgcctgaactgcggcttcgagacacacgcagccgagcaagccgccctgaacatcgccagatcctggctgttcctgcggagccaggagtacaagaaataccagacaaacaagacaaccggcaacaccgataagagagccttcgtcgagacctggcagtccttttaccggaagaagcttaaggaggtgtggaaacctgccgtgcggtctggcggatctggcggaggctccacaagcagcgagggcctggtgaccttcggcgacgtggccgtggacttcagccaggaggagtgggagtggctgaaccccgcccagaggagcctgtacaggaaggtgatgctggacaactacaggagcctggtgagcctgggcgtgagcgtgagcaagcccgacgtgatcagcctgctggagcagggcaaggagccctggctggtgaaggaggagggccccaggggcgccaggagcgactgggagtacgccaccagccccaagaaaaagagaaaagtctaagctgccttctgcggggcttgccttctggccatgcccttcttctctcccttgcacctgtacctcttggtctttgaataaagcctgagtaggaaggctagcaaaaaaaaaaaaaaaaaaaaaaaaaaaaaaaaaaaaaaaaaaaaaaaaaaaaaaaaaaaaaaaaaaaaaaaaaaaaaaaa

SEQ ID NO: 6161 - RNA, 5797 nt, synthetic construct
  source 1..5797: mol_type = other RNA
aggaaataagagagaaaagaagagtaagaagaaatataagagccaccatggcccctaagaagaagcgtaaagtgagccggatggaacgcctcgtctacgaggtgcggcagaagtgcagaaacatcgaggacatctgcatctcctgcggatctctgaacgtgaccctggagcacccactgttcatcggcggcatgtgccagaactgtaaaaactgttttctggagtgtgcctatcaatacgacgatgacggctaccagagctactgcaccatctgttgcggcggaagagaggtgctgatgtgtggaaataacaactgctgccggtgcttctgcgtggaatgcgtggacctgctggtgggccccggcgccgcccaggccgctattaaggaagatccttggaactgctacatgtgcggccacaagggcacatacggcctgctgagacggagagaggactggcctagcagactgcagatgttcttcgccaataaccacgaccaggagttcgacccccctaaggtgtaccctcccgtccccgccgagaagagaaagcccatccgggtcctgagcctgttcgatggcatcgccaccggtctgctggtgctgaaggacctgggcatccaggtggataggtacattgcctccgaggtgtgcgaggactccatcaccgtgggaatggtgcgtcatcagggcaagatcatgtacgtgggcgacgtgcggagcgtgacacagaagcatatccaggagtggggccctttcgacctggtgatcggcggcagcccttgcaatgacctgagcatcgtgaacccagcccggaagggcctgtacgagggaaccggcagactgttcttcgagttttacagactgctgcacgacgcccggcctaaggaaggcgacgaccggcccttcttttggctgttcgagaatgtggtggccatgggagtcagcgacaagcgggatattagccggttcctggagagcaaccccgtgatgatcgatgccaaggaagtgagcgccgcccaccgggccagatacttctggggcaatctgcctggcatgaacagacccctggccagcaccgtgaacgacaagctggagctgcaggagtgcctggagcacggccggatcgccaagttcagcaaggtgagaaccatcaccacccgaagcaacagcatcaaacaaggcaaggaccagcactttcctgtgttcatgaacgagaaggaggacatcctgtggtgtaccgagatggagagagtgttcgggttcccagtccactacacagatgtcagcaacatgtctagactggccagacagagactgctgggaagaagctggtccgtccctgtgatcagacacctgttcgcccctctgaaggagtacttcgcctgcgtgagcagcggcaacagcaacgccaacagccggggccccagcttctctagcggcctggtgccactgtccctgagagggagccacatgggccccatggagatctacaaaaccgtgagcgcctggaagcggcagcctgtgcgcgtgctgagcctgtttcggaatatcgataaagtcctgaaaagcctgggattcctggagagcggctctggctccggcggtggcaccctgaagtacgtggaggatgtgacaaacgtggtcagacgggatgtggagaagtggggccccttcgatctggtgtacggcagcacccaacccctgggcagctcttgtgaccggtgccctggctggtacatgtttcagttccaccggatcctgcagtacgccctgccgagacaggagtcccagcggccattcttttggattttcatggacaacttgctgctgaccgaggatgaccaggaaactaccactcggttcctgcagaccgaagccgtgaccctgcaggacgtgagaggccgggactaccagaacgccatgcgggtgtggtccaacatccctggactgaaaagcaagcacgcacctctgacccctaaagaagaggagtacctgcaggcccaggtgcggagcagaagcaagctggacgcccctaaggtggatctgctggtgaagaattgcctcctgcccctgagagagtacttcaagtatttcagccagaatagtctgcccctgggcggcccaagcagcggcgcccctcctcccagcggcggcagcccagccggctccccaacctctaccgaggagggcacctctgagtccgccacccccgagagcggccctggcacctccaccgagcccagcgagggcagcgcacccggcagccctgccggcagccccacctccacagaggagggaaccagcaccgagcccagcgaaggcagcgccccaggcaccagcaccgagcctagtgagggcggctctggcggcggcagcgcccaggagattaaacggatcaacaagatcagaagaagacttgtgaaagacagcaacaccaagaaggccggcaagacaggccccatgaaaaccctgctggttagagtgatgacacccgatctgagagagcggctggaaaacctgagaaagaagcctgaaaatatcccccagcccatcagcaatacatctagagccaacctgaataagctgctgaccgattacaccgaaatgaagaaggcgatcctgcatgtgtactgggaagagttccagaaggaccctgtgggcctgatgagccgggtggcccagcctgccagcaagaagatcgatcagaacaagctgaaacctgagatggacgagaagggcaacctgaccaccgccggctttgcctgctctcagtgtggccagcccctgttcgtgtacaagctggagcaggtgtctgagaagggcaaggcttacaccaactacttcggacggtgcaatgtggccgagcacgaaaagctgatcctgctggcccagctgaagcccgagaaggatagcgacgaagccgtgacatatagcctgggaaagtttgggcagagggccctggatttctacagcattcatgtgaccaaggagtccacccaccccgtgaagcccctggcccagatcgccggaaacagatacgcctccggacctgtgggaaaggccctgagcgacgcatgtatgggcacaatcgcctccttcctgtctaagtaccaggacatcatcatcgaacaccagaaggtggtgaagggcaaccagaagagactggagagcctgcgggagctggccggcaaggaaaacctggaataccctagcgtgaccctgccacctcagcctcacaccaaggagggcgttgatgcctacaacgaagtgatcgcccgggtgcgaatgtgggtgaacctgaacctgtggcagaagctgaagctaagcagagatgatgccaagcctctgctgagactgaagggattcccttcctttcctctggtcgagagacaggccaacgaagtggactggtgggacatggtgtgtaacgtgaagaagctgatcaacgagaaaaaggaggatggcaaggtgttttggcagaatctggctggctacaagagacaggaagccctgagaccatacctgagcagcgaggaagatcggaagaagggaaagaaattcgctcggtaccagctgggcgacctgctgctgcacctggaaaagaagcacggcgaggactggggaaaggtgtacgacgaggcctgggagcggattgacaagaaagtggaaggcctgagcaagcacatcaagctggaagaggaacggagaagcgaggacgcccagagcaaggccgccctgaccgactggctgcgggctaaggccagcttcgtgatcgagggcctgaaggaggccgacaaggacgagttctgcagatgcgagctgaagctgcagaagtggtacggggacctgcggggaaagcccttcgccatcgaagccgagaacagcatcctggacatcagcggcttcagcaagcagtacaactgtgccttcatctggcagaaggacggcgtgaagaagctgaacctgtacctgatcatcaactacttcaagggcggcaagctgcggttcaagaagatcaaacctgaagccttcgaagccaacagattctacaccgtgatcaacaaaaagagcggcgagatcgtgcccatggaggtgaacttcaacttcgacgaccccaacctgatcatcctgcctctggcctttggcaagagacagggcagagaattcatctggaacgacctgctgtccctggaaaccggcagcctgaagctggccaacggaagagtgatcgagaagacactgtacaacagaagaacccggcaggatgagcctgccctgttcgtggccctgaccttcgagcggcgggaggtcctggactcctccaatatcaaaccaatgaacctgatcggcgtggcaagaggcgaaaacatccccgccgtgatcgccctgaccgaccccgagggctgcccactgagccggtttaaggatagcctgggaaacccaacccacatcctgagaatcggcgagagctataaggagaagcagcggaccatccaggccaagaaggaggtggagcagcggagagccggcggctacagccggaagtacgccagcaaagccaagaatctggcagacgatatggtgagaaacaccgctagagatctgctgtactacgccgtgacccaggatgccatgctgatcttcgccaacctgagccggggcttcggccggcagggcaagcggaccttcatggccgagagacagtacacacggatggaggactggctgaccgccaagctggcctacgagggcctgagcaagacctacctgtccaagacactggcccagtacacctccaagacatgcagcaactgtgggtttaccatcaccagcgccgactacgacagggtgctggagaagctgaagaagacagcaacaggctggatgaccacaattaacggcaaggagctgaaggtggagggccagattacctactacaacagatacaagagacagaacgtagtcaaggacctgtccgtcgagctggatagactgagcgaagaatctgtgaacaacgacatctcctcctggacaaagggcagaagcggagaagctctgagcctcctgaagaaaagattctcccatagacccgtgcaggagaagttcgtgtgcctgaactgcggcttcgagacacacgcagccgagcaagccgccctgaacatcgccagatcctggctgttcctgcggagccaggagtacaagaaataccagacaaacaagacaaccggcaacaccgataagagagccttcgtcgagacctggcagtccttttaccggaagaagcttaaggaggtgtggaaacctgccgtgcggtctggcggatctggcggaggctccacaagcgaggagctgcccgtggtgttcgaggacgtggccgtgtacttcaccagggaggagtggggcatgctggtgaagaggcagaaggagctgtacagggacgtgatgaggatgaactacgagctgctggccagcctgggccccgccgccgccaagcccgacctgatcctgaagctggagaggagggccgccccctggatcaaggaccccaacggccccaagtggggcaagggcaggccccccggcaagaccagccccaagaaaaagagaaaagtctaagctgccttctgcggggcttgccttctggccatgcccttcttctctcccttgcacctgtacctcttggtctttgaataaagcctgagtaggaaggctagcaaaaaaaaaaaaaaaaaaaaaaaaaaaaaaaaaaaaaaaaaaaaaaaaaaaaaaaaaaaaaaaaaaaaaaaaaaaaaaaa

SEQ ID NO: 6162 - RNA, 5797 nt, synthetic construct
  source 1..5797: mol_type = other RNA
aggaaataagagagaaaagaagagtaagaagaaatataagagccaccatggcccctaagaagaagcgtaaagtgagccggatggaacgcctcgtctacgaggtgcggcagaagtgcagaaacatcgaggacatctgcatctcctgcggatctctgaacgtgaccctggagcacccactgttcatcggcggcatgtgccagaactgtaaaaactgttttctggagtgtgcctatcaatacgacgatgacggctaccagagctactgcaccatctgttgcggcggaagagaggtgctgatgtgtggaaataacaactgctgccggtgcttctgcgtggaatgcgtggacctgctggtgggccccggcgccgcccaggccgctattaaggaagatccttggaactgctacatgtgcggccacaagggcacatacggcctgctgagacggagagaggactggcctagcagactgcagatgttcttcgccaataaccacgaccaggagttcgacccccctaaggtgtaccctcccgtccccgccgagaagagaaagcccatccgggtcctgagcctgttcgatggcatcgccaccggtctgctggtgctgaaggacctgggcatccaggtggataggtacattgcctccgaggtgtgcgaggactccatcaccgtgggaatggtgcgtcatcagggcaagatcatgtacgtgggcgacgtgcggagcgtgacacagaagcatatccaggagtggggccctttcgacctggtgatcggcggcagcccttgcaatgacctgagcatcgtgaacccagcccggaagggcctgtacgagggaaccggcagactgttcttcgagttttacagactgctgcacgacgcccggcctaaggaaggcgacgaccggcccttcttttggctgttcgagaatgtggtggccatgggagtcagcgacaagcgggatattagccggttcctggagagcaaccccgtgatgatcgatgccaaggaagtgagcgccgcccaccgggccagatacttctggggcaatctgcctggcatgaacagacccctggccagcaccgtgaacgacaagctggagctgcaggagtgcctggagcacggccggatcgccaagttcagcaaggtgagaaccatcaccacccgaagcaacagcatcaaacaaggcaaggaccagcactttcctgtgttcatgaacgagaaggaggacatcctgtggtgtaccgagatggagagagtgttcgggttcccagtccactacacagatgtcagcaacatgtctagactggccagacagagactgctgggaagaagctggtccgtccctgtgatcagacacctgttcgcccctctgaaggagtacttcgcctgcgtgagcagcggcaacagcaacgccaacagccggggccccagcttctctagcggcctggtgccactgtccctgagagggagccacatgggccccatggagatctacaaaaccgtgagcgcctggaagcggcagcctgtgcgcgtgctgagcctgtttcggaatatcgataaagtcctgaaaagcctgggattcctggagagcggctctggctccggcggtggcaccctgaagtacgtggaggatgtgacaaacgtggtcagacgggatgtggagaagtggggccccttcgatctggtgtacggcagcacccaacccctgggcagctcttgtgaccggtgccctggctggtacatgtttcagttccaccggatcctgcagtacgccctgccgagacaggagtcccagcggccattcttttggattttcatggacaacttgctgctgaccgaggatgaccaggaaactaccactcggttcctgcagaccgaagccgtgaccctgcaggacgtgagaggccgggactaccagaacgccatgcgggtgtggtccaacatccctggactgaaaagcaagcacgcacctctgacccctaaagaagaggagtacctgcaggcccaggtgcggagcagaagcaagctggacgcccctaaggtggatctgctggtgaagaattgcctcctgcccctgagagagtacttcaagtatttcagccagaatagtctgcccctgggcggcccaagcagcggcgcccctcctcccagcggcggcagcccagccggctccccaacctctaccgaggagggcacctctgagtccgccacccccgagagcggccctggcacctccaccgagcccagcgagggcagcgcacccggcagccctgccggcagccccacctccacagaggagggaaccagcaccgagcccagcgaaggcagcgccccaggcaccagcaccgagcctagtgagggcggctctggcggcggcagcgcccaggagattaaacggatcaacaagatcagaagaagacttgtgaaagacagcaacaccaagaaggccggcaagacaggccccatgaaaaccctgctggttagagtgatgacacccgatctgagagagcggctggaaaacctgagaaagaagcctgaaaatatcccccagcccatcagcaatacatctagagccaacctgaataagctgctgaccgattacaccgaaatgaagaaggcgatcctgcatgtgtactgggaagagttccagaaggaccctgtgggcctgatgagccgggtggcccagcctgccagcaagaagatcgatcagaacaagctgaaacctgagatggacgagaagggcaacctgaccaccgccggctttgcctgctctcagtgtggccagcccctgttcgtgtacaagctggagcaggtgtctgagaagggcaaggcttacaccaactacttcggacggtgcaatgtggccgagcacgaaaagctgatcctgctggcccagctgaagcccgagaaggatagcgacgaagccgtgacatatagcctgggaaagtttgggcagagggccctggatttctacagcattcatgtgaccaaggagtccacccaccccgtgaagcccctggcccagatcgccggaaacagatacgcctccggacctgtgggaaaggccctgagcgacgcatgtatgggcacaatcgcctccttcctgtctaagtaccaggacatcatcatcgaacaccagaaggtggtgaagggcaaccagaagagactggagagcctgcgggagctggccggcaaggaaaacctggaataccctagcgtgaccctgccacctcagcctcacaccaaggagggcgttgatgcctacaacgaagtgatcgcccgggtgcgaatgtgggtgaacctgaacctgtggcagaagctgaagctaagcagagatgatgccaagcctctgctgagactgaagggattcccttcctttcctctggtcgagagacaggccaacgaagtggactggtgggacatggtgtgtaacgtgaagaagctgatcaacgagaaaaaggaggatggcaaggtgttttggcagaatctggctggctacaagagacaggaagccctgagaccatacctgagcagcgaggaagatcggaagaagggaaagaaattcgctcggtaccagctgggcgacctgctgctgcacctggaaaagaagcacggcgaggactggggaaaggtgtacgacgaggcctgggagcggattgacaagaaagtggaaggcctgagcaagcacatcaagctggaagaggaacggagaagcgaggacgcccagagcaaggccgccctgaccgactggctgcgggctaaggccagcttcgtgatcgagggcctgaaggaggccgacaaggacgagttctgcagatgcgagctgaagctgcagaagtggtacggggacctgcggggaaagcccttcgccatcgaagccgagaacagcatcctggacatcagcggcttcagcaagcagtacaactgtgccttcatctggcagaaggacggcgtgaagaagctgaacctgtacctgatcatcaactacttcaagggcggcaagctgcggttcaagaagatcaaacctgaagccttcgaagccaacagattctacaccgtgatcaacaaaaagagcggcgagatcgtgcccatggaggtgaacttcaacttcgacgaccccaacctgatcatcctgcctctggcctttggcaagagacagggcagagaattcatctggaacgacctgctgtccctggaaaccggcagcctgaagctggccaacggaagagtgatcgagaagacactgtacaacagaagaacccggcaggatgagcctgccctgttcgtggccctgaccttcgagcggcgggaggtcctggactcctccaatatcaaaccaatgaacctgatcggcgtggcaagaggcgaaaacatccccgccgtgatcgccctgaccgaccccgagggctgcccactgagccggtttaaggatagcctgggaaacccaacccacatcctgagaatcggcgagagctataaggagaagcagcggaccatccaggccaagaaggaggtggagcagcggagagccggcggctacagccggaagtacgccagcaaagccaagaatctggcagacgatatggtgagaaacaccgctagagatctgctgtactacgccgtgacccaggatgccatgctgatcttcgccaacctgagccggggcttcggccggcagggcaagcggaccttcatggccgagagacagtacacacggatggaggactggctgaccgccaagctggcctacgagggcctgagcaagacctacctgtccaagacactggcccagtacacctccaagacatgcagcaactgtgggtttaccatcaccagcgccgactacgacagggtgctggagaagctgaagaagacagcaacaggctggatgaccacaattaacggcaaggagctgaaggtggagggccagattacctactacaacagatacaagagacagaacgtagtcaaggacctgtccgtcgagctggatagactgagcgaagaatctgtgaacaacgacatctcctcctggacaaagggcagaagcggagaagctctgagcctcctgaagaaaagattctcccatagacccgtgcaggagaagttcgtgtgcctgaactgcggcttcgagacacacgcagccgagcaagccgccctgaacatcgccagatcctggctgttcctgcggagccaggagtacaagaaataccagacaaacaagacaaccggcaacaccgataagagagccttcgtcgagacctggcagtccttttaccggaagaagcttaaggaggtgtggaaacctgccgtgcggtctggcggatctggcggaggctccacaagcatggccgccgtgagccccaccaccaggtgccaggagagcgtgaccttcgaggacgtggccgtggtgttcaccgacgaggagtggagccacctggtgcccacccagagggacctgtacaaggaggtgatgctggagaactacaacagcatcgtgagcctgggcctgcccgtgccccagcccgacgtgatcttccagctgaagaggggcgacaagccctggatggtggacctgcacggcagcgagaccagccccaagaaaaagagaaaagtctaagctgccttctgcggggcttgccttctggccatgcccttcttctctcccttgcacctgtacctcttggtctttgaataaagcctgagtaggaaggctagcaaaaaaaaaaaaaaaaaaaaaaaaaaaaaaaaaaaaaaaaaaaaaaaaaaaaaaaaaaaaaaaaaaaaaaaaaaaaaaaa

SEQ ID NO: 6163 - RNA, 5797 nt, synthetic construct
  source 1..5797: mol_type = other RNA
aggaaataagagagaaaagaagagtaagaagaaatataagagccaccatggcccctaagaagaagcgtaaagtgagccggatggaacgcctcgtctacgaggtgcggcagaagtgcagaaacatcgaggacatctgcatctcctgcggatctctgaacgtgaccctggagcacccactgttcatcggcggcatgtgccagaactgtaaaaactgttttctggagtgtgcctatcaatacgacgatgacggctaccagagctactgcaccatctgttgcggcggaagagaggtgctgatgtgtggaaataacaactgctgccggtgcttctgcgtggaatgcgtggacctgctggtgggccccggcgccgcccaggccgctattaaggaagatccttggaactgctacatgtgcggccacaagggcacatacggcctgctgagacggagagaggactggcctagcagactgcagatgttcttcgccaataaccacgaccaggagttcgacccccctaaggtgtaccctcccgtccccgccgagaagagaaagcccatccgggtcctgagcctgttcgatggcatcgccaccggtctgctggtgctgaaggacctgggcatccaggtggataggtacattgcctccgaggtgtgcgaggactccatcaccgtgggaatggtgcgtcatcagggcaagatcatgtacgtgggcgacgtgcggagcgtgacacagaagcatatccaggagtggggccctttcgacctggtgatcggcggcagcccttgcaatgacctgagcatcgtgaacccagcccggaagggcctgtacgagggaaccggcagactgttcttcgagttttacagactgctgcacgacgcccggcctaaggaaggcgacgaccggcccttcttttggctgttcgagaatgtggtggccatgggagtcagcgacaagcgggatattagccggttcctggagagcaaccccgtgatgatcgatgccaaggaagtgagcgccgcccaccgggccagatacttctggggcaatctgcctggcatgaacagacccctggccagcaccgtgaacgacaagctggagctgcaggagtgcctggagcacggccggatcgccaagttcagcaaggtgagaaccatcaccacccgaagcaacagcatcaaacaaggcaaggaccagcactttcctgtgttcatgaacgagaaggaggacatcctgtggtgtaccgagatggagagagtgttcgggttcccagtccactacacagatgtcagcaacatgtctagactggccagacagagactgctgggaagaagctggtccgtccctgtgatcagacacctgttcgcccctctgaaggagtacttcgcctgcgtgagcagcggcaacagcaacgccaacagccggggccccagcttctctagcggcctggtgccactgtccctgagagggagccacatgggccccatggagatctacaaaaccgtgagcgcctggaagcggcagcctgtgcgcgtgctgagcctgtttcggaatatcgataaagtcctgaaaagcctgggattcctggagagcggctctggctccggcggtggcaccctgaagtacgtggaggatgtgacaaacgtggtcagacgggatgtggagaagtggggccccttcgatctggtgtacggcagcacccaacccctgggcagctcttgtgaccggtgccctggctggtacatgtttcagttccaccggatcctgcagtacgccctgccgagacaggagtcccagcggccattcttttggattttcatggacaacttgctgctgaccgaggatgaccaggaaactaccactcggttcctgcagaccgaagccgtgaccctgcaggacgtgagaggccgggactaccagaacgccatgcgggtgtggtccaacatccctggactgaaaagcaagcacgcacctctgacccctaaagaagaggagtacctgcaggcccaggtgcggagcagaagcaagctggacgcccctaaggtggatctgctggtgaagaattgcctcctgcccctgagagagtacttcaagtatttcagccagaatagtctgcccctgggcggcccaagcagcggcgcccctcctcccagcggcggcagcccagccggctccccaacctctaccgaggagggcacctctgagtccgccacccccgagagcggccctggcacctccaccgagcccagcgagggcagcgcacccggcagccctgccggcagccccacctccacagaggagggaaccagcaccgagcccagcgaaggcagcgccccaggcaccagcaccgagcctagtgagggcggctctggcggcggcagcgcccaggagattaaacggatcaacaagatcagaagaagacttgtgaaagacagcaacaccaagaaggccggcaagacaggccccatgaaaaccctgctggttagagtgatgacacccgatctgagagagcggctggaaaacctgagaaagaagcctgaaaatatcccccagcccatcagcaatacatctagagccaacctgaataagctgctgaccgattacaccgaaatgaagaaggcgatcctgcatgtgtactgggaagagttccagaaggaccctgtgggcctgatgagccgggtggcccagcctgccagcaagaagatcgatcagaacaagctgaaacctgagatggacgagaagggcaacctgaccaccgccggctttgcctgctctcagtgtggccagcccctgttcgtgtacaagctggagcaggtgtctgagaagggcaaggcttacaccaactacttcggacggtgcaatgtggccgagcacgaaaagctgatcctgctggcccagctgaagcccgagaaggatagcgacgaagccgtgacatatagcctgggaaagtttgggcagagggccctggatttctacagcattcatgtgaccaaggagtccacccaccccgtgaagcccctggcccagatcgccggaaacagatacgcctccggacctgtgggaaaggccctgagcgacgcatgtatgggcacaatcgcctccttcctgtctaagtaccaggacatcatcatcgaacaccagaaggtggtgaagggcaaccagaagagactggagagcctgcgggagctggccggcaaggaaaacctggaataccctagcgtgaccctgccacctcagcctcacaccaaggagggcgttgatgcctacaacgaagtgatcgcccgggtgcgaatgtgggtgaacctgaacctgtggcagaagctgaagctaagcagagatgatgccaagcctctgctgagactgaagggattcccttcctttcctctggtcgagagacaggccaacgaagtggactggtgggacatggtgtgtaacgtgaagaagctgatcaacgagaaaaaggaggatggcaaggtgttttggcagaatctggctggctacaagagacaggaagccctgagaccatacctgagcagcgaggaagatcggaagaagggaaagaaattcgctcggtaccagctgggcgacctgctgctgcacctggaaaagaagcacggcgaggactggggaaaggtgtacgacgaggcctgggagcggattgacaagaaagtggaaggcctgagcaagcacatcaagctggaagaggaacggagaagcgaggacgcccagagcaaggccgccctgaccgactggctgcgggctaaggccagcttcgtgatcgagggcctgaaggaggccgacaaggacgagttctgcagatgcgagctgaagctgcagaagtggtacggggacctgcggggaaagcccttcgccatcgaagccgagaacagcatcctggacatcagcggcttcagcaagcagtacaactgtgccttcatctggcagaaggacggcgtgaagaagctgaacctgtacctgatcatcaactacttcaagggcggcaagctgcggttcaagaagatcaaacctgaagccttcgaagccaacagattctacaccgtgatcaacaaaaagagcggcgagatcgtgcccatggaggtgaacttcaacttcgacgaccccaacctgatcatcctgcctctggcctttggcaagagacagggcagagaattcatctggaacgacctgctgtccctggaaaccggcagcctgaagctggccaacggaagagtgatcgagaagacactgtacaacagaagaacccggcaggatgagcctgccctgttcgtggccctgaccttcgagcggcgggaggtcctggactcctccaatatcaaaccaatgaacctgatcggcgtggcaagaggcgaaaacatccccgccgtgatcgccctgaccgaccccgagggctgcccactgagccggtttaaggatagcctgggaaacccaacccacatcctgagaatcggcgagagctataaggagaagcagcggaccatccaggccaagaaggaggtggagcagcggagagccggcggctacagccggaagtacgccagcaaagccaagaatctggcagacgatatggtgagaaacaccgctagagatctgctgtactacgccgtgacccaggatgccatgctgatcttcgccaacctgagccggggcttcggccggcagggcaagcggaccttcatggccgagagacagtacacacggatggaggactggctgaccgccaagctggcctacgagggcctgagcaagacctacctgtccaagacactggcccagtacacctccaagacatgcagcaactgtgggtttaccatcaccagcgccgactacgacagggtgctggagaagctgaagaagacagcaacaggctggatgaccacaattaacggcaaggagctgaaggtggagggccagattacctactacaacagatacaagagacagaacgtagtcaaggacctgtccgtcgagctggatagactgagcgaagaatctgtgaacaacgacatctcctcctggacaaagggcagaagcggagaagctctgagcctcctgaagaaaagattctcccatagacccgtgcaggagaagttcgtgtgcctgaactgcggcttcgagacacacgcagccgagcaagccgccctgaacatcgccagatcctggctgttcctgcggagccaggagtacaagaaataccagacaaacaagacaaccggcaacaccgataagagagccttcgtcgagacctggcagtccttttaccggaagaagcttaaggaggtgtggaaacctgccgtgcggtctggcggatctggcggaggctccacaagcgcccaggtgagcgtgaccttcgacgacgtggccgtgaccttcacccaggaggagtggggccacctggagcccgcccagaggaccctgtaccaggaggtgatgctggagacctgcaggctgctgatgagcctgggctgccccgtgcccaggcccgagctgatctaccagctggagcacggccaggagctgtggaccgtgaagagggacctgagcaggagcacctgccccggctacagcagcgagaccagccccaagaaaaagagaaaagtctaagctgccttctgcggggcttgccttctggccatgcccttcttctctcccttgcacctgtacctcttggtctttgaataaagcctgagtaggaaggctagcaaaaaaaaaaaaaaaaaaaaaaaaaaaaaaaaaaaaaaaaaaaaaaaaaaaaaaaaaaaaaaaaaaaaaaaaaaaaaaaa

SEQ ID NO: 6164 - RNA, 5797 nt, synthetic construct
  source 1..5797: mol_type = other RNA
aggaaataagagagaaaagaagagtaagaagaaatataagagccaccatggcccctaagaagaagcgtaaagtgagccggatggaacgcctcgtctacgaggtgcggcagaagtgcagaaacatcgaggacatctgcatctcctgcggatctctgaacgtgaccctggagcacccactgttcatcggcggcatgtgccagaactgtaaaaactgttttctggagtgtgcctatcaatacgacgatgacggctaccagagctactgcaccatctgttgcggcggaagagaggtgctgatgtgtggaaataacaactgctgccggtgcttctgcgtggaatgcgtggacctgctggtgggccccggcgccgcccaggccgctattaaggaagatccttggaactgctacatgtgcggccacaagggcacatacggcctgctgagacggagagaggactggcctagcagactgcagatgttcttcgccaataaccacgaccaggagttcgacccccctaaggtgtaccctcccgtccccgccgagaagagaaagcccatccgggtcctgagcctgttcgatggcatcgccaccggtctgctggtgctgaaggacctgggcatccaggtggataggtacattgcctccgaggtgtgcgaggactccatcaccgtgggaatggtgcgtcatcagggcaagatcatgtacgtgggcgacgtgcggagcgtgacacagaagcatatccaggagtggggccctttcgacctggtgatcggcggcagcccttgcaatgacctgagcatcgtgaacccagcccggaagggcctgtacgagggaaccggcagactgttcttcgagttttacagactgctgcacgacgcccggcctaaggaaggcgacgaccggcccttcttttggctgttcgagaatgtggtggccatgggagtcagcgacaagcgggatattagccggttcctggagagcaaccccgtgatgatcgatgccaaggaagtgagcgccgcccaccgggccagatacttctggggcaatctgcctggcatgaacagacccctggccagcaccgtgaacgacaagctggagctgcaggagtgcctggagcacggccggatcgccaagttcagcaaggtgagaaccatcaccacccgaagcaacagcatcaaacaaggcaaggaccagcactttcctgtgttcatgaacgagaaggaggacatcctgtggtgtaccgagatggagagagtgttcgggttcccagtccactacacagatgtcagcaacatgtctagactggccagacagagactgctgggaagaagctggtccgtccctgtgatcagacacctgttcgcccctctgaaggagtacttcgcctgcgtgagcagcggcaacagcaacgccaacagccggggccccagcttctctagcggcctggtgccactgtccctgagagggagccacatgggccccatggagatctacaaaaccgtgagcgcctggaagcggcagcctgtgcgcgtgctgagcctgtttcggaatatcgataaagtcctgaaaagcctgggattcctggagagcggctctggctccggcggtggcaccctgaagtacgtggaggatgtgacaaacgtggtcagacgggatgtggagaagtggggccccttcgatctggtgtacggcagcacccaacccctgggcagctcttgtgaccggtgccctggctggtacatgtttcagttccaccggatcctgcagtacgccctgccgagacaggagtcccagcggccattcttttggattttcatggacaacttgctgctgaccgaggatgaccaggaaactaccactcggttcctgcagaccgaagccgtgaccctgcaggacgtgagaggccgggactaccagaacgccatgcgggtgtggtccaacatccctggactgaaaagcaagcacgcacctctgacccctaaagaagaggagtacctgcaggcccaggtgcggagcagaagcaagctggacgcccctaaggtggatctgctggtgaagaattgcctcctgcccctgagagagtacttcaagtatttcagccagaatagtctgcccctgggcggcccaagcagcggcgcccctcctcccagcggcggcagcccagccggctccccaacctctaccgaggagggcacctctgagtccgccacccccgagagcggccctggcacctccaccgagcccagcgagggcagcgcacccggcagccctgccggcagccccacctccacagaggagggaaccagcaccgagcccagcgaaggcagcgccccaggcaccagcaccgagcctagtgagggcggctctggcggcggcagcgcccaggagattaaacggatcaacaagatcagaagaagacttgtgaaagacagcaacaccaagaaggccggcaagacaggccccatgaaaaccctgctggttagagtgatgacacccgatctgagagagcggctggaaaacctgagaaagaagcctgaaaatatcccccagcccatcagcaatacatctagagccaacctgaataagctgctgaccgattacaccgaaatgaagaaggcgatcctgcatgtgtactgggaagagttccagaaggaccctgtgggcctgatgagccgggtggcccagcctgccagcaagaagatcgatcagaacaagctgaaacctgagatggacgagaagggcaacctgaccaccgccggctttgcctgctctcagtgtggccagcccctgttcgtgtacaagctggagcaggtgtctgagaagggcaaggcttacaccaactacttcggacggtgcaatgtggccgagcacgaaaagctgatcctgctggcccagctgaagcccgagaaggatagcgacgaagccgtgacatatagcctgggaaagtttgggcagagggccctggatttctacagcattcatgtgaccaaggagtccacccaccccgtgaagcccctggcccagatcgccggaaacagatacgcctccggacctgtgggaaaggccctgagcgacgcatgtatgggcacaatcgcctccttcctgtctaagtaccaggacatcatcatcgaacaccagaaggtggtgaagggcaaccagaagagactggagagcctgcgggagctggccggcaaggaaaacctggaataccctagcgtgaccctgccacctcagcctcacaccaaggagggcgttgatgcctacaacgaagtgatcgcccgggtgcgaatgtgggtgaacctgaacctgtggcagaagctgaagctaagcagagatgatgccaagcctctgctgagactgaagggattcccttcctttcctctggtcgagagacaggccaacgaagtggactggtgggacatggtgtgtaacgtgaagaagctgatcaacgagaaaaaggaggatggcaaggtgttttggcagaatctggctggctacaagagacaggaagccctgagaccatacctgagcagcgaggaagatcggaagaagggaaagaaattcgctcggtaccagctgggcgacctgctgctgcacctggaaaagaagcacggcgaggactggggaaaggtgtacgacgaggcctgggagcggattgacaagaaagtggaaggcctgagcaagcacatcaagctggaagaggaacggagaagcgaggacgcccagagcaaggccgccctgaccgactggctgcgggctaaggccagcttcgtgatcgagggcctgaaggaggccgacaaggacgagttctgcagatgcgagctgaagctgcagaagtggtacggggacctgcggggaaagcccttcgccatcgaagccgagaacagcatcctggacatcagcggcttcagcaagcagtacaactgtgccttcatctggcagaaggacggcgtgaagaagctgaacctgtacctgatcatcaactacttcaagggcggcaagctgcggttcaagaagatcaaacctgaagccttcgaagccaacagattctacaccgtgatcaacaaaaagagcggcgagatcgtgcccatggaggtgaacttcaacttcgacgaccccaacctgatcatcctgcctctggcctttggcaagagacagggcagagaattcatctggaacgacctgctgtccctggaaaccggcagcctgaagctggccaacggaagagtgatcgagaagacactgtacaacagaagaacccggcaggatgagcctgccctgttcgtggccctgaccttcgagcggcgggaggtcctggactcctccaatatcaaaccaatgaacctgatcggcgtggcaagaggcgaaaacatccccgccgtgatcgccctgaccgaccccgagggctgcccactgagccggtttaaggatagcctgggaaacccaacccacatcctgagaatcggcgagagctataaggagaagcagcggaccatccaggccaagaaggaggtggagcagcggagagccggcggctacagccggaagtacgccagcaaagccaagaatctggcagacgatatggtgagaaacaccgctagagatctgctgtactacgccgtgacccaggatgccatgctgatcttcgccaacctgagccggggcttcggccggcagggcaagcggaccttcatggccgagagacagtacacacggatggaggactggctgaccgccaagctggcctacgagggcctgagcaagacctacctgtccaagacactggcccagtacacctccaagacatgcagcaactgtgggtttaccatcaccagcgccgactacgacagggtgctggagaagctgaagaagacagcaacaggctggatgaccacaattaacggcaaggagctgaaggtggagggccagattacctactacaacagatacaagagacagaacgtagtcaaggacctgtccgtcgagctggatagactgagcgaagaatctgtgaacaacgacatctcctcctggacaaagggcagaagcggagaagctctgagcctcctgaagaaaagattctcccatagacccgtgcaggagaagttcgtgtgcctgaactgcggcttcgagacacacgcagccgagcaagccgccctgaacatcgccagatcctggctgttcctgcggagccaggagtacaagaaataccagacaaacaagacaaccggcaacaccgataagagagccttcgtcgagacctggcagtccttttaccggaagaagcttaaggaggtgtggaaacctgccgtgcggtctggcggatctggcggaggctccacaagcccccaggtgctggtgagcttcgaggacgtggccgtgttcctgagcagggaggagtggggctgcctgggccccgcccagaggggcctgtacagcaacgtgatgctggagacctacaggaacctgatcagcctgggcctgcagggcagcaagcccgacgtgatcagcaggctggagaagggcgaggagccctgggccccctacagccccaagatcgaggagggctggatcaggagccacaggagcaccagccccaagaaaaagagaaaagtctaagctgccttctgcggggcttgccttctggccatgcccttcttctctcccttgcacctgtacctcttggtctttgaataaagcctgagtaggaaggctagcaaaaaaaaaaaaaaaaaaaaaaaaaaaaaaaaaaaaaaaaaaaaaaaaaaaaaaaaaaaaaaaaaaaaaaaaaaaaaaaa

SEQ ID NO: 6165 - RNA, 5797 nt, synthetic construct
  source 1..5797: mol_type = other RNA
aggaaataagagagaaaagaagagtaagaagaaatataagagccaccatggcccctaagaagaagcgtaaagtgagccggatggaacgcctcgtctacgaggtgcggcagaagtgcagaaacatcgaggacatctgcatctcctgcggatctctgaacgtgaccctggagcacccactgttcatcggcggcatgtgccagaactgtaaaaactgttttctggagtgtgcctatcaatacgacgatgacggctaccagagctactgcaccatctgttgcggcggaagagaggtgctgatgtgtggaaataacaactgctgccggtgcttctgcgtggaatgcgtggacctgctggtgggccccggcgccgcccaggccgctattaaggaagatccttggaactgctacatgtgcggccacaagggcacatacggcctgctgagacggagagaggactggcctagcagactgcagatgttcttcgccaataaccacgaccaggagttcgacccccctaaggtgtaccctcccgtccccgccgagaagagaaagcccatccgggtcctgagcctgttcgatggcatcgccaccggtctgctggtgctgaaggacctgggcatccaggtggataggtacattgcctccgaggtgtgcgaggactccatcaccgtgggaatggtgcgtcatcagggcaagatcatgtacgtgggcgacgtgcggagcgtgacacagaagcatatccaggagtggggccctttcgacctggtgatcggcggcagcccttgcaatgacctgagcatcgtgaacccagcccggaagggcctgtacgagggaaccggcagactgttcttcgagttttacagactgctgcacgacgcccggcctaaggaaggcgacgaccggcccttcttttggctgttcgagaatgtggtggccatgggagtcagcgacaagcgggatattagccggttcctggagagcaaccccgtgatgatcgatgccaaggaagtgagcgccgcccaccgggccagatacttctggggcaatctgcctggcatgaacagacccctggccagcaccgtgaacgacaagctggagctgcaggagtgcctggagcacggccggatcgccaagttcagcaaggtgagaaccatcaccacccgaagcaacagcatcaaacaaggcaaggaccagcactttcctgtgttcatgaacgagaaggaggacatcctgtggtgtaccgagatggagagagtgttcgggttcccagtccactacacagatgtcagcaacatgtctagactggccagacagagactgctgggaagaagctggtccgtccctgtgatcagacacctgttcgcccctctgaaggagtacttcgcctgcgtgagcagcggcaacagcaacgccaacagccggggccccagcttctctagcggcctggtgccactgtccctgagagggagccacatgggccccatggagatctacaaaaccgtgagcgcctggaagcggcagcctgtgcgcgtgctgagcctgtttcggaatatcgataaagtcctgaaaagcctgggattcctggagagcggctctggctccggcggtggcaccctgaagtacgtggaggatgtgacaaacgtggtcagacgggatgtggagaagtggggccccttcgatctggtgtacggcagcacccaacccctgggcagctcttgtgaccggtgccctggctggtacatgtttcagttccaccggatcctgcagtacgccctgccgagacaggagtcccagcggccattcttttggattttcatggacaacttgctgctgaccgaggatgaccaggaaactaccactcggttcctgcagaccgaagccgtgaccctgcaggacgtgagaggccgggactaccagaacgccatgcgggtgtggtccaacatccctggactgaaaagcaagcacgcacctctgacccctaaagaagaggagtacctgcaggcccaggtgcggagcagaagcaagctggacgcccctaaggtggatctgctggtgaagaattgcctcctgcccctgagagagtacttcaagtatttcagccagaatagtctgcccctgggcggcccaagcagcggcgcccctcctcccagcggcggcagcccagccggctccccaacctctaccgaggagggcacctctgagtccgccacccccgagagcggccctggcacctccaccgagcccagcgagggcagcgcacccggcagccctgccggcagccccacctccacagaggagggaaccagcaccgagcccagcgaaggcagcgccccaggcaccagcaccgagcctagtgagggcggctctggcggcggcagcgcccaggagattaaacggatcaacaagatcagaagaagacttgtgaaagacagcaacaccaagaaggccggcaagacaggccccatgaaaaccctgctggttagagtgatgacacccgatctgagagagcggctggaaaacctgagaaagaagcctgaaaatatcccccagcccatcagcaatacatctagagccaacctgaataagctgctgaccgattacaccgaaatgaagaaggcgatcctgcatgtgtactgggaagagttccagaaggaccctgtgggcctgatgagccgggtggcccagcctgccagcaagaagatcgatcagaacaagctgaaacctgagatggacgagaagggcaacctgaccaccgccggctttgcctgctctcagtgtggccagcccctgttcgtgtacaagctggagcaggtgtctgagaagggcaaggcttacaccaactacttcggacggtgcaatgtggccgagcacgaaaagctgatcctgctggcccagctgaagcccgagaaggatagcgacgaagccgtgacatatagcctgggaaagtttgggcagagggccctggatttctacagcattcatgtgaccaaggagtccacccaccccgtgaagcccctggcccagatcgccggaaacagatacgcctccggacctgtgggaaaggccctgagcgacgcatgtatgggcacaatcgcctccttcctgtctaagtaccaggacatcatcatcgaacaccagaaggtggtgaagggcaaccagaagagactggagagcctgcgggagctggccggcaaggaaaacctggaataccctagcgtgaccctgccacctcagcctcacaccaaggagggcgttgatgcctacaacgaagtgatcgcccgggtgcgaatgtgggtgaacctgaacctgtggcagaagctgaagctaagcagagatgatgccaagcctctgctgagactgaagggattcccttcctttcctctggtcgagagacaggccaacgaagtggactggtgggacatggtgtgtaacgtgaagaagctgatcaacgagaaaaaggaggatggcaaggtgttttggcagaatctggctggctacaagagacaggaagccctgagaccatacctgagcagcgaggaagatcggaagaagggaaagaaattcgctcggtaccagctgggcgacctgctgctgcacctggaaaagaagcacggcgaggactggggaaaggtgtacgacgaggcctgggagcggattgacaagaaagtggaaggcctgagcaagcacatcaagctggaagaggaacggagaagcgaggacgcccagagcaaggccgccctgaccgactggctgcgggctaaggccagcttcgtgatcgagggcctgaaggaggccgacaaggacgagttctgcagatgcgagctgaagctgcagaagtggtacggggacctgcggggaaagcccttcgccatcgaagccgagaacagcatcctggacatcagcggcttcagcaagcagtacaactgtgccttcatctggcagaaggacggcgtgaagaagctgaacctgtacctgatcatcaactacttcaagggcggcaagctgcggttcaagaagatcaaacctgaagccttcgaagccaacagattctacaccgtgatcaacaaaaagagcggcgagatcgtgcccatggaggtgaacttcaacttcgacgaccccaacctgatcatcctgcctctggcctttggcaagagacagggcagagaattcatctggaacgacctgctgtccctggaaaccggcagcctgaagctggccaacggaagagtgatcgagaagacactgtacaacagaagaacccggcaggatgagcctgccctgttcgtggccctgaccttcgagcggcgggaggtcctggactcctccaatatcaaaccaatgaacctgatcggcgtggcaagaggcgaaaacatccccgccgtgatcgccctgaccgaccccgagggctgcccactgagccggtttaaggatagcctgggaaacccaacccacatcctgagaatcggcgagagctataaggagaagcagcggaccatccaggccaagaaggaggtggagcagcggagagccggcggctacagccggaagtacgccagcaaagccaagaatctggcagacgatatggtgagaaacaccgctagagatctgctgtactacgccgtgacccaggatgccatgctgatcttcgccaacctgagccggggcttcggccggcagggcaagcggaccttcatggccgagagacagtacacacggatggaggactggctgaccgccaagctggcctacgagggcctgagcaagacctacctgtccaagacactggcccagtacacctccaagacatgcagcaactgtgggtttaccatcaccagcgccgactacgacagggtgctggagaagctgaagaagacagcaacaggctggatgaccacaattaacggcaaggagctgaaggtggagggccagattacctactacaacagatacaagagacagaacgtagtcaaggacctgtccgtcgagctggatagactgagcgaagaatctgtgaacaacgacatctcctcctggacaaagggcagaagcggagaagctctgagcctcctgaagaaaagattctcccatagacccgtgcaggagaagttcgtgtgcctgaactgcggcttcgagacacacgcagccgagcaagccgccctgaacatcgccagatcctggctgttcctgcggagccaggagtacaagaaataccagacaaacaagacaaccggcaacaccgataagagagccttcgtcgagacctggcagtccttttaccggaagaagcttaaggaggtgtggaaacctgccgtgcggtctggcggatctggcggaggctccacaagccaggagatccccgtgagcttcaaggacgtggtggtgggcttcacccaggaggagtggcactggctgaaccccgtgcagagggccctgtacagggacgtgatgctggagacctacagcaacctggtgagcgtgggctacgagggcaccaagcccgacgtgatcctgaggctggagcaggaggaggccccctgggtgtgcgaggccccctgccccggctgctgctgctgggaggacatctggcagaccagccccaagaaaaagagaaaagtctaagctgccttctgcggggcttgccttctggccatgcccttcttctctcccttgcacctgtacctcttggtctttgaataaagcctgagtaggaaggctagcaaaaaaaaaaaaaaaaaaaaaaaaaaaaaaaaaaaaaaaaaaaaaaaaaaaaaaaaaaaaaaaaaaaaaaaaaaaaaaaa

SEQ ID NO: 6166 - RNA, 5797 nt, synthetic construct
  source 1..5797: mol_type = other RNA
aggaaataagagagaaaagaagagtaagaagaaatataagagccaccatggcccctaagaagaagcgtaaagtgagccggatggaacgcctcgtctacgaggtgcggcagaagtgcagaaacatcgaggacatctgcatctcctgcggatctctgaacgtgaccctggagcacccactgttcatcggcggcatgtgccagaactgtaaaaactgttttctggagtgtgcctatcaatacgacgatgacggctaccagagctactgcaccatctgttgcggcggaagagaggtgctgatgtgtggaaataacaactgctgccggtgcttctgcgtggaatgcgtggacctgctggtgggccccggcgccgcccaggccgctattaaggaagatccttggaactgctacatgtgcggccacaagggcacatacggcctgctgagacggagagaggactggcctagcagactgcagatgttcttcgccaataaccacgaccaggagttcgacccccctaaggtgtaccctcccgtccccgccgagaagagaaagcccatccgggtcctgagcctgttcgatggcatcgccaccggtctgctggtgctgaaggacctgggcatccaggtggataggtacattgcctccgaggtgtgcgaggactccatcaccgtgggaatggtgcgtcatcagggcaagatcatgtacgtgggcgacgtgcggagcgtgacacagaagcatatccaggagtggggccctttcgacctggtgatcggcggcagcccttgcaatgacctgagcatcgtgaacccagcccggaagggcctgtacgagggaaccggcagactgttcttcgagttttacagactgctgcacgacgcccggcctaaggaaggcgacgaccggcccttcttttggctgttcgagaatgtggtggccatgggagtcagcgacaagcgggatattagccggttcctggagagcaaccccgtgatgatcgatgccaaggaagtgagcgccgcccaccgggccagatacttctggggcaatctgcctggcatgaacagacccctggccagcaccgtgaacgacaagctggagctgcaggagtgcctggagcacggccggatcgccaagttcagcaaggtgagaaccatcaccacccgaagcaacagcatcaaacaaggcaaggaccagcactttcctgtgttcatgaacgagaaggaggacatcctgtggtgtaccgagatggagagagtgttcgggttcccagtccactacacagatgtcagcaacatgtctagactggccagacagagactgctgggaagaagctggtccgtccctgtgatcagacacctgttcgcccctctgaaggagtacttcgcctgcgtgagcagcggcaacagcaacgccaacagccggggccccagcttctctagcggcctggtgccactgtccctgagagggagccacatgggccccatggagatctacaaaaccgtgagcgcctggaagcggcagcctgtgcgcgtgctgagcctgtttcggaatatcgataaagtcctgaaaagcctgggattcctggagagcggctctggctccggcggtggcaccctgaagtacgtggaggatgtgacaaacgtggtcagacgggatgtggagaagtggggccccttcgatctggtgtacggcagcacccaacccctgggcagctcttgtgaccggtgccctggctggtacatgtttcagttccaccggatcctgcagtacgccctgccgagacaggagtcccagcggccattcttttggattttcatggacaacttgctgctgaccgaggatgaccaggaaactaccactcggttcctgcagaccgaagccgtgaccctgcaggacgtgagaggccgggactaccagaacgccatgcgggtgtggtccaacatccctggactgaaaagcaagcacgcacctctgacccctaaagaagaggagtacctgcaggcccaggtgcggagcagaagcaagctggacgcccctaaggtggatctgctggtgaagaattgcctcctgcccctgagagagtacttcaagtatttcagccagaatagtctgcccctgggcggcccaagcagcggcgcccctcctcccagcggcggcagcccagccggctccccaacctctaccgaggagggcacctctgagtccgccacccccgagagcggccctggcacctccaccgagcccagcgagggcagcgcacccggcagccctgccggcagccccacctccacagaggagggaaccagcaccgagcccagcgaaggcagcgccccaggcaccagcaccgagcctagtgagggcggctctggcggcggcagcgcccaggagattaaacggatcaacaagatcagaagaagacttgtgaaagacagcaacaccaagaaggccggcaagacaggccccatgaaaaccctgctggttagagtgatgacacccgatctgagagagcggctggaaaacctgagaaagaagcctgaaaatatcccccagcccatcagcaatacatctagagccaacctgaataagctgctgaccgattacaccgaaatgaagaaggcgatcctgcatgtgtactgggaagagttccagaaggaccctgtgggcctgatgagccgggtggcccagcctgccagcaagaagatcgatcagaacaagctgaaacctgagatggacgagaagggcaacctgaccaccgccggctttgcctgctctcagtgtggccagcccctgttcgtgtacaagctggagcaggtgtctgagaagggcaaggcttacaccaactacttcggacggtgcaatgtggccgagcacgaaaagctgatcctgctggcccagctgaagcccgagaaggatagcgacgaagccgtgacatatagcctgggaaagtttgggcagagggccctggatttctacagcattcatgtgaccaaggagtccacccaccccgtgaagcccctggcccagatcgccggaaacagatacgcctccggacctgtgggaaaggccctgagcgacgcatgtatgggcacaatcgcctccttcctgtctaagtaccaggacatcatcatcgaacaccagaaggtggtgaagggcaaccagaagagactggagagcctgcgggagctggccggcaaggaaaacctggaataccctagcgtgaccctgccacctcagcctcacaccaaggagggcgttgatgcctacaacgaagtgatcgcccgggtgcgaatgtgggtgaacctgaacctgtggcagaagctgaagctaagcagagatgatgccaagcctctgctgagactgaagggattcccttcctttcctctggtcgagagacaggccaacgaagtggactggtgggacatggtgtgtaacgtgaagaagctgatcaacgagaaaaaggaggatggcaaggtgttttggcagaatctggctggctacaagagacaggaagccctgagaccatacctgagcagcgaggaagatcggaagaagggaaagaaattcgctcggtaccagctgggcgacctgctgctgcacctggaaaagaagcacggcgaggactggggaaaggtgtacgacgaggcctgggagcggattgacaagaaagtggaaggcctgagcaagcacatcaagctggaagaggaacggagaagcgaggacgcccagagcaaggccgccctgaccgactggctgcgggctaaggccagcttcgtgatcgagggcctgaaggaggccgacaaggacgagttctgcagatgcgagctgaagctgcagaagtggtacggggacctgcggggaaagcccttcgccatcgaagccgagaacagcatcctggacatcagcggcttcagcaagcagtacaactgtgccttcatctggcagaaggacggcgtgaagaagctgaacctgtacctgatcatcaactacttcaagggcggcaagctgcggttcaagaagatcaaacctgaagccttcgaagccaacagattctacaccgtgatcaacaaaaagagcggcgagatcgtgcccatggaggtgaacttcaacttcgacgaccccaacctgatcatcctgcctctggcctttggcaagagacagggcagagaattcatctggaacgacctgctgtccctggaaaccggcagcctgaagctggccaacggaagagtgatcgagaagacactgtacaacagaagaacccggcaggatgagcctgccctgttcgtggccctgaccttcgagcggcgggaggtcctggactcctccaatatcaaaccaatgaacctgatcggcgtggcaagaggcgaaaacatccccgccgtgatcgccctgaccgaccccgagggctgcccactgagccggtttaaggatagcctgggaaacccaacccacatcctgagaatcggcgagagctataaggagaagcagcggaccatccaggccaagaaggaggtggagcagcggagagccggcggctacagccggaagtacgccagcaaagccaagaatctggcagacgatatggtgagaaacaccgctagagatctgctgtactacgccgtgacccaggatgccatgctgatcttcgccaacctgagccggggcttcggccggcagggcaagcggaccttcatggccgagagacagtacacacggatggaggactggctgaccgccaagctggcctacgagggcctgagcaagacctacctgtccaagacactggcccagtacacctccaagacatgcagcaactgtgggtttaccatcaccagcgccgactacgacagggtgctggagaagctgaagaagacagcaacaggctggatgaccacaattaacggcaaggagctgaaggtggagggccagattacctactacaacagatacaagagacagaacgtagtcaaggacctgtccgtcgagctggatagactgagcgaagaatctgtgaacaacgacatctcctcctggacaaagggcagaagcggagaagctctgagcctcctgaagaaaagattctcccatagacccgtgcaggagaagttcgtgtgcctgaactgcggcttcgagacacacgcagccgagcaagccgccctgaacatcgccagatcctggctgttcctgcggagccaggagtacaagaaataccagacaaacaagacaaccggcaacaccgataagagagccttcgtcgagacctggcagtccttttaccggaagaagcttaaggaggtgtggaaacctgccgtgcggtctggcggatctggcggaggctccacaagcagccagggcagcgtgaccttcagggacgtggccatcgacttcagccaggaggagtggaagtggctgcagcccgcccagagggacctgtacaggtgcgtgatgctggagaactacggccacctggtgagcctgggcctgagcatcagcaagcccgacgtggtgagcctgctggagcagggcaaggagccctggctgggcaagagggacgtgaagagggacctgttccccgccctgagcccccagaccagccccaagaaaaagagaaaagtctaagctgccttctgcggggcttgccttctggccatgcccttcttctctcccttgcacctgtacctcttggtctttgaataaagcctgagtaggaaggctagcaaaaaaaaaaaaaaaaaaaaaaaaaaaaaaaaaaaaaaaaaaaaaaaaaaaaaaaaaaaaaaaaaaaaaaaaaaaaaaaa

SEQ ID NO: 6167 - RNA, 5797 nt, synthetic construct
  source 1..5797: mol_type = other RNA
aggaaataagagagaaaagaagagtaagaagaaatataagagccaccatggcccctaagaagaagcgtaaagtgagccggatggaacgcctcgtctacgaggtgcggcagaagtgcagaaacatcgaggacatctgcatctcctgcggatctctgaacgtgaccctggagcacccactgttcatcggcggcatgtgccagaactgtaaaaactgttttctggagtgtgcctatcaatacgacgatgacggctaccagagctactgcaccatctgttgcggcggaagagaggtgctgatgtgtggaaataacaactgctgccggtgcttctgcgtggaatgcgtggacctgctggtgggccccggcgccgcccaggccgctattaaggaagatccttggaactgctacatgtgcggccacaagggcacatacggcctgctgagacggagagaggactggcctagcagactgcagatgttcttcgccaataaccacgaccaggagttcgacccccctaaggtgtaccctcccgtccccgccgagaagagaaagcccatccgggtcctgagcctgttcgatggcatcgccaccggtctgctggtgctgaaggacctgggcatccaggtggataggtacattgcctccgaggtgtgcgaggactccatcaccgtgggaatggtgcgtcatcagggcaagatcatgtacgtgggcgacgtgcggagcgtgacacagaagcatatccaggagtggggccctttcgacctggtgatcggcggcagcccttgcaatgacctgagcatcgtgaacccagcccggaagggcctgtacgagggaaccggcagactgttcttcgagttttacagactgctgcacgacgcccggcctaaggaaggcgacgaccggcccttcttttggctgttcgagaatgtggtggccatgggagtcagcgacaagcgggatattagccggttcctggagagcaaccccgtgatgatcgatgccaaggaagtgagcgccgcccaccgggccagatacttctggggcaatctgcctggcatgaacagacccctggccagcaccgtgaacgacaagctggagctgcaggagtgcctggagcacggccggatcgccaagttcagcaaggtgagaaccatcaccacccgaagcaacagcatcaaacaaggcaaggaccagcactttcctgtgttcatgaacgagaaggaggacatcctgtggtgtaccgagatggagagagtgttcgggttcccagtccactacacagatgtcagcaacatgtctagactggccagacagagactgctgggaagaagctggtccgtccctgtgatcagacacctgttcgcccctctgaaggagtacttcgcctgcgtgagcagcggcaacagcaacgccaacagccggggccccagcttctctagcggcctggtgccactgtccctgagagggagccacatgggccccatggagatctacaaaaccgtgagcgcctggaagcggcagcctgtgcgcgtgctgagcctgtttcggaatatcgataaagtcctgaaaagcctgggattcctggagagcggctctggctccggcggtggcaccctgaagtacgtggaggatgtgacaaacgtggtcagacgggatgtggagaagtggggccccttcgatctggtgtacggcagcacccaacccctgggcagctcttgtgaccggtgccctggctggtacatgtttcagttccaccggatcctgcagtacgccctgccgagacaggagtcccagcggccattcttttggattttcatggacaacttgctgctgaccgaggatgaccaggaaactaccactcggttcctgcagaccgaagccgtgaccctgcaggacgtgagaggccgggactaccagaacgccatgcgggtgtggtccaacatccctggactgaaaagcaagcacgcacctctgacccctaaagaagaggagtacctgcaggcccaggtgcggagcagaagcaagctggacgcccctaaggtggatctgctggtgaagaattgcctcctgcccctgagagagtacttcaagtatttcagccagaatagtctgcccctgggcggcccaagcagcggcgcccctcctcccagcggcggcagcccagccggctccccaacctctaccgaggagggcacctctgagtccgccacccccgagagcggccctggcacctccaccgagcccagcgagggcagcgcacccggcagccctgccggcagccccacctccacagaggagggaaccagcaccgagcccagcgaaggcagcgccccaggcaccagcaccgagcctagtgagggcggctctggcggcggcagcgcccaggagattaaacggatcaacaagatcagaagaagacttgtgaaagacagcaacaccaagaaggccggcaagacaggccccatgaaaaccctgctggttagagtgatgacacccgatctgagagagcggctggaaaacctgagaaagaagcctgaaaatatcccccagcccatcagcaatacatctagagccaacctgaataagctgctgaccgattacaccgaaatgaagaaggcgatcctgcatgtgtactgggaagagttccagaaggaccctgtgggcctgatgagccgggtggcccagcctgccagcaagaagatcgatcagaacaagctgaaacctgagatggacgagaagggcaacctgaccaccgccggctttgcctgctctcagtgtggccagcccctgttcgtgtacaagctggagcaggtgtctgagaagggcaaggcttacaccaactacttcggacggtgcaatgtggccgagcacgaaaagctgatcctgctggcccagctgaagcccgagaaggatagcgacgaagccgtgacatatagcctgggaaagtttgggcagagggccctggatttctacagcattcatgtgaccaaggagtccacccaccccgtgaagcccctggcccagatcgccggaaacagatacgcctccggacctgtgggaaaggccctgagcgacgcatgtatgggcacaatcgcctccttcctgtctaagtaccaggacatcatcatcgaacaccagaaggtggtgaagggcaaccagaagagactggagagcctgcgggagctggccggcaaggaaaacctggaataccctagcgtgaccctgccacctcagcctcacaccaaggagggcgttgatgcctacaacgaagtgatcgcccgggtgcgaatgtgggtgaacctgaacctgtggcagaagctgaagctaagcagagatgatgccaagcctctgctgagactgaagggattcccttcctttcctctggtcgagagacaggccaacgaagtggactggtgggacatggtgtgtaacgtgaagaagctgatcaacgagaaaaaggaggatggcaaggtgttttggcagaatctggctggctacaagagacaggaagccctgagaccatacctgagcagcgaggaagatcggaagaagggaaagaaattcgctcggtaccagctgggcgacctgctgctgcacctggaaaagaagcacggcgaggactggggaaaggtgtacgacgaggcctgggagcggattgacaagaaagtggaaggcctgagcaagcacatcaagctggaagaggaacggagaagcgaggacgcccagagcaaggccgccctgaccgactggctgcgggctaaggccagcttcgtgatcgagggcctgaaggaggccgacaaggacgagttctgcagatgcgagctgaagctgcagaagtggtacggggacctgcggggaaagcccttcgccatcgaagccgagaacagcatcctggacatcagcggcttcagcaagcagtacaactgtgccttcatctggcagaaggacggcgtgaagaagctgaacctgtacctgatcatcaactacttcaagggcggcaagctgcggttcaagaagatcaaacctgaagccttcgaagccaacagattctacaccgtgatcaacaaaaagagcggcgagatcgtgcccatggaggtgaacttcaacttcgacgaccccaacctgatcatcctgcctctggcctttggcaagagacagggcagagaattcatctggaacgacctgctgtccctggaaaccggcagcctgaagctggccaacggaagagtgatcgagaagacactgtacaacagaagaacccggcaggatgagcctgccctgttcgtggccctgaccttcgagcggcgggaggtcctggactcctccaatatcaaaccaatgaacctgatcggcgtggcaagaggcgaaaacatccccgccgtgatcgccctgaccgaccccgagggctgcccactgagccggtttaaggatagcctgggaaacccaacccacatcctgagaatcggcgagagctataaggagaagcagcggaccatccaggccaagaaggaggtggagcagcggagagccggcggctacagccggaagtacgccagcaaagccaagaatctggcagacgatatggtgagaaacaccgctagagatctgctgtactacgccgtgacccaggatgccatgctgatcttcgccaacctgagccggggcttcggccggcagggcaagcggaccttcatggccgagagacagtacacacggatggaggactggctgaccgccaagctggcctacgagggcctgagcaagacctacctgtccaagacactggcccagtacacctccaagacatgcagcaactgtgggtttaccatcaccagcgccgactacgacagggtgctggagaagctgaagaagacagcaacaggctggatgaccacaattaacggcaaggagctgaaggtggagggccagattacctactacaacagatacaagagacagaacgtagtcaaggacctgtccgtcgagctggatagactgagcgaagaatctgtgaacaacgacatctcctcctggacaaagggcagaagcggagaagctctgagcctcctgaagaaaagattctcccatagacccgtgcaggagaagttcgtgtgcctgaactgcggcttcgagacacacgcagccgagcaagccgccctgaacatcgccagatcctggctgttcctgcggagccaggagtacaagaaataccagacaaacaagacaaccggcaacaccgataagagagccttcgtcgagacctggcagtccttttaccggaagaagcttaaggaggtgtggaaacctgccgtgcggtctggcggatctggcggaggctccacaagcaggcccggcgccgtgagcttcgccgacgtggccgtgtacttcagccccgaggagtggggctgcctgaggcccgcccagagggccctgtacagggacgtgatgagggagacctacggccacctgggcgccctgggcttcgccgacgccaagcccgtgctgatcgcctggctggagaggaaggccgaggtgtggacccccgaggccgaggaccccgaggagggcgccaggcaccccggcagcggcaccagccccaagaaaaagagaaaagtctaagctgccttctgcggggcttgccttctggccatgcccttcttctctcccttgcacctgtacctcttggtctttgaataaagcctgagtaggaaggctagcaaaaaaaaaaaaaaaaaaaaaaaaaaaaaaaaaaaaaaaaaaaaaaaaaaaaaaaaaaaaaaaaaaaaaaaaaaaaaaaa

SEQ ID NO: 6168 - RNA, 5797 nt, synthetic construct
  source 1..5797: mol_type = other RNA
aggaaataagagagaaaagaagagtaagaagaaatataagagccaccatggcccctaagaagaagcgtaaagtgagccggatggaacgcctcgtctacgaggtgcggcagaagtgcagaaacatcgaggacatctgcatctcctgcggatctctgaacgtgaccctggagcacccactgttcatcggcggcatgtgccagaactgtaaaaactgttttctggagtgtgcctatcaatacgacgatgacggctaccagagctactgcaccatctgttgcggcggaagagaggtgctgatgtgtggaaataacaactgctgccggtgcttctgcgtggaatgcgtggacctgctggtgggccccggcgccgcccaggccgctattaaggaagatccttggaactgctacatgtgcggccacaagggcacatacggcctgctgagacggagagaggactggcctagcagactgcagatgttcttcgccaataaccacgaccaggagttcgacccccctaaggtgtaccctcccgtccccgccgagaagagaaagcccatccgggtcctgagcctgttcgatggcatcgccaccggtctgctggtgctgaaggacctgggcatccaggtggataggtacattgcctccgaggtgtgcgaggactccatcaccgtgggaatggtgcgtcatcagggcaagatcatgtacgtgggcgacgtgcggagcgtgacacagaagcatatccaggagtggggccctttcgacctggtgatcggcggcagcccttgcaatgacctgagcatcgtgaacccagcccggaagggcctgtacgagggaaccggcagactgttcttcgagttttacagactgctgcacgacgcccggcctaaggaaggcgacgaccggcccttcttttggctgttcgagaatgtggtggccatgggagtcagcgacaagcgggatattagccggttcctggagagcaaccccgtgatgatcgatgccaaggaagtgagcgccgcccaccgggccagatacttctggggcaatctgcctggcatgaacagacccctggccagcaccgtgaacgacaagctggagctgcaggagtgcctggagcacggccggatcgccaagttcagcaaggtgagaaccatcaccacccgaagcaacagcatcaaacaaggcaaggaccagcactttcctgtgttcatgaacgagaaggaggacatcctgtggtgtaccgagatggagagagtgttcgggttcccagtccactacacagatgtcagcaacatgtctagactggccagacagagactgctgggaagaagctggtccgtccctgtgatcagacacctgttcgcccctctgaaggagtacttcgcctgcgtgagcagcggcaacagcaacgccaacagccggggccccagcttctctagcggcctggtgccactgtccctgagagggagccacatgggccccatggagatctacaaaaccgtgagcgcctggaagcggcagcctgtgcgcgtgctgagcctgtttcggaatatcgataaagtcctgaaaagcctgggattcctggagagcggctctggctccggcggtggcaccctgaagtacgtggaggatgtgacaaacgtggtcagacgggatgtggagaagtggggccccttcgatctggtgtacggcagcacccaacccctgggcagctcttgtgaccggtgccctggctggtacatgtttcagttccaccggatcctgcagtacgccctgccgagacaggagtcccagcggccattcttttggattttcatggacaacttgctgctgaccgaggatgaccaggaaactaccactcggttcctgcagaccgaagccgtgaccctgcaggacgtgagaggccgggactaccagaacgccatgcgggtgtggtccaacatccctggactgaaaagcaagcacgcacctctgacccctaaagaagaggagtacctgcaggcccaggtgcggagcagaagcaagctggacgcccctaaggtggatctgctggtgaagaattgcctcctgcccctgagagagtacttcaagtatttcagccagaatagtctgcccctgggcggcccaagcagcggcgcccctcctcccagcggcggcagcccagccggctccccaacctctaccgaggagggcacctctgagtccgccacccccgagagcggccctggcacctccaccgagcccagcgagggcagcgcacccggcagccctgccggcagccccacctccacagaggagggaaccagcaccgagcccagcgaaggcagcgccccaggcaccagcaccgagcctagtgagggcggctctggcggcggcagcgcccaggagattaaacggatcaacaagatcagaagaagacttgtgaaagacagcaacaccaagaaggccggcaagacaggccccatgaaaaccctgctggttagagtgatgacacccgatctgagagagcggctggaaaacctgagaaagaagcctgaaaatatcccccagcccatcagcaatacatctagagccaacctgaataagctgctgaccgattacaccgaaatgaagaaggcgatcctgcatgtgtactgggaagagttccagaaggaccctgtgggcctgatgagccgggtggcccagcctgccagcaagaagatcgatcagaacaagctgaaacctgagatggacgagaagggcaacctgaccaccgccggctttgcctgctctcagtgtggccagcccctgttcgtgtacaagctggagcaggtgtctgagaagggcaaggcttacaccaactacttcggacggtgcaatgtggccgagcacgaaaagctgatcctgctggcccagctgaagcccgagaaggatagcgacgaagccgtgacatatagcctgggaaagtttgggcagagggccctggatttctacagcattcatgtgaccaaggagtccacccaccccgtgaagcccctggcccagatcgccggaaacagatacgcctccggacctgtgggaaaggccctgagcgacgcatgtatgggcacaatcgcctccttcctgtctaagtaccaggacatcatcatcgaacaccagaaggtggtgaagggcaaccagaagagactggagagcctgcgggagctggccggcaaggaaaacctggaataccctagcgtgaccctgccacctcagcctcacaccaaggagggcgttgatgcctacaacgaagtgatcgcccgggtgcgaatgtgggtgaacctgaacctgtggcagaagctgaagctaagcagagatgatgccaagcctctgctgagactgaagggattcccttcctttcctctggtcgagagacaggccaacgaagtggactggtgggacatggtgtgtaacgtgaagaagctgatcaacgagaaaaaggaggatggcaaggtgttttggcagaatctggctggctacaagagacaggaagccctgagaccatacctgagcagcgaggaagatcggaagaagggaaagaaattcgctcggtaccagctgggcgacctgctgctgcacctggaaaagaagcacggcgaggactggggaaaggtgtacgacgaggcctgggagcggattgacaagaaagtggaaggcctgagcaagcacatcaagctggaagaggaacggagaagcgaggacgcccagagcaaggccgccctgaccgactggctgcgggctaaggccagcttcgtgatcgagggcctgaaggaggccgacaaggacgagttctgcagatgcgagctgaagctgcagaagtggtacggggacctgcggggaaagcccttcgccatcgaagccgagaacagcatcctggacatcagcggcttcagcaagcagtacaactgtgccttcatctggcagaaggacggcgtgaagaagctgaacctgtacctgatcatcaactacttcaagggcggcaagctgcggttcaagaagatcaaacctgaagccttcgaagccaacagattctacaccgtgatcaacaaaaagagcggcgagatcgtgcccatggaggtgaacttcaacttcgacgaccccaacctgatcatcctgcctctggcctttggcaagagacagggcagagaattcatctggaacgacctgctgtccctggaaaccggcagcctgaagctggccaacggaagagtgatcgagaagacactgtacaacagaagaacccggcaggatgagcctgccctgttcgtggccctgaccttcgagcggcgggaggtcctggactcctccaatatcaaaccaatgaacctgatcggcgtggcaagaggcgaaaacatccccgccgtgatcgccctgaccgaccccgagggctgcccactgagccggtttaaggatagcctgggaaacccaacccacatcctgagaatcggcgagagctataaggagaagcagcggaccatccaggccaagaaggaggtggagcagcggagagccggcggctacagccggaagtacgccagcaaagccaagaatctggcagacgatatggtgagaaacaccgctagagatctgctgtactacgccgtgacccaggatgccatgctgatcttcgccaacctgagccggggcttcggccggcagggcaagcggaccttcatggccgagagacagtacacacggatggaggactggctgaccgccaagctggcctacgagggcctgagcaagacctacctgtccaagacactggcccagtacacctccaagacatgcagcaactgtgggtttaccatcaccagcgccgactacgacagggtgctggagaagctgaagaagacagcaacaggctggatgaccacaattaacggcaaggagctgaaggtggagggccagattacctactacaacagatacaagagacagaacgtagtcaaggacctgtccgtcgagctggatagactgagcgaagaatctgtgaacaacgacatctcctcctggacaaagggcagaagcggagaagctctgagcctcctgaagaaaagattctcccatagacccgtgcaggagaagttcgtgtgcctgaactgcggcttcgagacacacgcagccgagcaagccgccctgaacatcgccagatcctggctgttcctgcggagccaggagtacaagaaataccagacaaacaagacaaccggcaacaccgataagagagccttcgtcgagacctggcagtccttttaccggaagaagcttaaggaggtgtggaaacctgccgtgcggtctggcggatctggcggaggctccacaagcagcctgggcagcgagctgttcagggacgtggccatcgtgttcagccaggaggagtggcagtggctggcccccgcccagagggacctgtacagggacgtgatgctggagacctacagcaacctggtgagcctgggcctggccgtgagcaagcccgacgtgatcagcttcctggagcagggcaaggagccctggatggtggagagggtggtgagcggcggcctgtgccccgtgctggagagcaggaccagccccaagaaaaagagaaaagtctaagctgccttctgcggggcttgccttctggccatgcccttcttctctcccttgcacctgtacctcttggtctttgaataaagcctgagtaggaaggctagcaaaaaaaaaaaaaaaaaaaaaaaaaaaaaaaaaaaaaaaaaaaaaaaaaaaaaaaaaaaaaaaaaaaaaaaaaaaaaaaa

SEQ ID NO: 6169 - RNA, 5797 nt, synthetic construct
  source 1..5797: mol_type = other RNA
aggaaataagagagaaaagaagagtaagaagaaatataagagccaccatggcccctaagaagaagcgtaaagtgagccggatggaacgcctcgtctacgaggtgcggcagaagtgcagaaacatcgaggacatctgcatctcctgcggatctctgaacgtgaccctggagcacccactgttcatcggcggcatgtgccagaactgtaaaaactgttttctggagtgtgcctatcaatacgacgatgacggctaccagagctactgcaccatctgttgcggcggaagagaggtgctgatgtgtggaaataacaactgctgccggtgcttctgcgtggaatgcgtggacctgctggtgggccccggcgccgcccaggccgctattaaggaagatccttggaactgctacatgtgcggccacaagggcacatacggcctgctgagacggagagaggactggcctagcagactgcagatgttcttcgccaataaccacgaccaggagttcgacccccctaaggtgtaccctcccgtccccgccgagaagagaaagcccatccgggtcctgagcctgttcgatggcatcgccaccggtctgctggtgctgaaggacctgggcatccaggtggataggtacattgcctccgaggtgtgcgaggactccatcaccgtgggaatggtgcgtcatcagggcaagatcatgtacgtgggcgacgtgcggagcgtgacacagaagcatatccaggagtggggccctttcgacctggtgatcggcggcagcccttgcaatgacctgagcatcgtgaacccagcccggaagggcctgtacgagggaaccggcagactgttcttcgagttttacagactgctgcacgacgcccggcctaaggaaggcgacgaccggcccttcttttggctgttcgagaatgtggtggccatgggagtcagcgacaagcgggatattagccggttcctggagagcaaccccgtgatgatcgatgccaaggaagtgagcgccgcccaccgggccagatacttctggggcaatctgcctggcatgaacagacccctggccagcaccgtgaacgacaagctggagctgcaggagtgcctggagcacggccggatcgccaagttcagcaaggtgagaaccatcaccacccgaagcaacagcatcaaacaaggcaaggaccagcactttcctgtgttcatgaacgagaaggaggacatcctgtggtgtaccgagatggagagagtgttcgggttcccagtccactacacagatgtcagcaacatgtctagactggccagacagagactgctgggaagaagctggtccgtccctgtgatcagacacctgttcgcccctctgaaggagtacttcgcctgcgtgagcagcggcaacagcaacgccaacagccggggccccagcttctctagcggcctggtgccactgtccctgagagggagccacatgggccccatggagatctacaaaaccgtgagcgcctggaagcggcagcctgtgcgcgtgctgagcctgtttcggaatatcgataaagtcctgaaaagcctgggattcctggagagcggctctggctccggcggtggcaccctgaagtacgtggaggatgtgacaaacgtggtcagacgggatgtggagaagtggggccccttcgatctggtgtacggcagcacccaacccctgggcagctcttgtgaccggtgccctggctggtacatgtttcagttccaccggatcctgcagtacgccctgccgagacaggagtcccagcggccattcttttggattttcatggacaacttgctgctgaccgaggatgaccaggaaactaccactcggttcctgcagaccgaagccgtgaccctgcaggacgtgagaggccgggactaccagaacgccatgcgggtgtggtccaacatccctggactgaaaagcaagcacgcacctctgacccctaaagaagaggagtacctgcaggcccaggtgcggagcagaagcaagctggacgcccctaaggtggatctgctggtgaagaattgcctcctgcccctgagagagtacttcaagtatttcagccagaatagtctgcccctgggcggcccaagcagcggcgcccctcctcccagcggcggcagcccagccggctccccaacctctaccgaggagggcacctctgagtccgccacccccgagagcggccctggcacctccaccgagcccagcgagggcagcgcacccggcagccctgccggcagccccacctccacagaggagggaaccagcaccgagcccagcgaaggcagcgccccaggcaccagcaccgagcctagtgagggcggctctggcggcggcagcgcccaggagattaaacggatcaacaagatcagaagaagacttgtgaaagacagcaacaccaagaaggccggcaagacaggccccatgaaaaccctgctggttagagtgatgacacccgatctgagagagcggctggaaaacctgagaaagaagcctgaaaatatcccccagcccatcagcaatacatctagagccaacctgaataagctgctgaccgattacaccgaaatgaagaaggcgatcctgcatgtgtactgggaagagttccagaaggaccctgtgggcctgatgagccgggtggcccagcctgccagcaagaagatcgatcagaacaagctgaaacctgagatggacgagaagggcaacctgaccaccgccggctttgcctgctctcagtgtggccagcccctgttcgtgtacaagctggagcaggtgtctgagaagggcaaggcttacaccaactacttcggacggtgcaatgtggccgagcacgaaaagctgatcctgctggcccagctgaagcccgagaaggatagcgacgaagccgtgacatatagcctgggaaagtttgggcagagggccctggatttctacagcattcatgtgaccaaggagtccacccaccccgtgaagcccctggcccagatcgccggaaacagatacgcctccggacctgtgggaaaggccctgagcgacgcatgtatgggcacaatcgcctccttcctgtctaagtaccaggacatcatcatcgaacaccagaaggtggtgaagggcaaccagaagagactggagagcctgcgggagctggccggcaaggaaaacctggaataccctagcgtgaccctgccacctcagcctcacaccaaggagggcgttgatgcctacaacgaagtgatcgcccgggtgcgaatgtgggtgaacctgaacctgtggcagaagctgaagctaagcagagatgatgccaagcctctgctgagactgaagggattcccttcctttcctctggtcgagagacaggccaacgaagtggactggtgggacatggtgtgtaacgtgaagaagctgatcaacgagaaaaaggaggatggcaaggtgttttggcagaatctggctggctacaagagacaggaagccctgagaccatacctgagcagcgaggaagatcggaagaagggaaagaaattcgctcggtaccagctgggcgacctgctgctgcacctggaaaagaagcacggcgaggactggggaaaggtgtacgacgaggcctgggagcggattgacaagaaagtggaaggcctgagcaagcacatcaagctggaagaggaacggagaagcgaggacgcccagagcaaggccgccctgaccgactggctgcgggctaaggccagcttcgtgatcgagggcctgaaggaggccgacaaggacgagttctgcagatgcgagctgaagctgcagaagtggtacggggacctgcggggaaagcccttcgccatcgaagccgagaacagcatcctggacatcagcggcttcagcaagcagtacaactgtgccttcatctggcagaaggacggcgtgaagaagctgaacctgtacctgatcatcaactacttcaagggcggcaagctgcggttcaagaagatcaaacctgaagccttcgaagccaacagattctacaccgtgatcaacaaaaagagcggcgagatcgtgcccatggaggtgaacttcaacttcgacgaccccaacctgatcatcctgcctctggcctttggcaagagacagggcagagaattcatctggaacgacctgctgtccctggaaaccggcagcctgaagctggccaacggaagagtgatcgagaagacactgtacaacagaagaacccggcaggatgagcctgccctgttcgtggccctgaccttcgagcggcgggaggtcctggactcctccaatatcaaaccaatgaacctgatcggcgtggcaagaggcgaaaacatccccgccgtgatcgccctgaccgaccccgagggctgcccactgagccggtttaaggatagcctgggaaacccaacccacatcctgagaatcggcgagagctataaggagaagcagcggaccatccaggccaagaaggaggtggagcagcggagagccggcggctacagccggaagtacgccagcaaagccaagaatctggcagacgatatggtgagaaacaccgctagagatctgctgtactacgccgtgacccaggatgccatgctgatcttcgccaacctgagccggggcttcggccggcagggcaagcggaccttcatggccgagagacagtacacacggatggaggactggctgaccgccaagctggcctacgagggcctgagcaagacctacctgtccaagacactggcccagtacacctccaagacatgcagcaactgtgggtttaccatcaccagcgccgactacgacagggtgctggagaagctgaagaagacagcaacaggctggatgaccacaattaacggcaaggagctgaaggtggagggccagattacctactacaacagatacaagagacagaacgtagtcaaggacctgtccgtcgagctggatagactgagcgaagaatctgtgaacaacgacatctcctcctggacaaagggcagaagcggagaagctctgagcctcctgaagaaaagattctcccatagacccgtgcaggagaagttcgtgtgcctgaactgcggcttcgagacacacgcagccgagcaagccgccctgaacatcgccagatcctggctgttcctgcggagccaggagtacaagaaataccagacaaacaagacaaccggcaacaccgataagagagccttcgtcgagacctggcagtccttttaccggaagaagcttaaggaggtgtggaaacctgccgtgcggtctggcggatctggcggaggctccacaagccccctgggcagcgagctgttcagggacgtggccatcgtgttcagccaggaggagtggcagtggctggcccccgcccagagggacctgtacagggacgtgatgctggagacctacagcaacctggtgagcctgggcctggccatcagcaagcccgacgtgatcagcttcctggagcagggcaaggagccctggatggtggagagggtggtggccggcggcctgtgccccgtgctggagagcaggaccagccccaagaaaaagagaaaagtctaagctgccttctgcggggcttgccttctggccatgcccttcttctctcccttgcacctgtacctcttggtctttgaataaagcctgagtaggaaggctagcaaaaaaaaaaaaaaaaaaaaaaaaaaaaaaaaaaaaaaaaaaaaaaaaaaaaaaaaaaaaaaaaaaaaaaaaaaaaaaaa

SEQ ID NO: 6170 - RNA, 5797 nt, synthetic construct
  source 1..5797: mol_type = other RNA
aggaaataagagagaaaagaagagtaagaagaaatataagagccaccatggcccctaagaagaagcgtaaagtgagccggatggaacgcctcgtctacgaggtgcggcagaagtgcagaaacatcgaggacatctgcatctcctgcggatctctgaacgtgaccctggagcacccactgttcatcggcggcatgtgccagaactgtaaaaactgttttctggagtgtgcctatcaatacgacgatgacggctaccagagctactgcaccatctgttgcggcggaagagaggtgctgatgtgtggaaataacaactgctgccggtgcttctgcgtggaatgcgtggacctgctggtgggccccggcgccgcccaggccgctattaaggaagatccttggaactgctacatgtgcggccacaagggcacatacggcctgctgagacggagagaggactggcctagcagactgcagatgttcttcgccaataaccacgaccaggagttcgacccccctaaggtgtaccctcccgtccccgccgagaagagaaagcccatccgggtcctgagcctgttcgatggcatcgccaccggtctgctggtgctgaaggacctgggcatccaggtggataggtacattgcctccgaggtgtgcgaggactccatcaccgtgggaatggtgcgtcatcagggcaagatcatgtacgtgggcgacgtgcggagcgtgacacagaagcatatccaggagtggggccctttcgacctggtgatcggcggcagcccttgcaatgacctgagcatcgtgaacccagcccggaagggcctgtacgagggaaccggcagactgttcttcgagttttacagactgctgcacgacgcccggcctaaggaaggcgacgaccggcccttcttttggctgttcgagaatgtggtggccatgggagtcagcgacaagcgggatattagccggttcctggagagcaaccccgtgatgatcgatgccaaggaagtgagcgccgcccaccgggccagatacttctggggcaatctgcctggcatgaacagacccctggccagcaccgtgaacgacaagctggagctgcaggagtgcctggagcacggccggatcgccaagttcagcaaggtgagaaccatcaccacccgaagcaacagcatcaaacaaggcaaggaccagcactttcctgtgttcatgaacgagaaggaggacatcctgtggtgtaccgagatggagagagtgttcgggttcccagtccactacacagatgtcagcaacatgtctagactggccagacagagactgctgggaagaagctggtccgtccctgtgatcagacacctgttcgcccctctgaaggagtacttcgcctgcgtgagcagcggcaacagcaacgccaacagccggggccccagcttctctagcggcctggtgccactgtccctgagagggagccacatgggccccatggagatctacaaaaccgtgagcgcctggaagcggcagcctgtgcgcgtgctgagcctgtttcggaatatcgataaagtcctgaaaagcctgggattcctggagagcggctctggctccggcggtggcaccctgaagtacgtggaggatgtgacaaacgtggtcagacgggatgtggagaagtggggccccttcgatctggtgtacggcagcacccaacccctgggcagctcttgtgaccggtgccctggctggtacatgtttcagttccaccggatcctgcagtacgccctgccgagacaggagtcccagcggccattcttttggattttcatggacaacttgctgctgaccgaggatgaccaggaaactaccactcggttcctgcagaccgaagccgtgaccctgcaggacgtgagaggccgggactaccagaacgccatgcgggtgtggtccaacatccctggactgaaaagcaagcacgcacctctgacccctaaagaagaggagtacctgcaggcccaggtgcggagcagaagcaagctggacgcccctaaggtggatctgctggtgaagaattgcctcctgcccctgagagagtacttcaagtatttcagccagaatagtctgcccctgggcggcccaagcagcggcgcccctcctcccagcggcggcagcccagccggctccccaacctctaccgaggagggcacctctgagtccgccacccccgagagcggccctggcacctccaccgagcccagcgagggcagcgcacccggcagccctgccggcagccccacctccacagaggagggaaccagcaccgagcccagcgaaggcagcgccccaggcaccagcaccgagcctagtgagggcggctctggcggcggcagcgcccaggagattaaacggatcaacaagatcagaagaagacttgtgaaagacagcaacaccaagaaggccggcaagacaggccccatgaaaaccctgctggttagagtgatgacacccgatctgagagagcggctggaaaacctgagaaagaagcctgaaaatatcccccagcccatcagcaatacatctagagccaacctgaataagctgctgaccgattacaccgaaatgaagaaggcgatcctgcatgtgtactgggaagagttccagaaggaccctgtgggcctgatgagccgggtggcccagcctgccagcaagaagatcgatcagaacaagctgaaacctgagatggacgagaagggcaacctgaccaccgccggctttgcctgctctcagtgtggccagcccctgttcgtgtacaagctggagcaggtgtctgagaagggcaaggcttacaccaactacttcggacggtgcaatgtggccgagcacgaaaagctgatcctgctggcccagctgaagcccgagaaggatagcgacgaagccgtgacatatagcctgggaaagtttgggcagagggccctggatttctacagcattcatgtgaccaaggagtccacccaccccgtgaagcccctggcccagatcgccggaaacagatacgcctccggacctgtgggaaaggccctgagcgacgcatgtatgggcacaatcgcctccttcctgtctaagtaccaggacatcatcatcgaacaccagaaggtggtgaagggcaaccagaagagactggagagcctgcgggagctggccggcaaggaaaacctggaataccctagcgtgaccctgccacctcagcctcacaccaaggagggcgttgatgcctacaacgaagtgatcgcccgggtgcgaatgtgggtgaacctgaacctgtggcagaagctgaagctaagcagagatgatgccaagcctctgctgagactgaagggattcccttcctttcctctggtcgagagacaggccaacgaagtggactggtgggacatggtgtgtaacgtgaagaagctgatcaacgagaaaaaggaggatggcaaggtgttttggcagaatctggctggctacaagagacaggaagccctgagaccatacctgagcagcgaggaagatcggaagaagggaaagaaattcgctcggtaccagctgggcgacctgctgctgcacctggaaaagaagcacggcgaggactggggaaaggtgtacgacgaggcctgggagcggattgacaagaaagtggaaggcctgagcaagcacatcaagctggaagaggaacggagaagcgaggacgcccagagcaaggccgccctgaccgactggctgcgggctaaggccagcttcgtgatcgagggcctgaaggaggccgacaaggacgagttctgcagatgcgagctgaagctgcagaagtggtacggggacctgcggggaaagcccttcgccatcgaagccgagaacagcatcctggacatcagcggcttcagcaagcagtacaactgtgccttcatctggcagaaggacggcgtgaagaagctgaacctgtacctgatcatcaactacttcaagggcggcaagctgcggttcaagaagatcaaacctgaagccttcgaagccaacagattctacaccgtgatcaacaaaaagagcggcgagatcgtgcccatggaggtgaacttcaacttcgacgaccccaacctgatcatcctgcctctggcctttggcaagagacagggcagagaattcatctggaacgacctgctgtccctggaaaccggcagcctgaagctggccaacggaagagtgatcgagaagacactgtacaacagaagaacccggcaggatgagcctgccctgttcgtggccctgaccttcgagcggcgggaggtcctggactcctccaatatcaaaccaatgaacctgatcggcgtggcaagaggcgaaaacatccccgccgtgatcgccctgaccgaccccgagggctgcccactgagccggtttaaggatagcctgggaaacccaacccacatcctgagaatcggcgagagctataaggagaagcagcggaccatccaggccaagaaggaggtggagcagcggagagccggcggctacagccggaagtacgccagcaaagccaagaatctggcagacgatatggtgagaaacaccgctagagatctgctgtactacgccgtgacccaggatgccatgctgatcttcgccaacctgagccggggcttcggccggcagggcaagcggaccttcatggccgagagacagtacacacggatggaggactggctgaccgccaagctggcctacgagggcctgagcaagacctacctgtccaagacactggcccagtacacctccaagacatgcagcaactgtgggtttaccatcaccagcgccgactacgacagggtgctggagaagctgaagaagacagcaacaggctggatgaccacaattaacggcaaggagctgaaggtggagggccagattacctactacaacagatacaagagacagaacgtagtcaaggacctgtccgtcgagctggatagactgagcgaagaatctgtgaacaacgacatctcctcctggacaaagggcagaagcggagaagctctgagcctcctgaagaaaagattctcccatagacccgtgcaggagaagttcgtgtgcctgaactgcggcttcgagacacacgcagccgagcaagccgccctgaacatcgccagatcctggctgttcctgcggagccaggagtacaagaaataccagacaaacaagacaaccggcaacaccgataagagagccttcgtcgagacctggcagtccttttaccggaagaagcttaaggaggtgtggaaacctgccgtgcggtctggcggatctggcggaggctccacaagcctgctgaccttcgaggacgtggccgtgagcttcagcgaggaggagtggaggctgctggaccccacccagaagagcctgtacaacgacgtgatgcaggagaactacgagaccgtggtgagcctgggcctgaagctgaagaacgacaccggcaacgaccagcccatcagcctgagcgccctggagatccaggccagcggctgcagggtgctgaggaaggccaggatgaaggtggcccagaagaccaccagccccaagaaaaagagaaaagtctaagctgccttctgcggggcttgccttctggccatgcccttcttctctcccttgcacctgtacctcttggtctttgaataaagcctgagtaggaaggctagcaaaaaaaaaaaaaaaaaaaaaaaaaaaaaaaaaaaaaaaaaaaaaaaaaaaaaaaaaaaaaaaaaaaaaaaaaaaaaaaa

SEQ ID NO: 6171 - RNA, 5797 nt, synthetic construct
  source 1..5797: mol_type = other RNA
aggaaataagagagaaaagaagagtaagaagaaatataagagccaccatggcccctaagaagaagcgtaaagtgagccggatggaacgcctcgtctacgaggtgcggcagaagtgcagaaacatcgaggacatctgcatctcctgcggatctctgaacgtgaccctggagcacccactgttcatcggcggcatgtgccagaactgtaaaaactgttttctggagtgtgcctatcaatacgacgatgacggctaccagagctactgcaccatctgttgcggcggaagagaggtgctgatgtgtggaaataacaactgctgccggtgcttctgcgtggaatgcgtggacctgctggtgggccccggcgccgcccaggccgctattaaggaagatccttggaactgctacatgtgcggccacaagggcacatacggcctgctgagacggagagaggactggcctagcagactgcagatgttcttcgccaataaccacgaccaggagttcgacccccctaaggtgtaccctcccgtccccgccgagaagagaaagcccatccgggtcctgagcctgttcgatggcatcgccaccggtctgctggtgctgaaggacctgggcatccaggtggataggtacattgcctccgaggtgtgcgaggactccatcaccgtgggaatggtgcgtcatcagggcaagatcatgtacgtgggcgacgtgcggagcgtgacacagaagcatatccaggagtggggccctttcgacctggtgatcggcggcagcccttgcaatgacctgagcatcgtgaacccagcccggaagggcctgtacgagggaaccggcagactgttcttcgagttttacagactgctgcacgacgcccggcctaaggaaggcgacgaccggcccttcttttggctgttcgagaatgtggtggccatgggagtcagcgacaagcgggatattagccggttcctggagagcaaccccgtgatgatcgatgccaaggaagtgagcgccgcccaccgggccagatacttctggggcaatctgcctggcatgaacagacccctggccagcaccgtgaacgacaagctggagctgcaggagtgcctggagcacggccggatcgccaagttcagcaaggtgagaaccatcaccacccgaagcaacagcatcaaacaaggcaaggaccagcactttcctgtgttcatgaacgagaaggaggacatcctgtggtgtaccgagatggagagagtgttcgggttcccagtccactacacagatgtcagcaacatgtctagactggccagacagagactgctgggaagaagctggtccgtccctgtgatcagacacctgttcgcccctctgaaggagtacttcgcctgcgtgagcagcggcaacagcaacgccaacagccggggccccagcttctctagcggcctggtgccactgtccctgagagggagccacatgggccccatggagatctacaaaaccgtgagcgcctggaagcggcagcctgtgcgcgtgctgagcctgtttcggaatatcgataaagtcctgaaaagcctgggattcctggagagcggctctggctccggcggtggcaccctgaagtacgtggaggatgtgacaaacgtggtcagacgggatgtggagaagtggggccccttcgatctggtgtacggcagcacccaacccctgggcagctcttgtgaccggtgccctggctggtacatgtttcagttccaccggatcctgcagtacgccctgccgagacaggagtcccagcggccattcttttggattttcatggacaacttgctgctgaccgaggatgaccaggaaactaccactcggttcctgcagaccgaagccgtgaccctgcaggacgtgagaggccgggactaccagaacgccatgcgggtgtggtccaacatccctggactgaaaagcaagcacgcacctctgacccctaaagaagaggagtacctgcaggcccaggtgcggagcagaagcaagctggacgcccctaaggtggatctgctggtgaagaattgcctcctgcccctgagagagtacttcaagtatttcagccagaatagtctgcccctgggcggcccaagcagcggcgcccctcctcccagcggcggcagcccagccggctccccaacctctaccgaggagggcacctctgagtccgccacccccgagagcggccctggcacctccaccgagcccagcgagggcagcgcacccggcagccctgccggcagccccacctccacagaggagggaaccagcaccgagcccagcgaaggcagcgccccaggcaccagcaccgagcctagtgagggcggctctggcggcggcagcgcccaggagattaaacggatcaacaagatcagaagaagacttgtgaaagacagcaacaccaagaaggccggcaagacaggccccatgaaaaccctgctggttagagtgatgacacccgatctgagagagcggctggaaaacctgagaaagaagcctgaaaatatcccccagcccatcagcaatacatctagagccaacctgaataagctgctgaccgattacaccgaaatgaagaaggcgatcctgcatgtgtactgggaagagttccagaaggaccctgtgggcctgatgagccgggtggcccagcctgccagcaagaagatcgatcagaacaagctgaaacctgagatggacgagaagggcaacctgaccaccgccggctttgcctgctctcagtgtggccagcccctgttcgtgtacaagctggagcaggtgtctgagaagggcaaggcttacaccaactacttcggacggtgcaatgtggccgagcacgaaaagctgatcctgctggcccagctgaagcccgagaaggatagcgacgaagccgtgacatatagcctgggaaagtttgggcagagggccctggatttctacagcattcatgtgaccaaggagtccacccaccccgtgaagcccctggcccagatcgccggaaacagatacgcctccggacctgtgggaaaggccctgagcgacgcatgtatgggcacaatcgcctccttcctgtctaagtaccaggacatcatcatcgaacaccagaaggtggtgaagggcaaccagaagagactggagagcctgcgggagctggccggcaaggaaaacctggaataccctagcgtgaccctgccacctcagcctcacaccaaggagggcgttgatgcctacaacgaagtgatcgcccgggtgcgaatgtgggtgaacctgaacctgtggcagaagctgaagctaagcagagatgatgccaagcctctgctgagactgaagggattcccttcctttcctctggtcgagagacaggccaacgaagtggactggtgggacatggtgtgtaacgtgaagaagctgatcaacgagaaaaaggaggatggcaaggtgttttggcagaatctggctggctacaagagacaggaagccctgagaccatacctgagcagcgaggaagatcggaagaagggaaagaaattcgctcggtaccagctgggcgacctgctgctgcacctggaaaagaagcacggcgaggactggggaaaggtgtacgacgaggcctgggagcggattgacaagaaagtggaaggcctgagcaagcacatcaagctggaagaggaacggagaagcgaggacgcccagagcaaggccgccctgaccgactggctgcgggctaaggccagcttcgtgatcgagggcctgaaggaggccgacaaggacgagttctgcagatgcgagctgaagctgcagaagtggtacggggacctgcggggaaagcccttcgccatcgaagccgagaacagcatcctggacatcagcggcttcagcaagcagtacaactgtgccttcatctggcagaaggacggcgtgaagaagctgaacctgtacctgatcatcaactacttcaagggcggcaagctgcggttcaagaagatcaaacctgaagccttcgaagccaacagattctacaccgtgatcaacaaaaagagcggcgagatcgtgcccatggaggtgaacttcaacttcgacgaccccaacctgatcatcctgcctctggcctttggcaagagacagggcagagaattcatctggaacgacctgctgtccctggaaaccggcagcctgaagctggccaacggaagagtgatcgagaagacactgtacaacagaagaacccggcaggatgagcctgccctgttcgtggccctgaccttcgagcggcgggaggtcctggactcctccaatatcaaaccaatgaacctgatcggcgtggcaagaggcgaaaacatccccgccgtgatcgccctgaccgaccccgagggctgcccactgagccggtttaaggatagcctgggaaacccaacccacatcctgagaatcggcgagagctataaggagaagcagcggaccatccaggccaagaaggaggtggagcagcggagagccggcggctacagccggaagtacgccagcaaagccaagaatctggcagacgatatggtgagaaacaccgctagagatctgctgtactacgccgtgacccaggatgccatgctgatcttcgccaacctgagccggggcttcggccggcagggcaagcggaccttcatggccgagagacagtacacacggatggaggactggctgaccgccaagctggcctacgagggcctgagcaagacctacctgtccaagacactggcccagtacacctccaagacatgcagcaactgtgggtttaccatcaccagcgccgactacgacagggtgctggagaagctgaagaagacagcaacaggctggatgaccacaattaacggcaaggagctgaaggtggagggccagattacctactacaacagatacaagagacagaacgtagtcaaggacctgtccgtcgagctggatagactgagcgaagaatctgtgaacaacgacatctcctcctggacaaagggcagaagcggagaagctctgagcctcctgaagaaaagattctcccatagacccgtgcaggagaagttcgtgtgcctgaactgcggcttcgagacacacgcagccgagcaagccgccctgaacatcgccagatcctggctgttcctgcggagccaggagtacaagaaataccagacaaacaagacaaccggcaacaccgataagagagccttcgtcgagacctggcagtccttttaccggaagaagcttaaggaggtgtggaaacctgccgtgcggtctggcggatctggcggaggctccacaagcaccgagggccccctgaccttcagggacgtggccatcgagttcagccaggaggagtggaagttcctggtgcccgcccagagggccctgtacagggacgtgatgctggagacctacaggaacctggtgttcctgggcacctgccccagcgacctgagcgtgctgagctggctggagcagggcagggagctgtggaccgtgaacggccccgaggagatcagcaggcccgccaacgagtgggcctgcaccagccccaagaaaaagagaaaagtctaagctgccttctgcggggcttgccttctggccatgcccttcttctctcccttgcacctgtacctcttggtctttgaataaagcctgagtaggaaggctagcaaaaaaaaaaaaaaaaaaaaaaaaaaaaaaaaaaaaaaaaaaaaaaaaaaaaaaaaaaaaaaaaaaaaaaaaaaaaaaaa

SEQ ID NO: 6172 - RNA, 5797 nt, synthetic construct
  source 1..5797: mol_type = other RNA
aggaaataagagagaaaagaagagtaagaagaaatataagagccaccatggcccctaagaagaagcgtaaagtgagccggatggaacgcctcgtctacgaggtgcggcagaagtgcagaaacatcgaggacatctgcatctcctgcggatctctgaacgtgaccctggagcacccactgttcatcggcggcatgtgccagaactgtaaaaactgttttctggagtgtgcctatcaatacgacgatgacggctaccagagctactgcaccatctgttgcggcggaagagaggtgctgatgtgtggaaataacaactgctgccggtgcttctgcgtggaatgcgtggacctgctggtgggccccggcgccgcccaggccgctattaaggaagatccttggaactgctacatgtgcggccacaagggcacatacggcctgctgagacggagagaggactggcctagcagactgcagatgttcttcgccaataaccacgaccaggagttcgacccccctaaggtgtaccctcccgtccccgccgagaagagaaagcccatccgggtcctgagcctgttcgatggcatcgccaccggtctgctggtgctgaaggacctgggcatccaggtggataggtacattgcctccgaggtgtgcgaggactccatcaccgtgggaatggtgcgtcatcagggcaagatcatgtacgtgggcgacgtgcggagcgtgacacagaagcatatccaggagtggggccctttcgacctggtgatcggcggcagcccttgcaatgacctgagcatcgtgaacccagcccggaagggcctgtacgagggaaccggcagactgttcttcgagttttacagactgctgcacgacgcccggcctaaggaaggcgacgaccggcccttcttttggctgttcgagaatgtggtggccatgggagtcagcgacaagcgggatattagccggttcctggagagcaaccccgtgatgatcgatgccaaggaagtgagcgccgcccaccgggccagatacttctggggcaatctgcctggcatgaacagacccctggccagcaccgtgaacgacaagctggagctgcaggagtgcctggagcacggccggatcgccaagttcagcaaggtgagaaccatcaccacccgaagcaacagcatcaaacaaggcaaggaccagcactttcctgtgttcatgaacgagaaggaggacatcctgtggtgtaccgagatggagagagtgttcgggttcccagtccactacacagatgtcagcaacatgtctagactggccagacagagactgctgggaagaagctggtccgtccctgtgatcagacacctgttcgcccctctgaaggagtacttcgcctgcgtgagcagcggcaacagcaacgccaacagccggggccccagcttctctagcggcctggtgccactgtccctgagagggagccacatgggccccatggagatctacaaaaccgtgagcgcctggaagcggcagcctgtgcgcgtgctgagcctgtttcggaatatcgataaagtcctgaaaagcctgggattcctggagagcggctctggctccggcggtggcaccctgaagtacgtggaggatgtgacaaacgtggtcagacgggatgtggagaagtggggccccttcgatctggtgtacggcagcacccaacccctgggcagctcttgtgaccggtgccctggctggtacatgtttcagttccaccggatcctgcagtacgccctgccgagacaggagtcccagcggccattcttttggattttcatggacaacttgctgctgaccgaggatgaccaggaaactaccactcggttcctgcagaccgaagccgtgaccctgcaggacgtgagaggccgggactaccagaacgccatgcgggtgtggtccaacatccctggactgaaaagcaagcacgcacctctgacccctaaagaagaggagtacctgcaggcccaggtgcggagcagaagcaagctggacgcccctaaggtggatctgctggtgaagaattgcctcctgcccctgagagagtacttcaagtatttcagccagaatagtctgcccctgggcggcccaagcagcggcgcccctcctcccagcggcggcagcccagccggctccccaacctctaccgaggagggcacctctgagtccgccacccccgagagcggccctggcacctccaccgagcccagcgagggcagcgcacccggcagccctgccggcagccccacctccacagaggagggaaccagcaccgagcccagcgaaggcagcgccccaggcaccagcaccgagcctagtgagggcggctctggcggcggcagcgcccaggagattaaacggatcaacaagatcagaagaagacttgtgaaagacagcaacaccaagaaggccggcaagacaggccccatgaaaaccctgctggttagagtgatgacacccgatctgagagagcggctggaaaacctgagaaagaagcctgaaaatatcccccagcccatcagcaatacatctagagccaacctgaataagctgctgaccgattacaccgaaatgaagaaggcgatcctgcatgtgtactgggaagagttccagaaggaccctgtgggcctgatgagccgggtggcccagcctgccagcaagaagatcgatcagaacaagctgaaacctgagatggacgagaagggcaacctgaccaccgccggctttgcctgctctcagtgtggccagcccctgttcgtgtacaagctggagcaggtgtctgagaagggcaaggcttacaccaactacttcggacggtgcaatgtggccgagcacgaaaagctgatcctgctggcccagctgaagcccgagaaggatagcgacgaagccgtgacatatagcctgggaaagtttgggcagagggccctggatttctacagcattcatgtgaccaaggagtccacccaccccgtgaagcccctggcccagatcgccggaaacagatacgcctccggacctgtgggaaaggccctgagcgacgcatgtatgggcacaatcgcctccttcctgtctaagtaccaggacatcatcatcgaacaccagaaggtggtgaagggcaaccagaagagactggagagcctgcgggagctggccggcaaggaaaacctggaataccctagcgtgaccctgccacctcagcctcacaccaaggagggcgttgatgcctacaacgaagtgatcgcccgggtgcgaatgtgggtgaacctgaacctgtggcagaagctgaagctaagcagagatgatgccaagcctctgctgagactgaagggattcccttcctttcctctggtcgagagacaggccaacgaagtggactggtgggacatggtgtgtaacgtgaagaagctgatcaacgagaaaaaggaggatggcaaggtgttttggcagaatctggctggctacaagagacaggaagccctgagaccatacctgagcagcgaggaagatcggaagaagggaaagaaattcgctcggtaccagctgggcgacctgctgctgcacctggaaaagaagcacggcgaggactggggaaaggtgtacgacgaggcctgggagcggattgacaagaaagtggaaggcctgagcaagcacatcaagctggaagaggaacggagaagcgaggacgcccagagcaaggccgccctgaccgactggctgcgggctaaggccagcttcgtgatcgagggcctgaaggaggccgacaaggacgagttctgcagatgcgagctgaagctgcagaagtggtacggggacctgcggggaaagcccttcgccatcgaagccgagaacagcatcctggacatcagcggcttcagcaagcagtacaactgtgccttcatctggcagaaggacggcgtgaagaagctgaacctgtacctgatcatcaactacttcaagggcggcaagctgcggttcaagaagatcaaacctgaagccttcgaagccaacagattctacaccgtgatcaacaaaaagagcggcgagatcgtgcccatggaggtgaacttcaacttcgacgaccccaacctgatcatcctgcctctggcctttggcaagagacagggcagagaattcatctggaacgacctgctgtccctggaaaccggcagcctgaagctggccaacggaagagtgatcgagaagacactgtacaacagaagaacccggcaggatgagcctgccctgttcgtggccctgaccttcgagcggcgggaggtcctggactcctccaatatcaaaccaatgaacctgatcggcgtggcaagaggcgaaaacatccccgccgtgatcgccctgaccgaccccgagggctgcccactgagccggtttaaggatagcctgggaaacccaacccacatcctgagaatcggcgagagctataaggagaagcagcggaccatccaggccaagaaggaggtggagcagcggagagccggcggctacagccggaagtacgccagcaaagccaagaatctggcagacgatatggtgagaaacaccgctagagatctgctgtactacgccgtgacccaggatgccatgctgatcttcgccaacctgagccggggcttcggccggcagggcaagcggaccttcatggccgagagacagtacacacggatggaggactggctgaccgccaagctggcctacgagggcctgagcaagacctacctgtccaagacactggcccagtacacctccaagacatgcagcaactgtgggtttaccatcaccagcgccgactacgacagggtgctggagaagctgaagaagacagcaacaggctggatgaccacaattaacggcaaggagctgaaggtggagggccagattacctactacaacagatacaagagacagaacgtagtcaaggacctgtccgtcgagctggatagactgagcgaagaatctgtgaacaacgacatctcctcctggacaaagggcagaagcggagaagctctgagcctcctgaagaaaagattctcccatagacccgtgcaggagaagttcgtgtgcctgaactgcggcttcgagacacacgcagccgagcaagccgccctgaacatcgccagatcctggctgttcctgcggagccaggagtacaagaaataccagacaaacaagacaaccggcaacaccgataagagagccttcgtcgagacctggcagtccttttaccggaagaagcttaaggaggtgtggaaacctgccgtgcggtctggcggatctggcggaggctccacaagcgccgagggccacgtgaccttcgaggacgtggccgtgtacttcagctgggaggagtggggcctgctggacgaggcccagaggctgctgtacagggacgtgatgctggagaacctggccctgatggccagcctgggcctggccagcagcaggacccacgagatcacccagctggagtggtggagggagcccttcctgcccccctgcggcgtggtgaccgccgccatgcccaggggctggaggaggaccagccccaagaaaaagagaaaagtctaagctgccttctgcggggcttgccttctggccatgcccttcttctctcccttgcacctgtacctcttggtctttgaataaagcctgagtaggaaggctagcaaaaaaaaaaaaaaaaaaaaaaaaaaaaaaaaaaaaaaaaaaaaaaaaaaaaaaaaaaaaaaaaaaaaaaaaaaaaaaaa

SEQ ID NO: 6173 - RNA, 5797 nt, synthetic construct
  source 1..5797: mol_type = other RNA
aggaaataagagagaaaagaagagtaagaagaaatataagagccaccatggcccctaagaagaagcgtaaagtgagccggatggaacgcctcgtctacgaggtgcggcagaagtgcagaaacatcgaggacatctgcatctcctgcggatctctgaacgtgaccctggagcacccactgttcatcggcggcatgtgccagaactgtaaaaactgttttctggagtgtgcctatcaatacgacgatgacggctaccagagctactgcaccatctgttgcggcggaagagaggtgctgatgtgtggaaataacaactgctgccggtgcttctgcgtggaatgcgtggacctgctggtgggccccggcgccgcccaggccgctattaaggaagatccttggaactgctacatgtgcggccacaagggcacatacggcctgctgagacggagagaggactggcctagcagactgcagatgttcttcgccaataaccacgaccaggagttcgacccccctaaggtgtaccctcccgtccccgccgagaagagaaagcccatccgggtcctgagcctgttcgatggcatcgccaccggtctgctggtgctgaaggacctgggcatccaggtggataggtacattgcctccgaggtgtgcgaggactccatcaccgtgggaatggtgcgtcatcagggcaagatcatgtacgtgggcgacgtgcggagcgtgacacagaagcatatccaggagtggggccctttcgacctggtgatcggcggcagcccttgcaatgacctgagcatcgtgaacccagcccggaagggcctgtacgagggaaccggcagactgttcttcgagttttacagactgctgcacgacgcccggcctaaggaaggcgacgaccggcccttcttttggctgttcgagaatgtggtggccatgggagtcagcgacaagcgggatattagccggttcctggagagcaaccccgtgatgatcgatgccaaggaagtgagcgccgcccaccgggccagatacttctggggcaatctgcctggcatgaacagacccctggccagcaccgtgaacgacaagctggagctgcaggagtgcctggagcacggccggatcgccaagttcagcaaggtgagaaccatcaccacccgaagcaacagcatcaaacaaggcaaggaccagcactttcctgtgttcatgaacgagaaggaggacatcctgtggtgtaccgagatggagagagtgttcgggttcccagtccactacacagatgtcagcaacatgtctagactggccagacagagactgctgggaagaagctggtccgtccctgtgatcagacacctgttcgcccctctgaaggagtacttcgcctgcgtgagcagcggcaacagcaacgccaacagccggggccccagcttctctagcggcctggtgccactgtccctgagagggagccacatgggccccatggagatctacaaaaccgtgagcgcctggaagcggcagcctgtgcgcgtgctgagcctgtttcggaatatcgataaagtcctgaaaagcctgggattcctggagagcggctctggctccggcggtggcaccctgaagtacgtggaggatgtgacaaacgtggtcagacgggatgtggagaagtggggccccttcgatctggtgtacggcagcacccaacccctgggcagctcttgtgaccggtgccctggctggtacatgtttcagttccaccggatcctgcagtacgccctgccgagacaggagtcccagcggccattcttttggattttcatggacaacttgctgctgaccgaggatgaccaggaaactaccactcggttcctgcagaccgaagccgtgaccctgcaggacgtgagaggccgggactaccagaacgccatgcgggtgtggtccaacatccctggactgaaaagcaagcacgcacctctgacccctaaagaagaggagtacctgcaggcccaggtgcggagcagaagcaagctggacgcccctaaggtggatctgctggtgaagaattgcctcctgcccctgagagagtacttcaagtatttcagccagaatagtctgcccctgggcggcccaagcagcggcgcccctcctcccagcggcggcagcccagccggctccccaacctctaccgaggagggcacctctgagtccgccacccccgagagcggccctggcacctccaccgagcccagcgagggcagcgcacccggcagccctgccggcagccccacctccacagaggagggaaccagcaccgagcccagcgaaggcagcgccccaggcaccagcaccgagcctagtgagggcggctctggcggcggcagcgcccaggagattaaacggatcaacaagatcagaagaagacttgtgaaagacagcaacaccaagaaggccggcaagacaggccccatgaaaaccctgctggttagagtgatgacacccgatctgagagagcggctggaaaacctgagaaagaagcctgaaaatatcccccagcccatcagcaatacatctagagccaacctgaataagctgctgaccgattacaccgaaatgaagaaggcgatcctgcatgtgtactgggaagagttccagaaggaccctgtgggcctgatgagccgggtggcccagcctgccagcaagaagatcgatcagaacaagctgaaacctgagatggacgagaagggcaacctgaccaccgccggctttgcctgctctcagtgtggccagcccctgttcgtgtacaagctggagcaggtgtctgagaagggcaaggcttacaccaactacttcggacggtgcaatgtggccgagcacgaaaagctgatcctgctggcccagctgaagcccgagaaggatagcgacgaagccgtgacatatagcctgggaaagtttgggcagagggccctggatttctacagcattcatgtgaccaaggagtccacccaccccgtgaagcccctggcccagatcgccggaaacagatacgcctccggacctgtgggaaaggccctgagcgacgcatgtatgggcacaatcgcctccttcctgtctaagtaccaggacatcatcatcgaacaccagaaggtggtgaagggcaaccagaagagactggagagcctgcgggagctggccggcaaggaaaacctggaataccctagcgtgaccctgccacctcagcctcacaccaaggagggcgttgatgcctacaacgaagtgatcgcccgggtgcgaatgtgggtgaacctgaacctgtggcagaagctgaagctaagcagagatgatgccaagcctctgctgagactgaagggattcccttcctttcctctggtcgagagacaggccaacgaagtggactggtgggacatggtgtgtaacgtgaagaagctgatcaacgagaaaaaggaggatggcaaggtgttttggcagaatctggctggctacaagagacaggaagccctgagaccatacctgagcagcgaggaagatcggaagaagggaaagaaattcgctcggtaccagctgggcgacctgctgctgcacctggaaaagaagcacggcgaggactggggaaaggtgtacgacgaggcctgggagcggattgacaagaaagtggaaggcctgagcaagcacatcaagctggaagaggaacggagaagcgaggacgcccagagcaaggccgccctgaccgactggctgcgggctaaggccagcttcgtgatcgagggcctgaaggaggccgacaaggacgagttctgcagatgcgagctgaagctgcagaagtggtacggggacctgcggggaaagcccttcgccatcgaagccgagaacagcatcctggacatcagcggcttcagcaagcagtacaactgtgccttcatctggcagaaggacggcgtgaagaagctgaacctgtacctgatcatcaactacttcaagggcggcaagctgcggttcaagaagatcaaacctgaagccttcgaagccaacagattctacaccgtgatcaacaaaaagagcggcgagatcgtgcccatggaggtgaacttcaacttcgacgaccccaacctgatcatcctgcctctggcctttggcaagagacagggcagagaattcatctggaacgacctgctgtccctggaaaccggcagcctgaagctggccaacggaagagtgatcgagaagacactgtacaacagaagaacccggcaggatgagcctgccctgttcgtggccctgaccttcgagcggcgggaggtcctggactcctccaatatcaaaccaatgaacctgatcggcgtggcaagaggcgaaaacatccccgccgtgatcgccctgaccgaccccgagggctgcccactgagccggtttaaggatagcctgggaaacccaacccacatcctgagaatcggcgagagctataaggagaagcagcggaccatccaggccaagaaggaggtggagcagcggagagccggcggctacagccggaagtacgccagcaaagccaagaatctggcagacgatatggtgagaaacaccgctagagatctgctgtactacgccgtgacccaggatgccatgctgatcttcgccaacctgagccggggcttcggccggcagggcaagcggaccttcatggccgagagacagtacacacggatggaggactggctgaccgccaagctggcctacgagggcctgagcaagacctacctgtccaagacactggcccagtacacctccaagacatgcagcaactgtgggtttaccatcaccagcgccgactacgacagggtgctggagaagctgaagaagacagcaacaggctggatgaccacaattaacggcaaggagctgaaggtggagggccagattacctactacaacagatacaagagacagaacgtagtcaaggacctgtccgtcgagctggatagactgagcgaagaatctgtgaacaacgacatctcctcctggacaaagggcagaagcggagaagctctgagcctcctgaagaaaagattctcccatagacccgtgcaggagaagttcgtgtgcctgaactgcggcttcgagacacacgcagccgagcaagccgccctgaacatcgccagatcctggctgttcctgcggagccaggagtacaagaaataccagacaaacaagacaaccggcaacaccgataagagagccttcgtcgagacctggcagtccttttaccggaagaagcttaaggaggtgtggaaacctgccgtgcggtctggcggatctggcggaggctccacaagcccccaggacctggtgaccttcaaggacgtggccatcgacttcagccaggaggagtgggagtggctgaaccccgcccagaggagcctgtacaggagcatgatgctggagaactaccagagcctggtgagcgtgggcctgtgcgtgagcaagccctacgtgatcagcctgctggagcagggcaaggagccctgggagatgaagagcgagatgaggaggacccccttccccgactgggagagcgtgaccagccccaagaaaaagagaaaagtctaagctgccttctgcggggcttgccttctggccatgcccttcttctctcccttgcacctgtacctcttggtctttgaataaagcctgagtaggaaggctagcaaaaaaaaaaaaaaaaaaaaaaaaaaaaaaaaaaaaaaaaaaaaaaaaaaaaaaaaaaaaaaaaaaaaaaaaaaaaaaaa

SEQ ID NO: 6174 - RNA, 5797 nt, synthetic construct
  source 1..5797: mol_type = other RNA
aggaaataagagagaaaagaagagtaagaagaaatataagagccaccatggcccctaagaagaagcgtaaagtgagccggatggaacgcctcgtctacgaggtgcggcagaagtgcagaaacatcgaggacatctgcatctcctgcggatctctgaacgtgaccctggagcacccactgttcatcggcggcatgtgccagaactgtaaaaactgttttctggagtgtgcctatcaatacgacgatgacggctaccagagctactgcaccatctgttgcggcggaagagaggtgctgatgtgtggaaataacaactgctgccggtgcttctgcgtggaatgcgtggacctgctggtgggccccggcgccgcccaggccgctattaaggaagatccttggaactgctacatgtgcggccacaagggcacatacggcctgctgagacggagagaggactggcctagcagactgcagatgttcttcgccaataaccacgaccaggagttcgacccccctaaggtgtaccctcccgtccccgccgagaagagaaagcccatccgggtcctgagcctgttcgatggcatcgccaccggtctgctggtgctgaaggacctgggcatccaggtggataggtacattgcctccgaggtgtgcgaggactccatcaccgtgggaatggtgcgtcatcagggcaagatcatgtacgtgggcgacgtgcggagcgtgacacagaagcatatccaggagtggggccctttcgacctggtgatcggcggcagcccttgcaatgacctgagcatcgtgaacccagcccggaagggcctgtacgagggaaccggcagactgttcttcgagttttacagactgctgcacgacgcccggcctaaggaaggcgacgaccggcccttcttttggctgttcgagaatgtggtggccatgggagtcagcgacaagcgggatattagccggttcctggagagcaaccccgtgatgatcgatgccaaggaagtgagcgccgcccaccgggccagatacttctggggcaatctgcctggcatgaacagacccctggccagcaccgtgaacgacaagctggagctgcaggagtgcctggagcacggccggatcgccaagttcagcaaggtgagaaccatcaccacccgaagcaacagcatcaaacaaggcaaggaccagcactttcctgtgttcatgaacgagaaggaggacatcctgtggtgtaccgagatggagagagtgttcgggttcccagtccactacacagatgtcagcaacatgtctagactggccagacagagactgctgggaagaagctggtccgtccctgtgatcagacacctgttcgcccctctgaaggagtacttcgcctgcgtgagcagcggcaacagcaacgccaacagccggggccccagcttctctagcggcctggtgccactgtccctgagagggagccacatgggccccatggagatctacaaaaccgtgagcgcctggaagcggcagcctgtgcgcgtgctgagcctgtttcggaatatcgataaagtcctgaaaagcctgggattcctggagagcggctctggctccggcggtggcaccctgaagtacgtggaggatgtgacaaacgtggtcagacgggatgtggagaagtggggccccttcgatctggtgtacggcagcacccaacccctgggcagctcttgtgaccggtgccctggctggtacatgtttcagttccaccggatcctgcagtacgccctgccgagacaggagtcccagcggccattcttttggattttcatggacaacttgctgctgaccgaggatgaccaggaaactaccactcggttcctgcagaccgaagccgtgaccctgcaggacgtgagaggccgggactaccagaacgccatgcgggtgtggtccaacatccctggactgaaaagcaagcacgcacctctgacccctaaagaagaggagtacctgcaggcccaggtgcggagcagaagcaagctggacgcccctaaggtggatctgctggtgaagaattgcctcctgcccctgagagagtacttcaagtatttcagccagaatagtctgcccctgggcggcccaagcagcggcgcccctcctcccagcggcggcagcccagccggctccccaacctctaccgaggagggcacctctgagtccgccacccccgagagcggccctggcacctccaccgagcccagcgagggcagcgcacccggcagccctgccggcagccccacctccacagaggagggaaccagcaccgagcccagcgaaggcagcgccccaggcaccagcaccgagcctagtgagggcggctctggcggcggcagcgcccaggagattaaacggatcaacaagatcagaagaagacttgtgaaagacagcaacaccaagaaggccggcaagacaggccccatgaaaaccctgctggttagagtgatgacacccgatctgagagagcggctggaaaacctgagaaagaagcctgaaaatatcccccagcccatcagcaatacatctagagccaacctgaataagctgctgaccgattacaccgaaatgaagaaggcgatcctgcatgtgtactgggaagagttccagaaggaccctgtgggcctgatgagccgggtggcccagcctgccagcaagaagatcgatcagaacaagctgaaacctgagatggacgagaagggcaacctgaccaccgccggctttgcctgctctcagtgtggccagcccctgttcgtgtacaagctggagcaggtgtctgagaagggcaaggcttacaccaactacttcggacggtgcaatgtggccgagcacgaaaagctgatcctgctggcccagctgaagcccgagaaggatagcgacgaagccgtgacatatagcctgggaaagtttgggcagagggccctggatttctacagcattcatgtgaccaaggagtccacccaccccgtgaagcccctggcccagatcgccggaaacagatacgcctccggacctgtgggaaaggccctgagcgacgcatgtatgggcacaatcgcctccttcctgtctaagtaccaggacatcatcatcgaacaccagaaggtggtgaagggcaaccagaagagactggagagcctgcgggagctggccggcaaggaaaacctggaataccctagcgtgaccctgccacctcagcctcacaccaaggagggcgttgatgcctacaacgaagtgatcgcccgggtgcgaatgtgggtgaacctgaacctgtggcagaagctgaagctaagcagagatgatgccaagcctctgctgagactgaagggattcccttcctttcctctggtcgagagacaggccaacgaagtggactggtgggacatggtgtgtaacgtgaagaagctgatcaacgagaaaaaggaggatggcaaggtgttttggcagaatctggctggctacaagagacaggaagccctgagaccatacctgagcagcgaggaagatcggaagaagggaaagaaattcgctcggtaccagctgggcgacctgctgctgcacctggaaaagaagcacggcgaggactggggaaaggtgtacgacgaggcctgggagcggattgacaagaaagtggaaggcctgagcaagcacatcaagctggaagaggaacggagaagcgaggacgcccagagcaaggccgccctgaccgactggctgcgggctaaggccagcttcgtgatcgagggcctgaaggaggccgacaaggacgagttctgcagatgcgagctgaagctgcagaagtggtacggggacctgcggggaaagcccttcgccatcgaagccgagaacagcatcctggacatcagcggcttcagcaagcagtacaactgtgccttcatctggcagaaggacggcgtgaagaagctgaacctgtacctgatcatcaactacttcaagggcggcaagctgcggttcaagaagatcaaacctgaagccttcgaagccaacagattctacaccgtgatcaacaaaaagagcggcgagatcgtgcccatggaggtgaacttcaacttcgacgaccccaacctgatcatcctgcctctggcctttggcaagagacagggcagagaattcatctggaacgacctgctgtccctggaaaccggcagcctgaagctggccaacggaagagtgatcgagaagacactgtacaacagaagaacccggcaggatgagcctgccctgttcgtggccctgaccttcgagcggcgggaggtcctggactcctccaatatcaaaccaatgaacctgatcggcgtggcaagaggcgaaaacatccccgccgtgatcgccctgaccgaccccgagggctgcccactgagccggtttaaggatagcctgggaaacccaacccacatcctgagaatcggcgagagctataaggagaagcagcggaccatccaggccaagaaggaggtggagcagcggagagccggcggctacagccggaagtacgccagcaaagccaagaatctggcagacgatatggtgagaaacaccgctagagatctgctgtactacgccgtgacccaggatgccatgctgatcttcgccaacctgagccggggcttcggccggcagggcaagcggaccttcatggccgagagacagtacacacggatggaggactggctgaccgccaagctggcctacgagggcctgagcaagacctacctgtccaagacactggcccagtacacctccaagacatgcagcaactgtgggtttaccatcaccagcgccgactacgacagggtgctggagaagctgaagaagacagcaacaggctggatgaccacaattaacggcaaggagctgaaggtggagggccagattacctactacaacagatacaagagacagaacgtagtcaaggacctgtccgtcgagctggatagactgagcgaagaatctgtgaacaacgacatctcctcctggacaaagggcagaagcggagaagctctgagcctcctgaagaaaagattctcccatagacccgtgcaggagaagttcgtgtgcctgaactgcggcttcgagacacacgcagccgagcaagccgccctgaacatcgccagatcctggctgttcctgcggagccaggagtacaagaaataccagacaaacaagacaaccggcaacaccgataagagagccttcgtcgagacctggcagtccttttaccggaagaagcttaaggaggtgtggaaacctgccgtgcggtctggcggatctggcggaggctccacaagcttccagggcagcatcagcttcaaggacgtgaccgtgggcttcagccaggaggagtggcagcacctgaaccccagccagagggccctgtacagggacgtgatgctggagaactacagcaacctggtgagcgtgggctactgcgtgcacaagcccgaggtgatcagcaggctggagcagggcgaggagccctggaggctggaggaggagttccccagccagagcttcagcgaggtgtggaccgccaccagccccaagaaaaagagaaaagtctaagctgccttctgcggggcttgccttctggccatgcccttcttctctcccttgcacctgtacctcttggtctttgaataaagcctgagtaggaaggctagcaaaaaaaaaaaaaaaaaaaaaaaaaaaaaaaaaaaaaaaaaaaaaaaaaaaaaaaaaaaaaaaaaaaaaaaaaaaaaaaa

SEQ ID NO: 6175 - RNA, 5797 nt, synthetic construct
  source 1..5797: mol_type = other RNA
aggaaataagagagaaaagaagagtaagaagaaatataagagccaccatggcccctaagaagaagcgtaaagtgagccggatggaacgcctcgtctacgaggtgcggcagaagtgcagaaacatcgaggacatctgcatctcctgcggatctctgaacgtgaccctggagcacccactgttcatcggcggcatgtgccagaactgtaaaaactgttttctggagtgtgcctatcaatacgacgatgacggctaccagagctactgcaccatctgttgcggcggaagagaggtgctgatgtgtggaaataacaactgctgccggtgcttctgcgtggaatgcgtggacctgctggtgggccccggcgccgcccaggccgctattaaggaagatccttggaactgctacatgtgcggccacaagggcacatacggcctgctgagacggagagaggactggcctagcagactgcagatgttcttcgccaataaccacgaccaggagttcgacccccctaaggtgtaccctcccgtccccgccgagaagagaaagcccatccgggtcctgagcctgttcgatggcatcgccaccggtctgctggtgctgaaggacctgggcatccaggtggataggtacattgcctccgaggtgtgcgaggactccatcaccgtgggaatggtgcgtcatcagggcaagatcatgtacgtgggcgacgtgcggagcgtgacacagaagcatatccaggagtggggccctttcgacctggtgatcggcggcagcccttgcaatgacctgagcatcgtgaacccagcccggaagggcctgtacgagggaaccggcagactgttcttcgagttttacagactgctgcacgacgcccggcctaaggaaggcgacgaccggcccttcttttggctgttcgagaatgtggtggccatgggagtcagcgacaagcgggatattagccggttcctggagagcaaccccgtgatgatcgatgccaaggaagtgagcgccgcccaccgggccagatacttctggggcaatctgcctggcatgaacagacccctggccagcaccgtgaacgacaagctggagctgcaggagtgcctggagcacggccggatcgccaagttcagcaaggtgagaaccatcaccacccgaagcaacagcatcaaacaaggcaaggaccagcactttcctgtgttcatgaacgagaaggaggacatcctgtggtgtaccgagatggagagagtgttcgggttcccagtccactacacagatgtcagcaacatgtctagactggccagacagagactgctgggaagaagctggtccgtccctgtgatcagacacctgttcgcccctctgaaggagtacttcgcctgcgtgagcagcggcaacagcaacgccaacagccggggccccagcttctctagcggcctggtgccactgtccctgagagggagccacatgggccccatggagatctacaaaaccgtgagcgcctggaagcggcagcctgtgcgcgtgctgagcctgtttcggaatatcgataaagtcctgaaaagcctgggattcctggagagcggctctggctccggcggtggcaccctgaagtacgtggaggatgtgacaaacgtggtcagacgggatgtggagaagtggggccccttcgatctggtgtacggcagcacccaacccctgggcagctcttgtgaccggtgccctggctggtacatgtttcagttccaccggatcctgcagtacgccctgccgagacaggagtcccagcggccattcttttggattttcatggacaacttgctgctgaccgaggatgaccaggaaactaccactcggttcctgcagaccgaagccgtgaccctgcaggacgtgagaggccgggactaccagaacgccatgcgggtgtggtccaacatccctggactgaaaagcaagcacgcacctctgacccctaaagaagaggagtacctgcaggcccaggtgcggagcagaagcaagctggacgcccctaaggtggatctgctggtgaagaattgcctcctgcccctgagagagtacttcaagtatttcagccagaatagtctgcccctgggcggcccaagcagcggcgcccctcctcccagcggcggcagcccagccggctccccaacctctaccgaggagggcacctctgagtccgccacccccgagagcggccctggcacctccaccgagcccagcgagggcagcgcacccggcagccctgccggcagccccacctccacagaggagggaaccagcaccgagcccagcgaaggcagcgccccaggcaccagcaccgagcctagtgagggcggctctggcggcggcagcgcccaggagattaaacggatcaacaagatcagaagaagacttgtgaaagacagcaacaccaagaaggccggcaagacaggccccatgaaaaccctgctggttagagtgatgacacccgatctgagagagcggctggaaaacctgagaaagaagcctgaaaatatcccccagcccatcagcaatacatctagagccaacctgaataagctgctgaccgattacaccgaaatgaagaaggcgatcctgcatgtgtactgggaagagttccagaaggaccctgtgggcctgatgagccgggtggcccagcctgccagcaagaagatcgatcagaacaagctgaaacctgagatggacgagaagggcaacctgaccaccgccggctttgcctgctctcagtgtggccagcccctgttcgtgtacaagctggagcaggtgtctgagaagggcaaggcttacaccaactacttcggacggtgcaatgtggccgagcacgaaaagctgatcctgctggcccagctgaagcccgagaaggatagcgacgaagccgtgacatatagcctgggaaagtttgggcagagggccctggatttctacagcattcatgtgaccaaggagtccacccaccccgtgaagcccctggcccagatcgccggaaacagatacgcctccggacctgtgggaaaggccctgagcgacgcatgtatgggcacaatcgcctccttcctgtctaagtaccaggacatcatcatcgaacaccagaaggtggtgaagggcaaccagaagagactggagagcctgcgggagctggccggcaaggaaaacctggaataccctagcgtgaccctgccacctcagcctcacaccaaggagggcgttgatgcctacaacgaagtgatcgcccgggtgcgaatgtgggtgaacctgaacctgtggcagaagctgaagctaagcagagatgatgccaagcctctgctgagactgaagggattcccttcctttcctctggtcgagagacaggccaacgaagtggactggtgggacatggtgtgtaacgtgaagaagctgatcaacgagaaaaaggaggatggcaaggtgttttggcagaatctggctggctacaagagacaggaagccctgagaccatacctgagcagcgaggaagatcggaagaagggaaagaaattcgctcggtaccagctgggcgacctgctgctgcacctggaaaagaagcacggcgaggactggggaaaggtgtacgacgaggcctgggagcggattgacaagaaagtggaaggcctgagcaagcacatcaagctggaagaggaacggagaagcgaggacgcccagagcaaggccgccctgaccgactggctgcgggctaaggccagcttcgtgatcgagggcctgaaggaggccgacaaggacgagttctgcagatgcgagctgaagctgcagaagtggtacggggacctgcggggaaagcccttcgccatcgaagccgagaacagcatcctggacatcagcggcttcagcaagcagtacaactgtgccttcatctggcagaaggacggcgtgaagaagctgaacctgtacctgatcatcaactacttcaagggcggcaagctgcggttcaagaagatcaaacctgaagccttcgaagccaacagattctacaccgtgatcaacaaaaagagcggcgagatcgtgcccatggaggtgaacttcaacttcgacgaccccaacctgatcatcctgcctctggcctttggcaagagacagggcagagaattcatctggaacgacctgctgtccctggaaaccggcagcctgaagctggccaacggaagagtgatcgagaagacactgtacaacagaagaacccggcaggatgagcctgccctgttcgtggccctgaccttcgagcggcgggaggtcctggactcctccaatatcaaaccaatgaacctgatcggcgtggcaagaggcgaaaacatccccgccgtgatcgccctgaccgaccccgagggctgcccactgagccggtttaaggatagcctgggaaacccaacccacatcctgagaatcggcgagagctataaggagaagcagcggaccatccaggccaagaaggaggtggagcagcggagagccggcggctacagccggaagtacgccagcaaagccaagaatctggcagacgatatggtgagaaacaccgctagagatctgctgtactacgccgtgacccaggatgccatgctgatcttcgccaacctgagccggggcttcggccggcagggcaagcggaccttcatggccgagagacagtacacacggatggaggactggctgaccgccaagctggcctacgagggcctgagcaagacctacctgtccaagacactggcccagtacacctccaagacatgcagcaactgtgggtttaccatcaccagcgccgactacgacagggtgctggagaagctgaagaagacagcaacaggctggatgaccacaattaacggcaaggagctgaaggtggagggccagattacctactacaacagatacaagagacagaacgtagtcaaggacctgtccgtcgagctggatagactgagcgaagaatctgtgaacaacgacatctcctcctggacaaagggcagaagcggagaagctctgagcctcctgaagaaaagattctcccatagacccgtgcaggagaagttcgtgtgcctgaactgcggcttcgagacacacgcagccgagcaagccgccctgaacatcgccagatcctggctgttcctgcggagccaggagtacaagaaataccagacaaacaagacaaccggcaacaccgataagagagccttcgtcgagacctggcagtccttttaccggaagaagcttaaggaggtgtggaaacctgccgtgcggtctggcggatctggcggaggctccacaagcacccagcccgacgaggacctgcacctgcaggtggaggagacccagctggtgaaggagagcgtgaccttcaaggacgtggccatcgacttcaccctggaggagtggaggctgatggaccccacccagaggaacctgcacaaggacgtgatgctggagaactacaggaacctggtgagcctgggcctggccgtgagcaagcccgacatgatcagccacctggagaacggcaagggcccctgggtgaccagccccaagaaaaagagaaaagtctaagctgccttctgcggggcttgccttctggccatgcccttcttctctcccttgcacctgtacctcttggtctttgaataaagcctgagtaggaaggctagcaaaaaaaaaaaaaaaaaaaaaaaaaaaaaaaaaaaaaaaaaaaaaaaaaaaaaaaaaaaaaaaaaaaaaaaaaaaaaaaa

SEQ ID NO: 6176 - RNA, 5797 nt, synthetic construct
  source 1..5797: mol_type = other RNA
aggaaataagagagaaaagaagagtaagaagaaatataagagccaccatggcccctaagaagaagcgtaaagtgagccggatggaacgcctcgtctacgaggtgcggcagaagtgcagaaacatcgaggacatctgcatctcctgcggatctctgaacgtgaccctggagcacccactgttcatcggcggcatgtgccagaactgtaaaaactgttttctggagtgtgcctatcaatacgacgatgacggctaccagagctactgcaccatctgttgcggcggaagagaggtgctgatgtgtggaaataacaactgctgccggtgcttctgcgtggaatgcgtggacctgctggtgggccccggcgccgcccaggccgctattaaggaagatccttggaactgctacatgtgcggccacaagggcacatacggcctgctgagacggagagaggactggcctagcagactgcagatgttcttcgccaataaccacgaccaggagttcgacccccctaaggtgtaccctcccgtccccgccgagaagagaaagcccatccgggtcctgagcctgttcgatggcatcgccaccggtctgctggtgctgaaggacctgggcatccaggtggataggtacattgcctccgaggtgtgcgaggactccatcaccgtgggaatggtgcgtcatcagggcaagatcatgtacgtgggcgacgtgcggagcgtgacacagaagcatatccaggagtggggccctttcgacctggtgatcggcggcagcccttgcaatgacctgagcatcgtgaacccagcccggaagggcctgtacgagggaaccggcagactgttcttcgagttttacagactgctgcacgacgcccggcctaaggaaggcgacgaccggcccttcttttggctgttcgagaatgtggtggccatgggagtcagcgacaagcgggatattagccggttcctggagagcaaccccgtgatgatcgatgccaaggaagtgagcgccgcccaccgggccagatacttctggggcaatctgcctggcatgaacagacccctggccagcaccgtgaacgacaagctggagctgcaggagtgcctggagcacggccggatcgccaagttcagcaaggtgagaaccatcaccacccgaagcaacagcatcaaacaaggcaaggaccagcactttcctgtgttcatgaacgagaaggaggacatcctgtggtgtaccgagatggagagagtgttcgggttcccagtccactacacagatgtcagcaacatgtctagactggccagacagagactgctgggaagaagctggtccgtccctgtgatcagacacctgttcgcccctctgaaggagtacttcgcctgcgtgagcagcggcaacagcaacgccaacagccggggccccagcttctctagcggcctggtgccactgtccctgagagggagccacatgggccccatggagatctacaaaaccgtgagcgcctggaagcggcagcctgtgcgcgtgctgagcctgtttcggaatatcgataaagtcctgaaaagcctgggattcctggagagcggctctggctccggcggtggcaccctgaagtacgtggaggatgtgacaaacgtggtcagacgggatgtggagaagtggggccccttcgatctggtgtacggcagcacccaacccctgggcagctcttgtgaccggtgccctggctggtacatgtttcagttccaccggatcctgcagtacgccctgccgagacaggagtcccagcggccattcttttggattttcatggacaacttgctgctgaccgaggatgaccaggaaactaccactcggttcctgcagaccgaagccgtgaccctgcaggacgtgagaggccgggactaccagaacgccatgcgggtgtggtccaacatccctggactgaaaagcaagcacgcacctctgacccctaaagaagaggagtacctgcaggcccaggtgcggagcagaagcaagctggacgcccctaaggtggatctgctggtgaagaattgcctcctgcccctgagagagtacttcaagtatttcagccagaatagtctgcccctgggcggcccaagcagcggcgcccctcctcccagcggcggcagcccagccggctccccaacctctaccgaggagggcacctctgagtccgccacccccgagagcggccctggcacctccaccgagcccagcgagggcagcgcacccggcagccctgccggcagccccacctccacagaggagggaaccagcaccgagcccagcgaaggcagcgccccaggcaccagcaccgagcctagtgagggcggctctggcggcggcagcgcccaggagattaaacggatcaacaagatcagaagaagacttgtgaaagacagcaacaccaagaaggccggcaagacaggccccatgaaaaccctgctggttagagtgatgacacccgatctgagagagcggctggaaaacctgagaaagaagcctgaaaatatcccccagcccatcagcaatacatctagagccaacctgaataagctgctgaccgattacaccgaaatgaagaaggcgatcctgcatgtgtactgggaagagttccagaaggaccctgtgggcctgatgagccgggtggcccagcctgccagcaagaagatcgatcagaacaagctgaaacctgagatggacgagaagggcaacctgaccaccgccggctttgcctgctctcagtgtggccagcccctgttcgtgtacaagctggagcaggtgtctgagaagggcaaggcttacaccaactacttcggacggtgcaatgtggccgagcacgaaaagctgatcctgctggcccagctgaagcccgagaaggatagcgacgaagccgtgacatatagcctgggaaagtttgggcagagggccctggatttctacagcattcatgtgaccaaggagtccacccaccccgtgaagcccctggcccagatcgccggaaacagatacgcctccggacctgtgggaaaggccctgagcgacgcatgtatgggcacaatcgcctccttcctgtctaagtaccaggacatcatcatcgaacaccagaaggtggtgaagggcaaccagaagagactggagagcctgcgggagctggccggcaaggaaaacctggaataccctagcgtgaccctgccacctcagcctcacaccaaggagggcgttgatgcctacaacgaagtgatcgcccgggtgcgaatgtgggtgaacctgaacctgtggcagaagctgaagctaagcagagatgatgccaagcctctgctgagactgaagggattcccttcctttcctctggtcgagagacaggccaacgaagtggactggtgggacatggtgtgtaacgtgaagaagctgatcaacgagaaaaaggaggatggcaaggtgttttggcagaatctggctggctacaagagacaggaagccctgagaccatacctgagcagcgaggaagatcggaagaagggaaagaaattcgctcggtaccagctgggcgacctgctgctgcacctggaaaagaagcacggcgaggactggggaaaggtgtacgacgaggcctgggagcggattgacaagaaagtggaaggcctgagcaagcacatcaagctggaagaggaacggagaagcgaggacgcccagagcaaggccgccctgaccgactggctgcgggctaaggccagcttcgtgatcgagggcctgaaggaggccgacaaggacgagttctgcagatgcgagctgaagctgcagaagtggtacggggacctgcggggaaagcccttcgccatcgaagccgagaacagcatcctggacatcagcggcttcagcaagcagtacaactgtgccttcatctggcagaaggacggcgtgaagaagctgaacctgtacctgatcatcaactacttcaagggcggcaagctgcggttcaagaagatcaaacctgaagccttcgaagccaacagattctacaccgtgatcaacaaaaagagcggcgagatcgtgcccatggaggtgaacttcaacttcgacgaccccaacctgatcatcctgcctctggcctttggcaagagacagggcagagaattcatctggaacgacctgctgtccctggaaaccggcagcctgaagctggccaacggaagagtgatcgagaagacactgtacaacagaagaacccggcaggatgagcctgccctgttcgtggccctgaccttcgagcggcgggaggtcctggactcctccaatatcaaaccaatgaacctgatcggcgtggcaagaggcgaaaacatccccgccgtgatcgccctgaccgaccccgagggctgcccactgagccggtttaaggatagcctgggaaacccaacccacatcctgagaatcggcgagagctataaggagaagcagcggaccatccaggccaagaaggaggtggagcagcggagagccggcggctacagccggaagtacgccagcaaagccaagaatctggcagacgatatggtgagaaacaccgctagagatctgctgtactacgccgtgacccaggatgccatgctgatcttcgccaacctgagccggggcttcggccggcagggcaagcggaccttcatggccgagagacagtacacacggatggaggactggctgaccgccaagctggcctacgagggcctgagcaagacctacctgtccaagacactggcccagtacacctccaagacatgcagcaactgtgggtttaccatcaccagcgccgactacgacagggtgctggagaagctgaagaagacagcaacaggctggatgaccacaattaacggcaaggagctgaaggtggagggccagattacctactacaacagatacaagagacagaacgtagtcaaggacctgtccgtcgagctggatagactgagcgaagaatctgtgaacaacgacatctcctcctggacaaagggcagaagcggagaagctctgagcctcctgaagaaaagattctcccatagacccgtgcaggagaagttcgtgtgcctgaactgcggcttcgagacacacgcagccgagcaagccgccctgaacatcgccagatcctggctgttcctgcggagccaggagtacaagaaataccagacaaacaagacaaccggcaacaccgataagagagccttcgtcgagacctggcagtccttttaccggaagaagcttaaggaggtgtggaaacctgccgtgcggtctggcggatctggcggaggctccacaagcgcccaggagttcgtgatgttcagggacgtggccgtgttcttcagccaggaggagtggggccacctggaccccgcccagagggccctgtacagggaggtgatgctggagaactacagcaacctggtgagcctgggcatcaggttcagcaagcccaaggtgatcagccagctgcagcagggcgaggacccctggatggtggacaggggcgtgccccagggcgcctgccagggctggaagagcctgaccagccccaagaaaaagagaaaagtctaagctgccttctgcggggcttgccttctggccatgcccttcttctctcccttgcacctgtacctcttggtctttgaataaagcctgagtaggaaggctagcaaaaaaaaaaaaaaaaaaaaaaaaaaaaaaaaaaaaaaaaaaaaaaaaaaaaaaaaaaaaaaaaaaaaaaaaaaaaaaaa

SEQ ID NO: 6177 - RNA, 5797 nt, synthetic construct
  source 1..5797: mol_type = other RNA
aggaaataagagagaaaagaagagtaagaagaaatataagagccaccatggcccctaagaagaagcgtaaagtgagccggatggaacgcctcgtctacgaggtgcggcagaagtgcagaaacatcgaggacatctgcatctcctgcggatctctgaacgtgaccctggagcacccactgttcatcggcggcatgtgccagaactgtaaaaactgttttctggagtgtgcctatcaatacgacgatgacggctaccagagctactgcaccatctgttgcggcggaagagaggtgctgatgtgtggaaataacaactgctgccggtgcttctgcgtggaatgcgtggacctgctggtgggccccggcgccgcccaggccgctattaaggaagatccttggaactgctacatgtgcggccacaagggcacatacggcctgctgagacggagagaggactggcctagcagactgcagatgttcttcgccaataaccacgaccaggagttcgacccccctaaggtgtaccctcccgtccccgccgagaagagaaagcccatccgggtcctgagcctgttcgatggcatcgccaccggtctgctggtgctgaaggacctgggcatccaggtggataggtacattgcctccgaggtgtgcgaggactccatcaccgtgggaatggtgcgtcatcagggcaagatcatgtacgtgggcgacgtgcggagcgtgacacagaagcatatccaggagtggggccctttcgacctggtgatcggcggcagcccttgcaatgacctgagcatcgtgaacccagcccggaagggcctgtacgagggaaccggcagactgttcttcgagttttacagactgctgcacgacgcccggcctaaggaaggcgacgaccggcccttcttttggctgttcgagaatgtggtggccatgggagtcagcgacaagcgggatattagccggttcctggagagcaaccccgtgatgatcgatgccaaggaagtgagcgccgcccaccgggccagatacttctggggcaatctgcctggcatgaacagacccctggccagcaccgtgaacgacaagctggagctgcaggagtgcctggagcacggccggatcgccaagttcagcaaggtgagaaccatcaccacccgaagcaacagcatcaaacaaggcaaggaccagcactttcctgtgttcatgaacgagaaggaggacatcctgtggtgtaccgagatggagagagtgttcgggttcccagtccactacacagatgtcagcaacatgtctagactggccagacagagactgctgggaagaagctggtccgtccctgtgatcagacacctgttcgcccctctgaaggagtacttcgcctgcgtgagcagcggcaacagcaacgccaacagccggggccccagcttctctagcggcctggtgccactgtccctgagagggagccacatgggccccatggagatctacaaaaccgtgagcgcctggaagcggcagcctgtgcgcgtgctgagcctgtttcggaatatcgataaagtcctgaaaagcctgggattcctggagagcggctctggctccggcggtggcaccctgaagtacgtggaggatgtgacaaacgtggtcagacgggatgtggagaagtggggccccttcgatctggtgtacggcagcacccaacccctgggcagctcttgtgaccggtgccctggctggtacatgtttcagttccaccggatcctgcagtacgccctgccgagacaggagtcccagcggccattcttttggattttcatggacaacttgctgctgaccgaggatgaccaggaaactaccactcggttcctgcagaccgaagccgtgaccctgcaggacgtgagaggccgggactaccagaacgccatgcgggtgtggtccaacatccctggactgaaaagcaagcacgcacctctgacccctaaagaagaggagtacctgcaggcccaggtgcggagcagaagcaagctggacgcccctaaggtggatctgctggtgaagaattgcctcctgcccctgagagagtacttcaagtatttcagccagaatagtctgcccctgggcggcccaagcagcggcgcccctcctcccagcggcggcagcccagccggctccccaacctctaccgaggagggcacctctgagtccgccacccccgagagcggccctggcacctccaccgagcccagcgagggcagcgcacccggcagccctgccggcagccccacctccacagaggagggaaccagcaccgagcccagcgaaggcagcgccccaggcaccagcaccgagcctagtgagggcggctctggcggcggcagcgcccaggagattaaacggatcaacaagatcagaagaagacttgtgaaagacagcaacaccaagaaggccggcaagacaggccccatgaaaaccctgctggttagagtgatgacacccgatctgagagagcggctggaaaacctgagaaagaagcctgaaaatatcccccagcccatcagcaatacatctagagccaacctgaataagctgctgaccgattacaccgaaatgaagaaggcgatcctgcatgtgtactgggaagagttccagaaggaccctgtgggcctgatgagccgggtggcccagcctgccagcaagaagatcgatcagaacaagctgaaacctgagatggacgagaagggcaacctgaccaccgccggctttgcctgctctcagtgtggccagcccctgttcgtgtacaagctggagcaggtgtctgagaagggcaaggcttacaccaactacttcggacggtgcaatgtggccgagcacgaaaagctgatcctgctggcccagctgaagcccgagaaggatagcgacgaagccgtgacatatagcctgggaaagtttgggcagagggccctggatttctacagcattcatgtgaccaaggagtccacccaccccgtgaagcccctggcccagatcgccggaaacagatacgcctccggacctgtgggaaaggccctgagcgacgcatgtatgggcacaatcgcctccttcctgtctaagtaccaggacatcatcatcgaacaccagaaggtggtgaagggcaaccagaagagactggagagcctgcgggagctggccggcaaggaaaacctggaataccctagcgtgaccctgccacctcagcctcacaccaaggagggcgttgatgcctacaacgaagtgatcgcccgggtgcgaatgtgggtgaacctgaacctgtggcagaagctgaagctaagcagagatgatgccaagcctctgctgagactgaagggattcccttcctttcctctggtcgagagacaggccaacgaagtggactggtgggacatggtgtgtaacgtgaagaagctgatcaacgagaaaaaggaggatggcaaggtgttttggcagaatctggctggctacaagagacaggaagccctgagaccatacctgagcagcgaggaagatcggaagaagggaaagaaattcgctcggtaccagctgggcgacctgctgctgcacctggaaaagaagcacggcgaggactggggaaaggtgtacgacgaggcctgggagcggattgacaagaaagtggaaggcctgagcaagcacatcaagctggaagaggaacggagaagcgaggacgcccagagcaaggccgccctgaccgactggctgcgggctaaggccagcttcgtgatcgagggcctgaaggaggccgacaaggacgagttctgcagatgcgagctgaagctgcagaagtggtacggggacctgcggggaaagcccttcgccatcgaagccgagaacagcatcctggacatcagcggcttcagcaagcagtacaactgtgccttcatctggcagaaggacggcgtgaagaagctgaacctgtacctgatcatcaactacttcaagggcggcaagctgcggttcaagaagatcaaacctgaagccttcgaagccaacagattctacaccgtgatcaacaaaaagagcggcgagatcgtgcccatggaggtgaacttcaacttcgacgaccccaacctgatcatcctgcctctggcctttggcaagagacagggcagagaattcatctggaacgacctgctgtccctggaaaccggcagcctgaagctggccaacggaagagtgatcgagaagacactgtacaacagaagaacccggcaggatgagcctgccctgttcgtggccctgaccttcgagcggcgggaggtcctggactcctccaatatcaaaccaatgaacctgatcggcgtggcaagaggcgaaaacatccccgccgtgatcgccctgaccgaccccgagggctgcccactgagccggtttaaggatagcctgggaaacccaacccacatcctgagaatcggcgagagctataaggagaagcagcggaccatccaggccaagaaggaggtggagcagcggagagccggcggctacagccggaagtacgccagcaaagccaagaatctggcagacgatatggtgagaaacaccgctagagatctgctgtactacgccgtgacccaggatgccatgctgatcttcgccaacctgagccggggcttcggccggcagggcaagcggaccttcatggccgagagacagtacacacggatggaggactggctgaccgccaagctggcctacgagggcctgagcaagacctacctgtccaagacactggcccagtacacctccaagacatgcagcaactgtgggtttaccatcaccagcgccgactacgacagggtgctggagaagctgaagaagacagcaacaggctggatgaccacaattaacggcaaggagctgaaggtggagggccagattacctactacaacagatacaagagacagaacgtagtcaaggacctgtccgtcgagctggatagactgagcgaagaatctgtgaacaacgacatctcctcctggacaaagggcagaagcggagaagctctgagcctcctgaagaaaagattctcccatagacccgtgcaggagaagttcgtgtgcctgaactgcggcttcgagacacacgcagccgagcaagccgccctgaacatcgccagatcctggctgttcctgcggagccaggagtacaagaaataccagacaaacaagacaaccggcaacaccgataagagagccttcgtcgagacctggcagtccttttaccggaagaagcttaaggaggtgtggaaacctgccgtgcggtctggcggatctggcggaggctccacaagcatggacagcgtggccttcgaggacgtggccgtgagcttcacccaggaggagtgggccctgctggaccccagccagaagaacctgtacagggacgtgatgcaggagaccttcaagaacctgaccagcgtgggcaagacctggaaggtgcagaacatcgaggacgagtacaagaaccccaggaggaacctgaggaggagcttcaccctggtggcccaggccggcgtgaggcaggacctgggcagcaccagccccaagaaaaagagaaaagtctaagctgccttctgcggggcttgccttctggccatgcccttcttctctcccttgcacctgtacctcttggtctttgaataaagcctgagtaggaaggctagcaaaaaaaaaaaaaaaaaaaaaaaaaaaaaaaaaaaaaaaaaaaaaaaaaaaaaaaaaaaaaaaaaaaaaaaaaaaaaaaa

SEQ ID NO: 6178 - RNA, 5797 nt, synthetic construct
  source 1..5797: mol_type = other RNA
aggaaataagagagaaaagaagagtaagaagaaatataagagccaccatggcccctaagaagaagcgtaaagtgagccggatggaacgcctcgtctacgaggtgcggcagaagtgcagaaacatcgaggacatctgcatctcctgcggatctctgaacgtgaccctggagcacccactgttcatcggcggcatgtgccagaactgtaaaaactgttttctggagtgtgcctatcaatacgacgatgacggctaccagagctactgcaccatctgttgcggcggaagagaggtgctgatgtgtggaaataacaactgctgccggtgcttctgcgtggaatgcgtggacctgctggtgggccccggcgccgcccaggccgctattaaggaagatccttggaactgctacatgtgcggccacaagggcacatacggcctgctgagacggagagaggactggcctagcagactgcagatgttcttcgccaataaccacgaccaggagttcgacccccctaaggtgtaccctcccgtccccgccgagaagagaaagcccatccgggtcctgagcctgttcgatggcatcgccaccggtctgctggtgctgaaggacctgggcatccaggtggataggtacattgcctccgaggtgtgcgaggactccatcaccgtgggaatggtgcgtcatcagggcaagatcatgtacgtgggcgacgtgcggagcgtgacacagaagcatatccaggagtggggccctttcgacctggtgatcggcggcagcccttgcaatgacctgagcatcgtgaacccagcccggaagggcctgtacgagggaaccggcagactgttcttcgagttttacagactgctgcacgacgcccggcctaaggaaggcgacgaccggcccttcttttggctgttcgagaatgtggtggccatgggagtcagcgacaagcgggatattagccggttcctggagagcaaccccgtgatgatcgatgccaaggaagtgagcgccgcccaccgggccagatacttctggggcaatctgcctggcatgaacagacccctggccagcaccgtgaacgacaagctggagctgcaggagtgcctggagcacggccggatcgccaagttcagcaaggtgagaaccatcaccacccgaagcaacagcatcaaacaaggcaaggaccagcactttcctgtgttcatgaacgagaaggaggacatcctgtggtgtaccgagatggagagagtgttcgggttcccagtccactacacagatgtcagcaacatgtctagactggccagacagagactgctgggaagaagctggtccgtccctgtgatcagacacctgttcgcccctctgaaggagtacttcgcctgcgtgagcagcggcaacagcaacgccaacagccggggccccagcttctctagcggcctggtgccactgtccctgagagggagccacatgggccccatggagatctacaaaaccgtgagcgcctggaagcggcagcctgtgcgcgtgctgagcctgtttcggaatatcgataaagtcctgaaaagcctgggattcctggagagcggctctggctccggcggtggcaccctgaagtacgtggaggatgtgacaaacgtggtcagacgggatgtggagaagtggggccccttcgatctggtgtacggcagcacccaacccctgggcagctcttgtgaccggtgccctggctggtacatgtttcagttccaccggatcctgcagtacgccctgccgagacaggagtcccagcggccattcttttggattttcatggacaacttgctgctgaccgaggatgaccaggaaactaccactcggttcctgcagaccgaagccgtgaccctgcaggacgtgagaggccgggactaccagaacgccatgcgggtgtggtccaacatccctggactgaaaagcaagcacgcacctctgacccctaaagaagaggagtacctgcaggcccaggtgcggagcagaagcaagctggacgcccctaaggtggatctgctggtgaagaattgcctcctgcccctgagagagtacttcaagtatttcagccagaatagtctgcccctgggcggcccaagcagcggcgcccctcctcccagcggcggcagcccagccggctccccaacctctaccgaggagggcacctctgagtccgccacccccgagagcggccctggcacctccaccgagcccagcgagggcagcgcacccggcagccctgccggcagccccacctccacagaggagggaaccagcaccgagcccagcgaaggcagcgccccaggcaccagcaccgagcctagtgagggcggctctggcggcggcagcgcccaggagattaaacggatcaacaagatcagaagaagacttgtgaaagacagcaacaccaagaaggccggcaagacaggccccatgaaaaccctgctggttagagtgatgacacccgatctgagagagcggctggaaaacctgagaaagaagcctgaaaatatcccccagcccatcagcaatacatctagagccaacctgaataagctgctgaccgattacaccgaaatgaagaaggcgatcctgcatgtgtactgggaagagttccagaaggaccctgtgggcctgatgagccgggtggcccagcctgccagcaagaagatcgatcagaacaagctgaaacctgagatggacgagaagggcaacctgaccaccgccggctttgcctgctctcagtgtggccagcccctgttcgtgtacaagctggagcaggtgtctgagaagggcaaggcttacaccaactacttcggacggtgcaatgtggccgagcacgaaaagctgatcctgctggcccagctgaagcccgagaaggatagcgacgaagccgtgacatatagcctgggaaagtttgggcagagggccctggatttctacagcattcatgtgaccaaggagtccacccaccccgtgaagcccctggcccagatcgccggaaacagatacgcctccggacctgtgggaaaggccctgagcgacgcatgtatgggcacaatcgcctccttcctgtctaagtaccaggacatcatcatcgaacaccagaaggtggtgaagggcaaccagaagagactggagagcctgcgggagctggccggcaaggaaaacctggaataccctagcgtgaccctgccacctcagcctcacaccaaggagggcgttgatgcctacaacgaagtgatcgcccgggtgcgaatgtgggtgaacctgaacctgtggcagaagctgaagctaagcagagatgatgccaagcctctgctgagactgaagggattcccttcctttcctctggtcgagagacaggccaacgaagtggactggtgggacatggtgtgtaacgtgaagaagctgatcaacgagaaaaaggaggatggcaaggtgttttggcagaatctggctggctacaagagacaggaagccctgagaccatacctgagcagcgaggaagatcggaagaagggaaagaaattcgctcggtaccagctgggcgacctgctgctgcacctggaaaagaagcacggcgaggactggggaaaggtgtacgacgaggcctgggagcggattgacaagaaagtggaaggcctgagcaagcacatcaagctggaagaggaacggagaagcgaggacgcccagagcaaggccgccctgaccgactggctgcgggctaaggccagcttcgtgatcgagggcctgaaggaggccgacaaggacgagttctgcagatgcgagctgaagctgcagaagtggtacggggacctgcggggaaagcccttcgccatcgaagccgagaacagcatcctggacatcagcggcttcagcaagcagtacaactgtgccttcatctggcagaaggacggcgtgaagaagctgaacctgtacctgatcatcaactacttcaagggcggcaagctgcggttcaagaagatcaaacctgaagccttcgaagccaacagattctacaccgtgatcaacaaaaagagcggcgagatcgtgcccatggaggtgaacttcaacttcgacgaccccaacctgatcatcctgcctctggcctttggcaagagacagggcagagaattcatctggaacgacctgctgtccctggaaaccggcagcctgaagctggccaacggaagagtgatcgagaagacactgtacaacagaagaacccggcaggatgagcctgccctgttcgtggccctgaccttcgagcggcgggaggtcctggactcctccaatatcaaaccaatgaacctgatcggcgtggcaagaggcgaaaacatccccgccgtgatcgccctgaccgaccccgagggctgcccactgagccggtttaaggatagcctgggaaacccaacccacatcctgagaatcggcgagagctataaggagaagcagcggaccatccaggccaagaaggaggtggagcagcggagagccggcggctacagccggaagtacgccagcaaagccaagaatctggcagacgatatggtgagaaacaccgctagagatctgctgtactacgccgtgacccaggatgccatgctgatcttcgccaacctgagccggggcttcggccggcagggcaagcggaccttcatggccgagagacagtacacacggatggaggactggctgaccgccaagctggcctacgagggcctgagcaagacctacctgtccaagacactggcccagtacacctccaagacatgcagcaactgtgggtttaccatcaccagcgccgactacgacagggtgctggagaagctgaagaagacagcaacaggctggatgaccacaattaacggcaaggagctgaaggtggagggccagattacctactacaacagatacaagagacagaacgtagtcaaggacctgtccgtcgagctggatagactgagcgaagaatctgtgaacaacgacatctcctcctggacaaagggcagaagcggagaagctctgagcctcctgaagaaaagattctcccatagacccgtgcaggagaagttcgtgtgcctgaactgcggcttcgagacacacgcagccgagcaagccgccctgaacatcgccagatcctggctgttcctgcggagccaggagtacaagaaataccagacaaacaagacaaccggcaacaccgataagagagccttcgtcgagacctggcagtccttttaccggaagaagcttaaggaggtgtggaaacctgccgtgcggtctggcggatctggcggaggctccacaagcacccaggaccccgtggtgttcgaggacgtggccgtggacttcacccaggaggagtgggccctgctgaacctggcccagaggaacctgtacagggacgtgatgctggagaacttccagaacctggccagcctgggctaccccctgcacatcccctacctgatcagccagtggaagcaggaggaggacctgggcaccgtggagaggggcaccatccagggcgagcaccaggagggcttcgagaccaccagccccaagaaaaagagaaaagtctaagctgccttctgcggggcttgccttctggccatgcccttcttctctcccttgcacctgtacctcttggtctttgaataaagcctgagtaggaaggctagcaaaaaaaaaaaaaaaaaaaaaaaaaaaaaaaaaaaaaaaaaaaaaaaaaaaaaaaaaaaaaaaaaaaaaaaaaaaaaaaa

SEQ ID NO: 6179 - RNA, 5797 nt, synthetic construct
  source 1..5797: mol_type = other RNA
aggaaataagagagaaaagaagagtaagaagaaatataagagccaccatggcccctaagaagaagcgtaaagtgagccggatggaacgcctcgtctacgaggtgcggcagaagtgcagaaacatcgaggacatctgcatctcctgcggatctctgaacgtgaccctggagcacccactgttcatcggcggcatgtgccagaactgtaaaaactgttttctggagtgtgcctatcaatacgacgatgacggctaccagagctactgcaccatctgttgcggcggaagagaggtgctgatgtgtggaaataacaactgctgccggtgcttctgcgtggaatgcgtggacctgctggtgggccccggcgccgcccaggccgctattaaggaagatccttggaactgctacatgtgcggccacaagggcacatacggcctgctgagacggagagaggactggcctagcagactgcagatgttcttcgccaataaccacgaccaggagttcgacccccctaaggtgtaccctcccgtccccgccgagaagagaaagcccatccgggtcctgagcctgttcgatggcatcgccaccggtctgctggtgctgaaggacctgggcatccaggtggataggtacattgcctccgaggtgtgcgaggactccatcaccgtgggaatggtgcgtcatcagggcaagatcatgtacgtgggcgacgtgcggagcgtgacacagaagcatatccaggagtggggccctttcgacctggtgatcggcggcagcccttgcaatgacctgagcatcgtgaacccagcccggaagggcctgtacgagggaaccggcagactgttcttcgagttttacagactgctgcacgacgcccggcctaaggaaggcgacgaccggcccttcttttggctgttcgagaatgtggtggccatgggagtcagcgacaagcgggatattagccggttcctggagagcaaccccgtgatgatcgatgccaaggaagtgagcgccgcccaccgggccagatacttctggggcaatctgcctggcatgaacagacccctggccagcaccgtgaacgacaagctggagctgcaggagtgcctggagcacggccggatcgccaagttcagcaaggtgagaaccatcaccacccgaagcaacagcatcaaacaaggcaaggaccagcactttcctgtgttcatgaacgagaaggaggacatcctgtggtgtaccgagatggagagagtgttcgggttcccagtccactacacagatgtcagcaacatgtctagactggccagacagagactgctgggaagaagctggtccgtccctgtgatcagacacctgttcgcccctctgaaggagtacttcgcctgcgtgagcagcggcaacagcaacgccaacagccggggccccagcttctctagcggcctggtgccactgtccctgagagggagccacatgggccccatggagatctacaaaaccgtgagcgcctggaagcggcagcctgtgcgcgtgctgagcctgtttcggaatatcgataaagtcctgaaaagcctgggattcctggagagcggctctggctccggcggtggcaccctgaagtacgtggaggatgtgacaaacgtggtcagacgggatgtggagaagtggggccccttcgatctggtgtacggcagcacccaacccctgggcagctcttgtgaccggtgccctggctggtacatgtttcagttccaccggatcctgcagtacgccctgccgagacaggagtcccagcggccattcttttggattttcatggacaacttgctgctgaccgaggatgaccaggaaactaccactcggttcctgcagaccgaagccgtgaccctgcaggacgtgagaggccgggactaccagaacgccatgcgggtgtggtccaacatccctggactgaaaagcaagcacgcacctctgacccctaaagaagaggagtacctgcaggcccaggtgcggagcagaagcaagctggacgcccctaaggtggatctgctggtgaagaattgcctcctgcccctgagagagtacttcaagtatttcagccagaatagtctgcccctgggcggcccaagcagcggcgcccctcctcccagcggcggcagcccagccggctccccaacctctaccgaggagggcacctctgagtccgccacccccgagagcggccctggcacctccaccgagcccagcgagggcagcgcacccggcagccctgccggcagccccacctccacagaggagggaaccagcaccgagcccagcgaaggcagcgccccaggcaccagcaccgagcctagtgagggcggctctggcggcggcagcgcccaggagattaaacggatcaacaagatcagaagaagacttgtgaaagacagcaacaccaagaaggccggcaagacaggccccatgaaaaccctgctggttagagtgatgacacccgatctgagagagcggctggaaaacctgagaaagaagcctgaaaatatcccccagcccatcagcaatacatctagagccaacctgaataagctgctgaccgattacaccgaaatgaagaaggcgatcctgcatgtgtactgggaagagttccagaaggaccctgtgggcctgatgagccgggtggcccagcctgccagcaagaagatcgatcagaacaagctgaaacctgagatggacgagaagggcaacctgaccaccgccggctttgcctgctctcagtgtggccagcccctgttcgtgtacaagctggagcaggtgtctgagaagggcaaggcttacaccaactacttcggacggtgcaatgtggccgagcacgaaaagctgatcctgctggcccagctgaagcccgagaaggatagcgacgaagccgtgacatatagcctgggaaagtttgggcagagggccctggatttctacagcattcatgtgaccaaggagtccacccaccccgtgaagcccctggcccagatcgccggaaacagatacgcctccggacctgtgggaaaggccctgagcgacgcatgtatgggcacaatcgcctccttcctgtctaagtaccaggacatcatcatcgaacaccagaaggtggtgaagggcaaccagaagagactggagagcctgcgggagctggccggcaaggaaaacctggaataccctagcgtgaccctgccacctcagcctcacaccaaggagggcgttgatgcctacaacgaagtgatcgcccgggtgcgaatgtgggtgaacctgaacctgtggcagaagctgaagctaagcagagatgatgccaagcctctgctgagactgaagggattcccttcctttcctctggtcgagagacaggccaacgaagtggactggtgggacatggtgtgtaacgtgaagaagctgatcaacgagaaaaaggaggatggcaaggtgttttggcagaatctggctggctacaagagacaggaagccctgagaccatacctgagcagcgaggaagatcggaagaagggaaagaaattcgctcggtaccagctgggcgacctgctgctgcacctggaaaagaagcacggcgaggactggggaaaggtgtacgacgaggcctgggagcggattgacaagaaagtggaaggcctgagcaagcacatcaagctggaagaggaacggagaagcgaggacgcccagagcaaggccgccctgaccgactggctgcgggctaaggccagcttcgtgatcgagggcctgaaggaggccgacaaggacgagttctgcagatgcgagctgaagctgcagaagtggtacggggacctgcggggaaagcccttcgccatcgaagccgagaacagcatcctggacatcagcggcttcagcaagcagtacaactgtgccttcatctggcagaaggacggcgtgaagaagctgaacctgtacctgatcatcaactacttcaagggcggcaagctgcggttcaagaagatcaaacctgaagccttcgaagccaacagattctacaccgtgatcaacaaaaagagcggcgagatcgtgcccatggaggtgaacttcaacttcgacgaccccaacctgatcatcctgcctctggcctttggcaagagacagggcagagaattcatctggaacgacctgctgtccctggaaaccggcagcctgaagctggccaacggaagagtgatcgagaagacactgtacaacagaagaacccggcaggatgagcctgccctgttcgtggccctgaccttcgagcggcgggaggtcctggactcctccaatatcaaaccaatgaacctgatcggcgtggcaagaggcgaaaacatccccgccgtgatcgccctgaccgaccccgagggctgcccactgagccggtttaaggatagcctgggaaacccaacccacatcctgagaatcggcgagagctataaggagaagcagcggaccatccaggccaagaaggaggtggagcagcggagagccggcggctacagccggaagtacgccagcaaagccaagaatctggcagacgatatggtgagaaacaccgctagagatctgctgtactacgccgtgacccaggatgccatgctgatcttcgccaacctgagccggggcttcggccggcagggcaagcggaccttcatggccgagagacagtacacacggatggaggactggctgaccgccaagctggcctacgagggcctgagcaagacctacctgtccaagacactggcccagtacacctccaagacatgcagcaactgtgggtttaccatcaccagcgccgactacgacagggtgctggagaagctgaagaagacagcaacaggctggatgaccacaattaacggcaaggagctgaaggtggagggccagattacctactacaacagatacaagagacagaacgtagtcaaggacctgtccgtcgagctggatagactgagcgaagaatctgtgaacaacgacatctcctcctggacaaagggcagaagcggagaagctctgagcctcctgaagaaaagattctcccatagacccgtgcaggagaagttcgtgtgcctgaactgcggcttcgagacacacgcagccgagcaagccgccctgaacatcgccagatcctggctgttcctgcggagccaggagtacaagaaataccagacaaacaagacaaccggcaacaccgataagagagccttcgtcgagacctggcagtccttttaccggaagaagcttaaggaggtgtggaaacctgccgtgcggtctggcggatctggcggaggctccacaagcagcaaggtgcccgtgaccttcggcgacctggccatctacttcagccaggaggagtgggagtggctgagccccatccagaaggacctgtacgaggacgtgatgctggagaactaccagaacctggtgagcctgggcctgagcttcaggaggcccaacgtgatcaccctgctggagaagggcagggccccctggatggtggagcccgtgaggaagaggaggggcctggacagcaggagcaagtacaccagccccaagaaaaagagaaaagtctaagctgccttctgcggggcttgccttctggccatgcccttcttctctcccttgcacctgtacctcttggtctttgaataaagcctgagtaggaaggctagcaaaaaaaaaaaaaaaaaaaaaaaaaaaaaaaaaaaaaaaaaaaaaaaaaaaaaaaaaaaaaaaaaaaaaaaaaaaaaaaa

SEQ ID NO: 6180 - RNA, 5797 nt, synthetic construct
  source 1..5797: mol_type = other RNA
aggaaataagagagaaaagaagagtaagaagaaatataagagccaccatggcccctaagaagaagcgtaaagtgagccggatggaacgcctcgtctacgaggtgcggcagaagtgcagaaacatcgaggacatctgcatctcctgcggatctctgaacgtgaccctggagcacccactgttcatcggcggcatgtgccagaactgtaaaaactgttttctggagtgtgcctatcaatacgacgatgacggctaccagagctactgcaccatctgttgcggcggaagagaggtgctgatgtgtggaaataacaactgctgccggtgcttctgcgtggaatgcgtggacctgctggtgggccccggcgccgcccaggccgctattaaggaagatccttggaactgctacatgtgcggccacaagggcacatacggcctgctgagacggagagaggactggcctagcagactgcagatgttcttcgccaataaccacgaccaggagttcgacccccctaaggtgtaccctcccgtccccgccgagaagagaaagcccatccgggtcctgagcctgttcgatggcatcgccaccggtctgctggtgctgaaggacctgggcatccaggtggataggtacattgcctccgaggtgtgcgaggactccatcaccgtgggaatggtgcgtcatcagggcaagatcatgtacgtgggcgacgtgcggagcgtgacacagaagcatatccaggagtggggccctttcgacctggtgatcggcggcagcccttgcaatgacctgagcatcgtgaacccagcccggaagggcctgtacgagggaaccggcagactgttcttcgagttttacagactgctgcacgacgcccggcctaaggaaggcgacgaccggcccttcttttggctgttcgagaatgtggtggccatgggagtcagcgacaagcgggatattagccggttcctggagagcaaccccgtgatgatcgatgccaaggaagtgagcgccgcccaccgggccagatacttctggggcaatctgcctggcatgaacagacccctggccagcaccgtgaacgacaagctggagctgcaggagtgcctggagcacggccggatcgccaagttcagcaaggtgagaaccatcaccacccgaagcaacagcatcaaacaaggcaaggaccagcactttcctgtgttcatgaacgagaaggaggacatcctgtggtgtaccgagatggagagagtgttcgggttcccagtccactacacagatgtcagcaacatgtctagactggccagacagagactgctgggaagaagctggtccgtccctgtgatcagacacctgttcgcccctctgaaggagtacttcgcctgcgtgagcagcggcaacagcaacgccaacagccggggccccagcttctctagcggcctggtgccactgtccctgagagggagccacatgggccccatggagatctacaaaaccgtgagcgcctggaagcggcagcctgtgcgcgtgctgagcctgtttcggaatatcgataaagtcctgaaaagcctgggattcctggagagcggctctggctccggcggtggcaccctgaagtacgtggaggatgtgacaaacgtggtcagacgggatgtggagaagtggggccccttcgatctggtgtacggcagcacccaacccctgggcagctcttgtgaccggtgccctggctggtacatgtttcagttccaccggatcctgcagtacgccctgccgagacaggagtcccagcggccattcttttggattttcatggacaacttgctgctgaccgaggatgaccaggaaactaccactcggttcctgcagaccgaagccgtgaccctgcaggacgtgagaggccgggactaccagaacgccatgcgggtgtggtccaacatccctggactgaaaagcaagcacgcacctctgacccctaaagaagaggagtacctgcaggcccaggtgcggagcagaagcaagctggacgcccctaaggtggatctgctggtgaagaattgcctcctgcccctgagagagtacttcaagtatttcagccagaatagtctgcccctgggcggcccaagcagcggcgcccctcctcccagcggcggcagcccagccggctccccaacctctaccgaggagggcacctctgagtccgccacccccgagagcggccctggcacctccaccgagcccagcgagggcagcgcacccggcagccctgccggcagccccacctccacagaggagggaaccagcaccgagcccagcgaaggcagcgccccaggcaccagcaccgagcctagtgagggcggctctggcggcggcagcgcccaggagattaaacggatcaacaagatcagaagaagacttgtgaaagacagcaacaccaagaaggccggcaagacaggccccatgaaaaccctgctggttagagtgatgacacccgatctgagagagcggctggaaaacctgagaaagaagcctgaaaatatcccccagcccatcagcaatacatctagagccaacctgaataagctgctgaccgattacaccgaaatgaagaaggcgatcctgcatgtgtactgggaagagttccagaaggaccctgtgggcctgatgagccgggtggcccagcctgccagcaagaagatcgatcagaacaagctgaaacctgagatggacgagaagggcaacctgaccaccgccggctttgcctgctctcagtgtggccagcccctgttcgtgtacaagctggagcaggtgtctgagaagggcaaggcttacaccaactacttcggacggtgcaatgtggccgagcacgaaaagctgatcctgctggcccagctgaagcccgagaaggatagcgacgaagccgtgacatatagcctgggaaagtttgggcagagggccctggatttctacagcattcatgtgaccaaggagtccacccaccccgtgaagcccctggcccagatcgccggaaacagatacgcctccggacctgtgggaaaggccctgagcgacgcatgtatgggcacaatcgcctccttcctgtctaagtaccaggacatcatcatcgaacaccagaaggtggtgaagggcaaccagaagagactggagagcctgcgggagctggccggcaaggaaaacctggaataccctagcgtgaccctgccacctcagcctcacaccaaggagggcgttgatgcctacaacgaagtgatcgcccgggtgcgaatgtgggtgaacctgaacctgtggcagaagctgaagctaagcagagatgatgccaagcctctgctgagactgaagggattcccttcctttcctctggtcgagagacaggccaacgaagtggactggtgggacatggtgtgtaacgtgaagaagctgatcaacgagaaaaaggaggatggcaaggtgttttggcagaatctggctggctacaagagacaggaagccctgagaccatacctgagcagcgaggaagatcggaagaagggaaagaaattcgctcggtaccagctgggcgacctgctgctgcacctggaaaagaagcacggcgaggactggggaaaggtgtacgacgaggcctgggagcggattgacaagaaagtggaaggcctgagcaagcacatcaagctggaagaggaacggagaagcgaggacgcccagagcaaggccgccctgaccgactggctgcgggctaaggccagcttcgtgatcgagggcctgaaggaggccgacaaggacgagttctgcagatgcgagctgaagctgcagaagtggtacggggacctgcggggaaagcccttcgccatcgaagccgagaacagcatcctggacatcagcggcttcagcaagcagtacaactgtgccttcatctggcagaaggacggcgtgaagaagctgaacctgtacctgatcatcaactacttcaagggcggcaagctgcggttcaagaagatcaaacctgaagccttcgaagccaacagattctacaccgtgatcaacaaaaagagcggcgagatcgtgcccatggaggtgaacttcaacttcgacgaccccaacctgatcatcctgcctctggcctttggcaagagacagggcagagaattcatctggaacgacctgctgtccctggaaaccggcagcctgaagctggccaacggaagagtgatcgagaagacactgtacaacagaagaacccggcaggatgagcctgccctgttcgtggccctgaccttcgagcggcgggaggtcctggactcctccaatatcaaaccaatgaacctgatcggcgtggcaagaggcgaaaacatccccgccgtgatcgccctgaccgaccccgagggctgcccactgagccggtttaaggatagcctgggaaacccaacccacatcctgagaatcggcgagagctataaggagaagcagcggaccatccaggccaagaaggaggtggagcagcggagagccggcggctacagccggaagtacgccagcaaagccaagaatctggcagacgatatggtgagaaacaccgctagagatctgctgtactacgccgtgacccaggatgccatgctgatcttcgccaacctgagccggggcttcggccggcagggcaagcggaccttcatggccgagagacagtacacacggatggaggactggctgaccgccaagctggcctacgagggcctgagcaagacctacctgtccaagacactggcccagtacacctccaagacatgcagcaactgtgggtttaccatcaccagcgccgactacgacagggtgctggagaagctgaagaagacagcaacaggctggatgaccacaattaacggcaaggagctgaaggtggagggccagattacctactacaacagatacaagagacagaacgtagtcaaggacctgtccgtcgagctggatagactgagcgaagaatctgtgaacaacgacatctcctcctggacaaagggcagaagcggagaagctctgagcctcctgaagaaaagattctcccatagacccgtgcaggagaagttcgtgtgcctgaactgcggcttcgagacacacgcagccgagcaagccgccctgaacatcgccagatcctggctgttcctgcggagccaggagtacaagaaataccagacaaacaagacaaccggcaacaccgataagagagccttcgtcgagacctggcagtccttttaccggaagaagcttaaggaggtgtggaaacctgccgtgcggtctggcggatctggcggaggctccacaagcttccaggagcccgtgaccttcgaggacgtggccgtgtacttcacccagaacgagtgggccagcctgcaccccacccagagggccctgtacaggggcgtgatgctggagaactacgccaacgtgaccagcctgagcgccttccccttccccaagcccgacctgatcttccagctggagcagggcgaggccgcctggggccccgacccctggaccctggacggcggcgaggccctgaggggcatgaccagccccaagaaaaagagaaaagtctaagctgccttctgcggggcttgccttctggccatgcccttcttctctcccttgcacctgtacctcttggtctttgaataaagcctgagtaggaaggctagcaaaaaaaaaaaaaaaaaaaaaaaaaaaaaaaaaaaaaaaaaaaaaaaaaaaaaaaaaaaaaaaaaaaaaaaaaaaaaaaa

SEQ ID NO: 6181 - RNA, 5797 nt, synthetic construct
  source 1..5797: mol_type = other RNA
aggaaataagagagaaaagaagagtaagaagaaatataagagccaccatggcccctaagaagaagcgtaaagtgagccggatggaacgcctcgtctacgaggtgcggcagaagtgcagaaacatcgaggacatctgcatctcctgcggatctctgaacgtgaccctggagcacccactgttcatcggcggcatgtgccagaactgtaaaaactgttttctggagtgtgcctatcaatacgacgatgacggctaccagagctactgcaccatctgttgcggcggaagagaggtgctgatgtgtggaaataacaactgctgccggtgcttctgcgtggaatgcgtggacctgctggtgggccccggcgccgcccaggccgctattaaggaagatccttggaactgctacatgtgcggccacaagggcacatacggcctgctgagacggagagaggactggcctagcagactgcagatgttcttcgccaataaccacgaccaggagttcgacccccctaaggtgtaccctcccgtccccgccgagaagagaaagcccatccgggtcctgagcctgttcgatggcatcgccaccggtctgctggtgctgaaggacctgggcatccaggtggataggtacattgcctccgaggtgtgcgaggactccatcaccgtgggaatggtgcgtcatcagggcaagatcatgtacgtgggcgacgtgcggagcgtgacacagaagcatatccaggagtggggccctttcgacctggtgatcggcggcagcccttgcaatgacctgagcatcgtgaacccagcccggaagggcctgtacgagggaaccggcagactgttcttcgagttttacagactgctgcacgacgcccggcctaaggaaggcgacgaccggcccttcttttggctgttcgagaatgtggtggccatgggagtcagcgacaagcgggatattagccggttcctggagagcaaccccgtgatgatcgatgccaaggaagtgagcgccgcccaccgggccagatacttctggggcaatctgcctggcatgaacagacccctggccagcaccgtgaacgacaagctggagctgcaggagtgcctggagcacggccggatcgccaagttcagcaaggtgagaaccatcaccacccgaagcaacagcatcaaacaaggcaaggaccagcactttcctgtgttcatgaacgagaaggaggacatcctgtggtgtaccgagatggagagagtgttcgggttcccagtccactacacagatgtcagcaacatgtctagactggccagacagagactgctgggaagaagctggtccgtccctgtgatcagacacctgttcgcccctctgaaggagtacttcgcctgcgtgagcagcggcaacagcaacgccaacagccggggccccagcttctctagcggcctggtgccactgtccctgagagggagccacatgggccccatggagatctacaaaaccgtgagcgcctggaagcggcagcctgtgcgcgtgctgagcctgtttcggaatatcgataaagtcctgaaaagcctgggattcctggagagcggctctggctccggcggtggcaccctgaagtacgtggaggatgtgacaaacgtggtcagacgggatgtggagaagtggggccccttcgatctggtgtacggcagcacccaacccctgggcagctcttgtgaccggtgccctggctggtacatgtttcagttccaccggatcctgcagtacgccctgccgagacaggagtcccagcggccattcttttggattttcatggacaacttgctgctgaccgaggatgaccaggaaactaccactcggttcctgcagaccgaagccgtgaccctgcaggacgtgagaggccgggactaccagaacgccatgcgggtgtggtccaacatccctggactgaaaagcaagcacgcacctctgacccctaaagaagaggagtacctgcaggcccaggtgcggagcagaagcaagctggacgcccctaaggtggatctgctggtgaagaattgcctcctgcccctgagagagtacttcaagtatttcagccagaatagtctgcccctgggcggcccaagcagcggcgcccctcctcccagcggcggcagcccagccggctccccaacctctaccgaggagggcacctctgagtccgccacccccgagagcggccctggcacctccaccgagcccagcgagggcagcgcacccggcagccctgccggcagccccacctccacagaggagggaaccagcaccgagcccagcgaaggcagcgccccaggcaccagcaccgagcctagtgagggcggctctggcggcggcagcgcccaggagattaaacggatcaacaagatcagaagaagacttgtgaaagacagcaacaccaagaaggccggcaagacaggccccatgaaaaccctgctggttagagtgatgacacccgatctgagagagcggctggaaaacctgagaaagaagcctgaaaatatcccccagcccatcagcaatacatctagagccaacctgaataagctgctgaccgattacaccgaaatgaagaaggcgatcctgcatgtgtactgggaagagttccagaaggaccctgtgggcctgatgagccgggtggcccagcctgccagcaagaagatcgatcagaacaagctgaaacctgagatggacgagaagggcaacctgaccaccgccggctttgcctgctctcagtgtggccagcccctgttcgtgtacaagctggagcaggtgtctgagaagggcaaggcttacaccaactacttcggacggtgcaatgtggccgagcacgaaaagctgatcctgctggcccagctgaagcccgagaaggatagcgacgaagccgtgacatatagcctgggaaagtttgggcagagggccctggatttctacagcattcatgtgaccaaggagtccacccaccccgtgaagcccctggcccagatcgccggaaacagatacgcctccggacctgtgggaaaggccctgagcgacgcatgtatgggcacaatcgcctccttcctgtctaagtaccaggacatcatcatcgaacaccagaaggtggtgaagggcaaccagaagagactggagagcctgcgggagctggccggcaaggaaaacctggaataccctagcgtgaccctgccacctcagcctcacaccaaggagggcgttgatgcctacaacgaagtgatcgcccgggtgcgaatgtgggtgaacctgaacctgtggcagaagctgaagctaagcagagatgatgccaagcctctgctgagactgaagggattcccttcctttcctctggtcgagagacaggccaacgaagtggactggtgggacatggtgtgtaacgtgaagaagctgatcaacgagaaaaaggaggatggcaaggtgttttggcagaatctggctggctacaagagacaggaagccctgagaccatacctgagcagcgaggaagatcggaagaagggaaagaaattcgctcggtaccagctgggcgacctgctgctgcacctggaaaagaagcacggcgaggactggggaaaggtgtacgacgaggcctgggagcggattgacaagaaagtggaaggcctgagcaagcacatcaagctggaagaggaacggagaagcgaggacgcccagagcaaggccgccctgaccgactggctgcgggctaaggccagcttcgtgatcgagggcctgaaggaggccgacaaggacgagttctgcagatgcgagctgaagctgcagaagtggtacggggacctgcggggaaagcccttcgccatcgaagccgagaacagcatcctggacatcagcggcttcagcaagcagtacaactgtgccttcatctggcagaaggacggcgtgaagaagctgaacctgtacctgatcatcaactacttcaagggcggcaagctgcggttcaagaagatcaaacctgaagccttcgaagccaacagattctacaccgtgatcaacaaaaagagcggcgagatcgtgcccatggaggtgaacttcaacttcgacgaccccaacctgatcatcctgcctctggcctttggcaagagacagggcagagaattcatctggaacgacctgctgtccctggaaaccggcagcctgaagctggccaacggaagagtgatcgagaagacactgtacaacagaagaacccggcaggatgagcctgccctgttcgtggccctgaccttcgagcggcgggaggtcctggactcctccaatatcaaaccaatgaacctgatcggcgtggcaagaggcgaaaacatccccgccgtgatcgccctgaccgaccccgagggctgcccactgagccggtttaaggatagcctgggaaacccaacccacatcctgagaatcggcgagagctataaggagaagcagcggaccatccaggccaagaaggaggtggagcagcggagagccggcggctacagccggaagtacgccagcaaagccaagaatctggcagacgatatggtgagaaacaccgctagagatctgctgtactacgccgtgacccaggatgccatgctgatcttcgccaacctgagccggggcttcggccggcagggcaagcggaccttcatggccgagagacagtacacacggatggaggactggctgaccgccaagctggcctacgagggcctgagcaagacctacctgtccaagacactggcccagtacacctccaagacatgcagcaactgtgggtttaccatcaccagcgccgactacgacagggtgctggagaagctgaagaagacagcaacaggctggatgaccacaattaacggcaaggagctgaaggtggagggccagattacctactacaacagatacaagagacagaacgtagtcaaggacctgtccgtcgagctggatagactgagcgaagaatctgtgaacaacgacatctcctcctggacaaagggcagaagcggagaagctctgagcctcctgaagaaaagattctcccatagacccgtgcaggagaagttcgtgtgcctgaactgcggcttcgagacacacgcagccgagcaagccgccctgaacatcgccagatcctggctgttcctgcggagccaggagtacaagaaataccagacaaacaagacaaccggcaacaccgataagagagccttcgtcgagacctggcagtccttttaccggaagaagcttaaggaggtgtggaaacctgccgtgcggtctggcggatctggcggaggctccacaagcatgaccttcgaggacgtgaccgtggagttcaccccctgggagtggggccagctggaccccgcccagaaggacctgtacagggaggtgatgctggagaacttcaggaacctggccagcctgggcctgcccgtgagcaagccccacgtgatctgccagctggaggagggcgaggagccctgcgtgctggagagggagatcagcgtgggcgcccagagcgacctgaagaggaggcccaaggccaagaccagccccaagaaaaagagaaaagtctaagctgccttctgcggggcttgccttctggccatgcccttcttctctcccttgcacctgtacctcttggtctttgaataaagcctgagtaggaaggctagcaaaaaaaaaaaaaaaaaaaaaaaaaaaaaaaaaaaaaaaaaaaaaaaaaaaaaaaaaaaaaaaaaaaaaaaaaaaaaaaa

SEQ ID NO: 6182 - RNA, 5797 nt, synthetic construct
  source 1..5797: mol_type = other RNA
aggaaataagagagaaaagaagagtaagaagaaatataagagccaccatggcccctaagaagaagcgtaaagtgagccggatggaacgcctcgtctacgaggtgcggcagaagtgcagaaacatcgaggacatctgcatctcctgcggatctctgaacgtgaccctggagcacccactgttcatcggcggcatgtgccagaactgtaaaaactgttttctggagtgtgcctatcaatacgacgatgacggctaccagagctactgcaccatctgttgcggcggaagagaggtgctgatgtgtggaaataacaactgctgccggtgcttctgcgtggaatgcgtggacctgctggtgggccccggcgccgcccaggccgctattaaggaagatccttggaactgctacatgtgcggccacaagggcacatacggcctgctgagacggagagaggactggcctagcagactgcagatgttcttcgccaataaccacgaccaggagttcgacccccctaaggtgtaccctcccgtccccgccgagaagagaaagcccatccgggtcctgagcctgttcgatggcatcgccaccggtctgctggtgctgaaggacctgggcatccaggtggataggtacattgcctccgaggtgtgcgaggactccatcaccgtgggaatggtgcgtcatcagggcaagatcatgtacgtgggcgacgtgcggagcgtgacacagaagcatatccaggagtggggccctttcgacctggtgatcggcggcagcccttgcaatgacctgagcatcgtgaacccagcccggaagggcctgtacgagggaaccggcagactgttcttcgagttttacagactgctgcacgacgcccggcctaaggaaggcgacgaccggcccttcttttggctgttcgagaatgtggtggccatgggagtcagcgacaagcgggatattagccggttcctggagagcaaccccgtgatgatcgatgccaaggaagtgagcgccgcccaccgggccagatacttctggggcaatctgcctggcatgaacagacccctggccagcaccgtgaacgacaagctggagctgcaggagtgcctggagcacggccggatcgccaagttcagcaaggtgagaaccatcaccacccgaagcaacagcatcaaacaaggcaaggaccagcactttcctgtgttcatgaacgagaaggaggacatcctgtggtgtaccgagatggagagagtgttcgggttcccagtccactacacagatgtcagcaacatgtctagactggccagacagagactgctgggaagaagctggtccgtccctgtgatcagacacctgttcgcccctctgaaggagtacttcgcctgcgtgagcagcggcaacagcaacgccaacagccggggccccagcttctctagcggcctggtgccactgtccctgagagggagccacatgggccccatggagatctacaaaaccgtgagcgcctggaagcggcagcctgtgcgcgtgctgagcctgtttcggaatatcgataaagtcctgaaaagcctgggattcctggagagcggctctggctccggcggtggcaccctgaagtacgtggaggatgtgacaaacgtggtcagacgggatgtggagaagtggggccccttcgatctggtgtacggcagcacccaacccctgggcagctcttgtgaccggtgccctggctggtacatgtttcagttccaccggatcctgcagtacgccctgccgagacaggagtcccagcggccattcttttggattttcatggacaacttgctgctgaccgaggatgaccaggaaactaccactcggttcctgcagaccgaagccgtgaccctgcaggacgtgagaggccgggactaccagaacgccatgcgggtgtggtccaacatccctggactgaaaagcaagcacgcacctctgacccctaaagaagaggagtacctgcaggcccaggtgcggagcagaagcaagctggacgcccctaaggtggatctgctggtgaagaattgcctcctgcccctgagagagtacttcaagtatttcagccagaatagtctgcccctgggcggcccaagcagcggcgcccctcctcccagcggcggcagcccagccggctccccaacctctaccgaggagggcacctctgagtccgccacccccgagagcggccctggcacctccaccgagcccagcgagggcagcgcacccggcagccctgccggcagccccacctccacagaggagggaaccagcaccgagcccagcgaaggcagcgccccaggcaccagcaccgagcctagtgagggcggctctggcggcggcagcgcccaggagattaaacggatcaacaagatcagaagaagacttgtgaaagacagcaacaccaagaaggccggcaagacaggccccatgaaaaccctgctggttagagtgatgacacccgatctgagagagcggctggaaaacctgagaaagaagcctgaaaatatcccccagcccatcagcaatacatctagagccaacctgaataagctgctgaccgattacaccgaaatgaagaaggcgatcctgcatgtgtactgggaagagttccagaaggaccctgtgggcctgatgagccgggtggcccagcctgccagcaagaagatcgatcagaacaagctgaaacctgagatggacgagaagggcaacctgaccaccgccggctttgcctgctctcagtgtggccagcccctgttcgtgtacaagctggagcaggtgtctgagaagggcaaggcttacaccaactacttcggacggtgcaatgtggccgagcacgaaaagctgatcctgctggcccagctgaagcccgagaaggatagcgacgaagccgtgacatatagcctgggaaagtttgggcagagggccctggatttctacagcattcatgtgaccaaggagtccacccaccccgtgaagcccctggcccagatcgccggaaacagatacgcctccggacctgtgggaaaggccctgagcgacgcatgtatgggcacaatcgcctccttcctgtctaagtaccaggacatcatcatcgaacaccagaaggtggtgaagggcaaccagaagagactggagagcctgcgggagctggccggcaaggaaaacctggaataccctagcgtgaccctgccacctcagcctcacaccaaggagggcgttgatgcctacaacgaagtgatcgcccgggtgcgaatgtgggtgaacctgaacctgtggcagaagctgaagctaagcagagatgatgccaagcctctgctgagactgaagggattcccttcctttcctctggtcgagagacaggccaacgaagtggactggtgggacatggtgtgtaacgtgaagaagctgatcaacgagaaaaaggaggatggcaaggtgttttggcagaatctggctggctacaagagacaggaagccctgagaccatacctgagcagcgaggaagatcggaagaagggaaagaaattcgctcggtaccagctgggcgacctgctgctgcacctggaaaagaagcacggcgaggactggggaaaggtgtacgacgaggcctgggagcggattgacaagaaagtggaaggcctgagcaagcacatcaagctggaagaggaacggagaagcgaggacgcccagagcaaggccgccctgaccgactggctgcgggctaaggccagcttcgtgatcgagggcctgaaggaggccgacaaggacgagttctgcagatgcgagctgaagctgcagaagtggtacggggacctgcggggaaagcccttcgccatcgaagccgagaacagcatcctggacatcagcggcttcagcaagcagtacaactgtgccttcatctggcagaaggacggcgtgaagaagctgaacctgtacctgatcatcaactacttcaagggcggcaagctgcggttcaagaagatcaaacctgaagccttcgaagccaacagattctacaccgtgatcaacaaaaagagcggcgagatcgtgcccatggaggtgaacttcaacttcgacgaccccaacctgatcatcctgcctctggcctttggcaagagacagggcagagaattcatctggaacgacctgctgtccctggaaaccggcagcctgaagctggccaacggaagagtgatcgagaagacactgtacaacagaagaacccggcaggatgagcctgccctgttcgtggccctgaccttcgagcggcgggaggtcctggactcctccaatatcaaaccaatgaacctgatcggcgtggcaagaggcgaaaacatccccgccgtgatcgccctgaccgaccccgagggctgcccactgagccggtttaaggatagcctgggaaacccaacccacatcctgagaatcggcgagagctataaggagaagcagcggaccatccaggccaagaaggaggtggagcagcggagagccggcggctacagccggaagtacgccagcaaagccaagaatctggcagacgatatggtgagaaacaccgctagagatctgctgtactacgccgtgacccaggatgccatgctgatcttcgccaacctgagccggggcttcggccggcagggcaagcggaccttcatggccgagagacagtacacacggatggaggactggctgaccgccaagctggcctacgagggcctgagcaagacctacctgtccaagacactggcccagtacacctccaagacatgcagcaactgtgggtttaccatcaccagcgccgactacgacagggtgctggagaagctgaagaagacagcaacaggctggatgaccacaattaacggcaaggagctgaaggtggagggccagattacctactacaacagatacaagagacagaacgtagtcaaggacctgtccgtcgagctggatagactgagcgaagaatctgtgaacaacgacatctcctcctggacaaagggcagaagcggagaagctctgagcctcctgaagaaaagattctcccatagacccgtgcaggagaagttcgtgtgcctgaactgcggcttcgagacacacgcagccgagcaagccgccctgaacatcgccagatcctggctgttcctgcggagccaggagtacaagaaataccagacaaacaagacaaccggcaacaccgataagagagccttcgtcgagacctggcagtccttttaccggaagaagcttaaggaggtgtggaaacctgccgtgcggtctggcggatctggcggaggctccacaagctaccagacccccgtgagcttcaaggacgtggtggtgggcttcacccaggaggagtggcacaggctgagccccgcccagagggccctgtacagggacgtgatgctggagacctacagcaacctggtgagcgtgggctacgagggcaccaagcccgacgtgatcctgaggctggagcaggaggaggccccctggatctgcgaggtggcctgccccggctgccacaggtgggaggacatctggcagaccagccccaagaaaaagagaaaagtctaagctgccttctgcggggcttgccttctggccatgcccttcttctctcccttgcacctgtacctcttggtctttgaataaagcctgagtaggaaggctagcaaaaaaaaaaaaaaaaaaaaaaaaaaaaaaaaaaaaaaaaaaaaaaaaaaaaaaaaaaaaaaaaaaaaaaaaaaaaaaaa

SEQ ID NO: 6183 - RNA, 5797 nt, synthetic construct
  source 1..5797: mol_type = other RNA
aggaaataagagagaaaagaagagtaagaagaaatataagagccaccatggcccctaagaagaagcgtaaagtgagccggatggaacgcctcgtctacgaggtgcggcagaagtgcagaaacatcgaggacatctgcatctcctgcggatctctgaacgtgaccctggagcacccactgttcatcggcggcatgtgccagaactgtaaaaactgttttctggagtgtgcctatcaatacgacgatgacggctaccagagctactgcaccatctgttgcggcggaagagaggtgctgatgtgtggaaataacaactgctgccggtgcttctgcgtggaatgcgtggacctgctggtgggccccggcgccgcccaggccgctattaaggaagatccttggaactgctacatgtgcggccacaagggcacatacggcctgctgagacggagagaggactggcctagcagactgcagatgttcttcgccaataaccacgaccaggagttcgacccccctaaggtgtaccctcccgtccccgccgagaagagaaagcccatccgggtcctgagcctgttcgatggcatcgccaccggtctgctggtgctgaaggacctgggcatccaggtggataggtacattgcctccgaggtgtgcgaggactccatcaccgtgggaatggtgcgtcatcagggcaagatcatgtacgtgggcgacgtgcggagcgtgacacagaagcatatccaggagtggggccctttcgacctggtgatcggcggcagcccttgcaatgacctgagcatcgtgaacccagcccggaagggcctgtacgagggaaccggcagactgttcttcgagttttacagactgctgcacgacgcccggcctaaggaaggcgacgaccggcccttcttttggctgttcgagaatgtggtggccatgggagtcagcgacaagcgggatattagccggttcctggagagcaaccccgtgatgatcgatgccaaggaagtgagcgccgcccaccgggccagatacttctggggcaatctgcctggcatgaacagacccctggccagcaccgtgaacgacaagctggagctgcaggagtgcctggagcacggccggatcgccaagttcagcaaggtgagaaccatcaccacccgaagcaacagcatcaaacaaggcaaggaccagcactttcctgtgttcatgaacgagaaggaggacatcctgtggtgtaccgagatggagagagtgttcgggttcccagtccactacacagatgtcagcaacatgtctagactggccagacagagactgctgggaagaagctggtccgtccctgtgatcagacacctgttcgcccctctgaaggagtacttcgcctgcgtgagcagcggcaacagcaacgccaacagccggggccccagcttctctagcggcctggtgccactgtccctgagagggagccacatgggccccatggagatctacaaaaccgtgagcgcctggaagcggcagcctgtgcgcgtgctgagcctgtttcggaatatcgataaagtcctgaaaagcctgggattcctggagagcggctctggctccggcggtggcaccctgaagtacgtggaggatgtgacaaacgtggtcagacgggatgtggagaagtggggccccttcgatctggtgtacggcagcacccaacccctgggcagctcttgtgaccggtgccctggctggtacatgtttcagttccaccggatcctgcagtacgccctgccgagacaggagtcccagcggccattcttttggattttcatggacaacttgctgctgaccgaggatgaccaggaaactaccactcggttcctgcagaccgaagccgtgaccctgcaggacgtgagaggccgggactaccagaacgccatgcgggtgtggtccaacatccctggactgaaaagcaagcacgcacctctgacccctaaagaagaggagtacctgcaggcccaggtgcggagcagaagcaagctggacgcccctaaggtggatctgctggtgaagaattgcctcctgcccctgagagagtacttcaagtatttcagccagaatagtctgcccctgggcggcccaagcagcggcgcccctcctcccagcggcggcagcccagccggctccccaacctctaccgaggagggcacctctgagtccgccacccccgagagcggccctggcacctccaccgagcccagcgagggcagcgcacccggcagccctgccggcagccccacctccacagaggagggaaccagcaccgagcccagcgaaggcagcgccccaggcaccagcaccgagcctagtgagggcggctctggcggcggcagcgcccaggagattaaacggatcaacaagatcagaagaagacttgtgaaagacagcaacaccaagaaggccggcaagacaggccccatgaaaaccctgctggttagagtgatgacacccgatctgagagagcggctggaaaacctgagaaagaagcctgaaaatatcccccagcccatcagcaatacatctagagccaacctgaataagctgctgaccgattacaccgaaatgaagaaggcgatcctgcatgtgtactgggaagagttccagaaggaccctgtgggcctgatgagccgggtggcccagcctgccagcaagaagatcgatcagaacaagctgaaacctgagatggacgagaagggcaacctgaccaccgccggctttgcctgctctcagtgtggccagcccctgttcgtgtacaagctggagcaggtgtctgagaagggcaaggcttacaccaactacttcggacggtgcaatgtggccgagcacgaaaagctgatcctgctggcccagctgaagcccgagaaggatagcgacgaagccgtgacatatagcctgggaaagtttgggcagagggccctggatttctacagcattcatgtgaccaaggagtccacccaccccgtgaagcccctggcccagatcgccggaaacagatacgcctccggacctgtgggaaaggccctgagcgacgcatgtatgggcacaatcgcctccttcctgtctaagtaccaggacatcatcatcgaacaccagaaggtggtgaagggcaaccagaagagactggagagcctgcgggagctggccggcaaggaaaacctggaataccctagcgtgaccctgccacctcagcctcacaccaaggagggcgttgatgcctacaacgaagtgatcgcccgggtgcgaatgtgggtgaacctgaacctgtggcagaagctgaagctaagcagagatgatgccaagcctctgctgagactgaagggattcccttcctttcctctggtcgagagacaggccaacgaagtggactggtgggacatggtgtgtaacgtgaagaagctgatcaacgagaaaaaggaggatggcaaggtgttttggcagaatctggctggctacaagagacaggaagccctgagaccatacctgagcagcgaggaagatcggaagaagggaaagaaattcgctcggtaccagctgggcgacctgctgctgcacctggaaaagaagcacggcgaggactggggaaaggtgtacgacgaggcctgggagcggattgacaagaaagtggaaggcctgagcaagcacatcaagctggaagaggaacggagaagcgaggacgcccagagcaaggccgccctgaccgactggctgcgggctaaggccagcttcgtgatcgagggcctgaaggaggccgacaaggacgagttctgcagatgcgagctgaagctgcagaagtggtacggggacctgcggggaaagcccttcgccatcgaagccgagaacagcatcctggacatcagcggcttcagcaagcagtacaactgtgccttcatctggcagaaggacggcgtgaagaagctgaacctgtacctgatcatcaactacttcaagggcggcaagctgcggttcaagaagatcaaacctgaagccttcgaagccaacagattctacaccgtgatcaacaaaaagagcggcgagatcgtgcccatggaggtgaacttcaacttcgacgaccccaacctgatcatcctgcctctggcctttggcaagagacagggcagagaattcatctggaacgacctgctgtccctggaaaccggcagcctgaagctggccaacggaagagtgatcgagaagacactgtacaacagaagaacccggcaggatgagcctgccctgttcgtggccctgaccttcgagcggcgggaggtcctggactcctccaatatcaaaccaatgaacctgatcggcgtggcaagaggcgaaaacatccccgccgtgatcgccctgaccgaccccgagggctgcccactgagccggtttaaggatagcctgggaaacccaacccacatcctgagaatcggcgagagctataaggagaagcagcggaccatccaggccaagaaggaggtggagcagcggagagccggcggctacagccggaagtacgccagcaaagccaagaatctggcagacgatatggtgagaaacaccgctagagatctgctgtactacgccgtgacccaggatgccatgctgatcttcgccaacctgagccggggcttcggccggcagggcaagcggaccttcatggccgagagacagtacacacggatggaggactggctgaccgccaagctggcctacgagggcctgagcaagacctacctgtccaagacactggcccagtacacctccaagacatgcagcaactgtgggtttaccatcaccagcgccgactacgacagggtgctggagaagctgaagaagacagcaacaggctggatgaccacaattaacggcaaggagctgaaggtggagggccagattacctactacaacagatacaagagacagaacgtagtcaaggacctgtccgtcgagctggatagactgagcgaagaatctgtgaacaacgacatctcctcctggacaaagggcagaagcggagaagctctgagcctcctgaagaaaagattctcccatagacccgtgcaggagaagttcgtgtgcctgaactgcggcttcgagacacacgcagccgagcaagccgccctgaacatcgccagatcctggctgttcctgcggagccaggagtacaagaaataccagacaaacaagacaaccggcaacaccgataagagagccttcgtcgagacctggcagtccttttaccggaagaagcttaaggaggtgtggaaacctgccgtgcggtctggcggatctggcggaggctccacaagcaagcccggcgccgtgagcttcgccgacgtggccgtgtacttcagccccgaggagtggggctgcctgaggcccgcccagagggccctgtacagggacgtgatgagggagacctacggccacctgggcgccctgggcttcaggggcaccaagcccgccctgatctgctgggtggaggaggaggccgacctgtggggccccgaggccagggaccccgaggtgggcgcctgcctgaccgaggccgacaccagccccaagaaaaagagaaaagtctaagctgccttctgcggggcttgccttctggccatgcccttcttctctcccttgcacctgtacctcttggtctttgaataaagcctgagtaggaaggctagcaaaaaaaaaaaaaaaaaaaaaaaaaaaaaaaaaaaaaaaaaaaaaaaaaaaaaaaaaaaaaaaaaaaaaaaaaaaaaaaa

SEQ ID NO: 6184 - RNA, 5797 nt, synthetic construct
  source 1..5797: mol_type = other RNA
aggaaataagagagaaaagaagagtaagaagaaatataagagccaccatggcccctaagaagaagcgtaaagtgagccggatggaacgcctcgtctacgaggtgcggcagaagtgcagaaacatcgaggacatctgcatctcctgcggatctctgaacgtgaccctggagcacccactgttcatcggcggcatgtgccagaactgtaaaaactgttttctggagtgtgcctatcaatacgacgatgacggctaccagagctactgcaccatctgttgcggcggaagagaggtgctgatgtgtggaaataacaactgctgccggtgcttctgcgtggaatgcgtggacctgctggtgggccccggcgccgcccaggccgctattaaggaagatccttggaactgctacatgtgcggccacaagggcacatacggcctgctgagacggagagaggactggcctagcagactgcagatgttcttcgccaataaccacgaccaggagttcgacccccctaaggtgtaccctcccgtccccgccgagaagagaaagcccatccgggtcctgagcctgttcgatggcatcgccaccggtctgctggtgctgaaggacctgggcatccaggtggataggtacattgcctccgaggtgtgcgaggactccatcaccgtgggaatggtgcgtcatcagggcaagatcatgtacgtgggcgacgtgcggagcgtgacacagaagcatatccaggagtggggccctttcgacctggtgatcggcggcagcccttgcaatgacctgagcatcgtgaacccagcccggaagggcctgtacgagggaaccggcagactgttcttcgagttttacagactgctgcacgacgcccggcctaaggaaggcgacgaccggcccttcttttggctgttcgagaatgtggtggccatgggagtcagcgacaagcgggatattagccggttcctggagagcaaccccgtgatgatcgatgccaaggaagtgagcgccgcccaccgggccagatacttctggggcaatctgcctggcatgaacagacccctggccagcaccgtgaacgacaagctggagctgcaggagtgcctggagcacggccggatcgccaagttcagcaaggtgagaaccatcaccacccgaagcaacagcatcaaacaaggcaaggaccagcactttcctgtgttcatgaacgagaaggaggacatcctgtggtgtaccgagatggagagagtgttcgggttcccagtccactacacagatgtcagcaacatgtctagactggccagacagagactgctgggaagaagctggtccgtccctgtgatcagacacctgttcgcccctctgaaggagtacttcgcctgcgtgagcagcggcaacagcaacgccaacagccggggccccagcttctctagcggcctggtgccactgtccctgagagggagccacatgggccccatggagatctacaaaaccgtgagcgcctggaagcggcagcctgtgcgcgtgctgagcctgtttcggaatatcgataaagtcctgaaaagcctgggattcctggagagcggctctggctccggcggtggcaccctgaagtacgtggaggatgtgacaaacgtggtcagacgggatgtggagaagtggggccccttcgatctggtgtacggcagcacccaacccctgggcagctcttgtgaccggtgccctggctggtacatgtttcagttccaccggatcctgcagtacgccctgccgagacaggagtcccagcggccattcttttggattttcatggacaacttgctgctgaccgaggatgaccaggaaactaccactcggttcctgcagaccgaagccgtgaccctgcaggacgtgagaggccgggactaccagaacgccatgcgggtgtggtccaacatccctggactgaaaagcaagcacgcacctctgacccctaaagaagaggagtacctgcaggcccaggtgcggagcagaagcaagctggacgcccctaaggtggatctgctggtgaagaattgcctcctgcccctgagagagtacttcaagtatttcagccagaatagtctgcccctgggcggcccaagcagcggcgcccctcctcccagcggcggcagcccagccggctccccaacctctaccgaggagggcacctctgagtccgccacccccgagagcggccctggcacctccaccgagcccagcgagggcagcgcacccggcagccctgccggcagccccacctccacagaggagggaaccagcaccgagcccagcgaaggcagcgccccaggcaccagcaccgagcctagtgagggcggctctggcggcggcagcgcccaggagattaaacggatcaacaagatcagaagaagacttgtgaaagacagcaacaccaagaaggccggcaagacaggccccatgaaaaccctgctggttagagtgatgacacccgatctgagagagcggctggaaaacctgagaaagaagcctgaaaatatcccccagcccatcagcaatacatctagagccaacctgaataagctgctgaccgattacaccgaaatgaagaaggcgatcctgcatgtgtactgggaagagttccagaaggaccctgtgggcctgatgagccgggtggcccagcctgccagcaagaagatcgatcagaacaagctgaaacctgagatggacgagaagggcaacctgaccaccgccggctttgcctgctctcagtgtggccagcccctgttcgtgtacaagctggagcaggtgtctgagaagggcaaggcttacaccaactacttcggacggtgcaatgtggccgagcacgaaaagctgatcctgctggcccagctgaagcccgagaaggatagcgacgaagccgtgacatatagcctgggaaagtttgggcagagggccctggatttctacagcattcatgtgaccaaggagtccacccaccccgtgaagcccctggcccagatcgccggaaacagatacgcctccggacctgtgggaaaggccctgagcgacgcatgtatgggcacaatcgcctccttcctgtctaagtaccaggacatcatcatcgaacaccagaaggtggtgaagggcaaccagaagagactggagagcctgcgggagctggccggcaaggaaaacctggaataccctagcgtgaccctgccacctcagcctcacaccaaggagggcgttgatgcctacaacgaagtgatcgcccgggtgcgaatgtgggtgaacctgaacctgtggcagaagctgaagctaagcagagatgatgccaagcctctgctgagactgaagggattcccttcctttcctctggtcgagagacaggccaacgaagtggactggtgggacatggtgtgtaacgtgaagaagctgatcaacgagaaaaaggaggatggcaaggtgttttggcagaatctggctggctacaagagacaggaagccctgagaccatacctgagcagcgaggaagatcggaagaagggaaagaaattcgctcggtaccagctgggcgacctgctgctgcacctggaaaagaagcacggcgaggactggggaaaggtgtacgacgaggcctgggagcggattgacaagaaagtggaaggcctgagcaagcacatcaagctggaagaggaacggagaagcgaggacgcccagagcaaggccgccctgaccgactggctgcgggctaaggccagcttcgtgatcgagggcctgaaggaggccgacaaggacgagttctgcagatgcgagctgaagctgcagaagtggtacggggacctgcggggaaagcccttcgccatcgaagccgagaacagcatcctggacatcagcggcttcagcaagcagtacaactgtgccttcatctggcagaaggacggcgtgaagaagctgaacctgtacctgatcatcaactacttcaagggcggcaagctgcggttcaagaagatcaaacctgaagccttcgaagccaacagattctacaccgtgatcaacaaaaagagcggcgagatcgtgcccatggaggtgaacttcaacttcgacgaccccaacctgatcatcctgcctctggcctttggcaagagacagggcagagaattcatctggaacgacctgctgtccctggaaaccggcagcctgaagctggccaacggaagagtgatcgagaagacactgtacaacagaagaacccggcaggatgagcctgccctgttcgtggccctgaccttcgagcggcgggaggtcctggactcctccaatatcaaaccaatgaacctgatcggcgtggcaagaggcgaaaacatccccgccgtgatcgccctgaccgaccccgagggctgcccactgagccggtttaaggatagcctgggaaacccaacccacatcctgagaatcggcgagagctataaggagaagcagcggaccatccaggccaagaaggaggtggagcagcggagagccggcggctacagccggaagtacgccagcaaagccaagaatctggcagacgatatggtgagaaacaccgctagagatctgctgtactacgccgtgacccaggatgccatgctgatcttcgccaacctgagccggggcttcggccggcagggcaagcggaccttcatggccgagagacagtacacacggatggaggactggctgaccgccaagctggcctacgagggcctgagcaagacctacctgtccaagacactggcccagtacacctccaagacatgcagcaactgtgggtttaccatcaccagcgccgactacgacagggtgctggagaagctgaagaagacagcaacaggctggatgaccacaattaacggcaaggagctgaaggtggagggccagattacctactacaacagatacaagagacagaacgtagtcaaggacctgtccgtcgagctggatagactgagcgaagaatctgtgaacaacgacatctcctcctggacaaagggcagaagcggagaagctctgagcctcctgaagaaaagattctcccatagacccgtgcaggagaagttcgtgtgcctgaactgcggcttcgagacacacgcagccgagcaagccgccctgaacatcgccagatcctggctgttcctgcggagccaggagtacaagaaataccagacaaacaagacaaccggcaacaccgataagagagccttcgtcgagacctggcagtccttttaccggaagaagcttaaggaggtgtggaaacctgccgtgcggtctggcggatctggcggaggctccacaagcccccagaagagcgtgaccttcgaggacgtggccgtgtacttcacccagaccgagtgggacggcctgagccccgcccagagggccctgtacagggacgtgatgctggagaactacggcaacgtggccagcctgggcttccccctgctgaagcccgccgtgatcagccagctggagggcggcggcaagctgggcggccccagccccctggccagcggcaccggcaccggcccccagggcctgtggaccagccccaagaaaaagagaaaagtctaagctgccttctgcggggcttgccttctggccatgcccttcttctctcccttgcacctgtacctcttggtctttgaataaagcctgagtaggaaggctagcaaaaaaaaaaaaaaaaaaaaaaaaaaaaaaaaaaaaaaaaaaaaaaaaaaaaaaaaaaaaaaaaaaaaaaaaaaaaaaaa

SEQ ID NO: 6185 - RNA, 5797 nt, synthetic construct
  source 1..5797: mol_type = other RNA
aggaaataagagagaaaagaagagtaagaagaaatataagagccaccatggcccctaagaagaagcgtaaagtgagccggatggaacgcctcgtctacgaggtgcggcagaagtgcagaaacatcgaggacatctgcatctcctgcggatctctgaacgtgaccctggagcacccactgttcatcggcggcatgtgccagaactgtaaaaactgttttctggagtgtgcctatcaatacgacgatgacggctaccagagctactgcaccatctgttgcggcggaagagaggtgctgatgtgtggaaataacaactgctgccggtgcttctgcgtggaatgcgtggacctgctggtgggccccggcgccgcccaggccgctattaaggaagatccttggaactgctacatgtgcggccacaagggcacatacggcctgctgagacggagagaggactggcctagcagactgcagatgttcttcgccaataaccacgaccaggagttcgacccccctaaggtgtaccctcccgtccccgccgagaagagaaagcccatccgggtcctgagcctgttcgatggcatcgccaccggtctgctggtgctgaaggacctgggcatccaggtggataggtacattgcctccgaggtgtgcgaggactccatcaccgtgggaatggtgcgtcatcagggcaagatcatgtacgtgggcgacgtgcggagcgtgacacagaagcatatccaggagtggggccctttcgacctggtgatcggcggcagcccttgcaatgacctgagcatcgtgaacccagcccggaagggcctgtacgagggaaccggcagactgttcttcgagttttacagactgctgcacgacgcccggcctaaggaaggcgacgaccggcccttcttttggctgttcgagaatgtggtggccatgggagtcagcgacaagcgggatattagccggttcctggagagcaaccccgtgatgatcgatgccaaggaagtgagcgccgcccaccgggccagatacttctggggcaatctgcctggcatgaacagacccctggccagcaccgtgaacgacaagctggagctgcaggagtgcctggagcacggccggatcgccaagttcagcaaggtgagaaccatcaccacccgaagcaacagcatcaaacaaggcaaggaccagcactttcctgtgttcatgaacgagaaggaggacatcctgtggtgtaccgagatggagagagtgttcgggttcccagtccactacacagatgtcagcaacatgtctagactggccagacagagactgctgggaagaagctggtccgtccctgtgatcagacacctgttcgcccctctgaaggagtacttcgcctgcgtgagcagcggcaacagcaacgccaacagccggggccccagcttctctagcggcctggtgccactgtccctgagagggagccacatgggccccatggagatctacaaaaccgtgagcgcctggaagcggcagcctgtgcgcgtgctgagcctgtttcggaatatcgataaagtcctgaaaagcctgggattcctggagagcggctctggctccggcggtggcaccctgaagtacgtggaggatgtgacaaacgtggtcagacgggatgtggagaagtggggccccttcgatctggtgtacggcagcacccaacccctgggcagctcttgtgaccggtgccctggctggtacatgtttcagttccaccggatcctgcagtacgccctgccgagacaggagtcccagcggccattcttttggattttcatggacaacttgctgctgaccgaggatgaccaggaaactaccactcggttcctgcagaccgaagccgtgaccctgcaggacgtgagaggccgggactaccagaacgccatgcgggtgtggtccaacatccctggactgaaaagcaagcacgcacctctgacccctaaagaagaggagtacctgcaggcccaggtgcggagcagaagcaagctggacgcccctaaggtggatctgctggtgaagaattgcctcctgcccctgagagagtacttcaagtatttcagccagaatagtctgcccctgggcggcccaagcagcggcgcccctcctcccagcggcggcagcccagccggctccccaacctctaccgaggagggcacctctgagtccgccacccccgagagcggccctggcacctccaccgagcccagcgagggcagcgcacccggcagccctgccggcagccccacctccacagaggagggaaccagcaccgagcccagcgaaggcagcgccccaggcaccagcaccgagcctagtgagggcggctctggcggcggcagcgcccaggagattaaacggatcaacaagatcagaagaagacttgtgaaagacagcaacaccaagaaggccggcaagacaggccccatgaaaaccctgctggttagagtgatgacacccgatctgagagagcggctggaaaacctgagaaagaagcctgaaaatatcccccagcccatcagcaatacatctagagccaacctgaataagctgctgaccgattacaccgaaatgaagaaggcgatcctgcatgtgtactgggaagagttccagaaggaccctgtgggcctgatgagccgggtggcccagcctgccagcaagaagatcgatcagaacaagctgaaacctgagatggacgagaagggcaacctgaccaccgccggctttgcctgctctcagtgtggccagcccctgttcgtgtacaagctggagcaggtgtctgagaagggcaaggcttacaccaactacttcggacggtgcaatgtggccgagcacgaaaagctgatcctgctggcccagctgaagcccgagaaggatagcgacgaagccgtgacatatagcctgggaaagtttgggcagagggccctggatttctacagcattcatgtgaccaaggagtccacccaccccgtgaagcccctggcccagatcgccggaaacagatacgcctccggacctgtgggaaaggccctgagcgacgcatgtatgggcacaatcgcctccttcctgtctaagtaccaggacatcatcatcgaacaccagaaggtggtgaagggcaaccagaagagactggagagcctgcgggagctggccggcaaggaaaacctggaataccctagcgtgaccctgccacctcagcctcacaccaaggagggcgttgatgcctacaacgaagtgatcgcccgggtgcgaatgtgggtgaacctgaacctgtggcagaagctgaagctaagcagagatgatgccaagcctctgctgagactgaagggattcccttcctttcctctggtcgagagacaggccaacgaagtggactggtgggacatggtgtgtaacgtgaagaagctgatcaacgagaaaaaggaggatggcaaggtgttttggcagaatctggctggctacaagagacaggaagccctgagaccatacctgagcagcgaggaagatcggaagaagggaaagaaattcgctcggtaccagctgggcgacctgctgctgcacctggaaaagaagcacggcgaggactggggaaaggtgtacgacgaggcctgggagcggattgacaagaaagtggaaggcctgagcaagcacatcaagctggaagaggaacggagaagcgaggacgcccagagcaaggccgccctgaccgactggctgcgggctaaggccagcttcgtgatcgagggcctgaaggaggccgacaaggacgagttctgcagatgcgagctgaagctgcagaagtggtacggggacctgcggggaaagcccttcgccatcgaagccgagaacagcatcctggacatcagcggcttcagcaagcagtacaactgtgccttcatctggcagaaggacggcgtgaagaagctgaacctgtacctgatcatcaactacttcaagggcggcaagctgcggttcaagaagatcaaacctgaagccttcgaagccaacagattctacaccgtgatcaacaaaaagagcggcgagatcgtgcccatggaggtgaacttcaacttcgacgaccccaacctgatcatcctgcctctggcctttggcaagagacagggcagagaattcatctggaacgacctgctgtccctggaaaccggcagcctgaagctggccaacggaagagtgatcgagaagacactgtacaacagaagaacccggcaggatgagcctgccctgttcgtggccctgaccttcgagcggcgggaggtcctggactcctccaatatcaaaccaatgaacctgatcggcgtggcaagaggcgaaaacatccccgccgtgatcgccctgaccgaccccgagggctgcccactgagccggtttaaggatagcctgggaaacccaacccacatcctgagaatcggcgagagctataaggagaagcagcggaccatccaggccaagaaggaggtggagcagcggagagccggcggctacagccggaagtacgccagcaaagccaagaatctggcagacgatatggtgagaaacaccgctagagatctgctgtactacgccgtgacccaggatgccatgctgatcttcgccaacctgagccggggcttcggccggcagggcaagcggaccttcatggccgagagacagtacacacggatggaggactggctgaccgccaagctggcctacgagggcctgagcaagacctacctgtccaagacactggcccagtacacctccaagacatgcagcaactgtgggtttaccatcaccagcgccgactacgacagggtgctggagaagctgaagaagacagcaacaggctggatgaccacaattaacggcaaggagctgaaggtggagggccagattacctactacaacagatacaagagacagaacgtagtcaaggacctgtccgtcgagctggatagactgagcgaagaatctgtgaacaacgacatctcctcctggacaaagggcagaagcggagaagctctgagcctcctgaagaaaagattctcccatagacccgtgcaggagaagttcgtgtgcctgaactgcggcttcgagacacacgcagccgagcaagccgccctgaacatcgccagatcctggctgttcctgcggagccaggagtacaagaaataccagacaaacaagacaaccggcaacaccgataagagagccttcgtcgagacctggcagtccttttaccggaagaagcttaaggaggtgtggaaacctgccgtgcggtctggcggatctggcggaggctccacaagcgacgccgtgacctacgaggacgtgcacgtgaacttcacccacgaggagtgggccctgctggaccccagccagaagagcctgtacaaggacgtgatgctggagacctactggaacctgaccagcatcggctacaagtgggaggaccacaacttcgaggagaactgccagagcagcaggaggcacggcaggcacatcaactgccccagcggctacaagccctgcgagcacgaggagtacggcaagaccagccccaagaaaaagagaaaagtctaagctgccttctgcggggcttgccttctggccatgcccttcttctctcccttgcacctgtacctcttggtctttgaataaagcctgagtaggaaggctagcaaaaaaaaaaaaaaaaaaaaaaaaaaaaaaaaaaaaaaaaaaaaaaaaaaaaaaaaaaaaaaaaaaaaaaaaaaaaaaaa

SEQ ID NO: 6186 - RNA, 5797 nt, synthetic construct
  source 1..5797: mol_type = other RNA
aggaaataagagagaaaagaagagtaagaagaaatataagagccaccatggcccctaagaagaagcgtaaagtgagccggatggaacgcctcgtctacgaggtgcggcagaagtgcagaaacatcgaggacatctgcatctcctgcggatctctgaacgtgaccctggagcacccactgttcatcggcggcatgtgccagaactgtaaaaactgttttctggagtgtgcctatcaatacgacgatgacggctaccagagctactgcaccatctgttgcggcggaagagaggtgctgatgtgtggaaataacaactgctgccggtgcttctgcgtggaatgcgtggacctgctggtgggccccggcgccgcccaggccgctattaaggaagatccttggaactgctacatgtgcggccacaagggcacatacggcctgctgagacggagagaggactggcctagcagactgcagatgttcttcgccaataaccacgaccaggagttcgacccccctaaggtgtaccctcccgtccccgccgagaagagaaagcccatccgggtcctgagcctgttcgatggcatcgccaccggtctgctggtgctgaaggacctgggcatccaggtggataggtacattgcctccgaggtgtgcgaggactccatcaccgtgggaatggtgcgtcatcagggcaagatcatgtacgtgggcgacgtgcggagcgtgacacagaagcatatccaggagtggggccctttcgacctggtgatcggcggcagcccttgcaatgacctgagcatcgtgaacccagcccggaagggcctgtacgagggaaccggcagactgttcttcgagttttacagactgctgcacgacgcccggcctaaggaaggcgacgaccggcccttcttttggctgttcgagaatgtggtggccatgggagtcagcgacaagcgggatattagccggttcctggagagcaaccccgtgatgatcgatgccaaggaagtgagcgccgcccaccgggccagatacttctggggcaatctgcctggcatgaacagacccctggccagcaccgtgaacgacaagctggagctgcaggagtgcctggagcacggccggatcgccaagttcagcaaggtgagaaccatcaccacccgaagcaacagcatcaaacaaggcaaggaccagcactttcctgtgttcatgaacgagaaggaggacatcctgtggtgtaccgagatggagagagtgttcgggttcccagtccactacacagatgtcagcaacatgtctagactggccagacagagactgctgggaagaagctggtccgtccctgtgatcagacacctgttcgcccctctgaaggagtacttcgcctgcgtgagcagcggcaacagcaacgccaacagccggggccccagcttctctagcggcctggtgccactgtccctgagagggagccacatgggccccatggagatctacaaaaccgtgagcgcctggaagcggcagcctgtgcgcgtgctgagcctgtttcggaatatcgataaagtcctgaaaagcctgggattcctggagagcggctctggctccggcggtggcaccctgaagtacgtggaggatgtgacaaacgtggtcagacgggatgtggagaagtggggccccttcgatctggtgtacggcagcacccaacccctgggcagctcttgtgaccggtgccctggctggtacatgtttcagttccaccggatcctgcagtacgccctgccgagacaggagtcccagcggccattcttttggattttcatggacaacttgctgctgaccgaggatgaccaggaaactaccactcggttcctgcagaccgaagccgtgaccctgcaggacgtgagaggccgggactaccagaacgccatgcgggtgtggtccaacatccctggactgaaaagcaagcacgcacctctgacccctaaagaagaggagtacctgcaggcccaggtgcggagcagaagcaagctggacgcccctaaggtggatctgctggtgaagaattgcctcctgcccctgagagagtacttcaagtatttcagccagaatagtctgcccctgggcggcccaagcagcggcgcccctcctcccagcggcggcagcccagccggctccccaacctctaccgaggagggcacctctgagtccgccacccccgagagcggccctggcacctccaccgagcccagcgagggcagcgcacccggcagccctgccggcagccccacctccacagaggagggaaccagcaccgagcccagcgaaggcagcgccccaggcaccagcaccgagcctagtgagggcggctctggcggcggcagcgcccaggagattaaacggatcaacaagatcagaagaagacttgtgaaagacagcaacaccaagaaggccggcaagacaggccccatgaaaaccctgctggttagagtgatgacacccgatctgagagagcggctggaaaacctgagaaagaagcctgaaaatatcccccagcccatcagcaatacatctagagccaacctgaataagctgctgaccgattacaccgaaatgaagaaggcgatcctgcatgtgtactgggaagagttccagaaggaccctgtgggcctgatgagccgggtggcccagcctgccagcaagaagatcgatcagaacaagctgaaacctgagatggacgagaagggcaacctgaccaccgccggctttgcctgctctcagtgtggccagcccctgttcgtgtacaagctggagcaggtgtctgagaagggcaaggcttacaccaactacttcggacggtgcaatgtggccgagcacgaaaagctgatcctgctggcccagctgaagcccgagaaggatagcgacgaagccgtgacatatagcctgggaaagtttgggcagagggccctggatttctacagcattcatgtgaccaaggagtccacccaccccgtgaagcccctggcccagatcgccggaaacagatacgcctccggacctgtgggaaaggccctgagcgacgcatgtatgggcacaatcgcctccttcctgtctaagtaccaggacatcatcatcgaacaccagaaggtggtgaagggcaaccagaagagactggagagcctgcgggagctggccggcaaggaaaacctggaataccctagcgtgaccctgccacctcagcctcacaccaaggagggcgttgatgcctacaacgaagtgatcgcccgggtgcgaatgtgggtgaacctgaacctgtggcagaagctgaagctaagcagagatgatgccaagcctctgctgagactgaagggattcccttcctttcctctggtcgagagacaggccaacgaagtggactggtgggacatggtgtgtaacgtgaagaagctgatcaacgagaaaaaggaggatggcaaggtgttttggcagaatctggctggctacaagagacaggaagccctgagaccatacctgagcagcgaggaagatcggaagaagggaaagaaattcgctcggtaccagctgggcgacctgctgctgcacctggaaaagaagcacggcgaggactggggaaaggtgtacgacgaggcctgggagcggattgacaagaaagtggaaggcctgagcaagcacatcaagctggaagaggaacggagaagcgaggacgcccagagcaaggccgccctgaccgactggctgcgggctaaggccagcttcgtgatcgagggcctgaaggaggccgacaaggacgagttctgcagatgcgagctgaagctgcagaagtggtacggggacctgcggggaaagcccttcgccatcgaagccgagaacagcatcctggacatcagcggcttcagcaagcagtacaactgtgccttcatctggcagaaggacggcgtgaagaagctgaacctgtacctgatcatcaactacttcaagggcggcaagctgcggttcaagaagatcaaacctgaagccttcgaagccaacagattctacaccgtgatcaacaaaaagagcggcgagatcgtgcccatggaggtgaacttcaacttcgacgaccccaacctgatcatcctgcctctggcctttggcaagagacagggcagagaattcatctggaacgacctgctgtccctggaaaccggcagcctgaagctggccaacggaagagtgatcgagaagacactgtacaacagaagaacccggcaggatgagcctgccctgttcgtggccctgaccttcgagcggcgggaggtcctggactcctccaatatcaaaccaatgaacctgatcggcgtggcaagaggcgaaaacatccccgccgtgatcgccctgaccgaccccgagggctgcccactgagccggtttaaggatagcctgggaaacccaacccacatcctgagaatcggcgagagctataaggagaagcagcggaccatccaggccaagaaggaggtggagcagcggagagccggcggctacagccggaagtacgccagcaaagccaagaatctggcagacgatatggtgagaaacaccgctagagatctgctgtactacgccgtgacccaggatgccatgctgatcttcgccaacctgagccggggcttcggccggcagggcaagcggaccttcatggccgagagacagtacacacggatggaggactggctgaccgccaagctggcctacgagggcctgagcaagacctacctgtccaagacactggcccagtacacctccaagacatgcagcaactgtgggtttaccatcaccagcgccgactacgacagggtgctggagaagctgaagaagacagcaacaggctggatgaccacaattaacggcaaggagctgaaggtggagggccagattacctactacaacagatacaagagacagaacgtagtcaaggacctgtccgtcgagctggatagactgagcgaagaatctgtgaacaacgacatctcctcctggacaaagggcagaagcggagaagctctgagcctcctgaagaaaagattctcccatagacccgtgcaggagaagttcgtgtgcctgaactgcggcttcgagacacacgcagccgagcaagccgccctgaacatcgccagatcctggctgttcctgcggagccaggagtacaagaaataccagacaaacaagacaaccggcaacaccgataagagagccttcgtcgagacctggcagtccttttaccggaagaagcttaaggaggtgtggaaacctgccgtgcggtctggcggatctggcggaggctccacaagcttccaggaggccgtgaccttcaaggacgtggccgtgaccttcaccgaggaggagctgggcctgctggacagcacccagaggaagctgtacagggacgtgatgctggagaacttcaggaacctgctgctggtgggcaaccagcccttcaagcccgagctgatcttccagctggagagggaggagatgctgctgatgctggagaccgagatccagaggggcaccaagagccaccacagcctggagaccagccccaagaaaaagagaaaagtctaagctgccttctgcggggcttgccttctggccatgcccttcttctctcccttgcacctgtacctcttggtctttgaataaagcctgagtaggaaggctagcaaaaaaaaaaaaaaaaaaaaaaaaaaaaaaaaaaaaaaaaaaaaaaaaaaaaaaaaaaaaaaaaaaaaaaaaaaaaaaaa

SEQ ID NO: 6187 - RNA, 5797 nt, synthetic construct
  source 1..5797: mol_type = other RNA
aggaaataagagagaaaagaagagtaagaagaaatataagagccaccatggcccctaagaagaagcgtaaagtgagccggatggaacgcctcgtctacgaggtgcggcagaagtgcagaaacatcgaggacatctgcatctcctgcggatctctgaacgtgaccctggagcacccactgttcatcggcggcatgtgccagaactgtaaaaactgttttctggagtgtgcctatcaatacgacgatgacggctaccagagctactgcaccatctgttgcggcggaagagaggtgctgatgtgtggaaataacaactgctgccggtgcttctgcgtggaatgcgtggacctgctggtgggccccggcgccgcccaggccgctattaaggaagatccttggaactgctacatgtgcggccacaagggcacatacggcctgctgagacggagagaggactggcctagcagactgcagatgttcttcgccaataaccacgaccaggagttcgacccccctaaggtgtaccctcccgtccccgccgagaagagaaagcccatccgggtcctgagcctgttcgatggcatcgccaccggtctgctggtgctgaaggacctgggcatccaggtggataggtacattgcctccgaggtgtgcgaggactccatcaccgtgggaatggtgcgtcatcagggcaagatcatgtacgtgggcgacgtgcggagcgtgacacagaagcatatccaggagtggggccctttcgacctggtgatcggcggcagcccttgcaatgacctgagcatcgtgaacccagcccggaagggcctgtacgagggaaccggcagactgttcttcgagttttacagactgctgcacgacgcccggcctaaggaaggcgacgaccggcccttcttttggctgttcgagaatgtggtggccatgggagtcagcgacaagcgggatattagccggttcctggagagcaaccccgtgatgatcgatgccaaggaagtgagcgccgcccaccgggccagatacttctggggcaatctgcctggcatgaacagacccctggccagcaccgtgaacgacaagctggagctgcaggagtgcctggagcacggccggatcgccaagttcagcaaggtgagaaccatcaccacccgaagcaacagcatcaaacaaggcaaggaccagcactttcctgtgttcatgaacgagaaggaggacatcctgtggtgtaccgagatggagagagtgttcgggttcccagtccactacacagatgtcagcaacatgtctagactggccagacagagactgctgggaagaagctggtccgtccctgtgatcagacacctgttcgcccctctgaaggagtacttcgcctgcgtgagcagcggcaacagcaacgccaacagccggggccccagcttctctagcggcctggtgccactgtccctgagagggagccacatgggccccatggagatctacaaaaccgtgagcgcctggaagcggcagcctgtgcgcgtgctgagcctgtttcggaatatcgataaagtcctgaaaagcctgggattcctggagagcggctctggctccggcggtggcaccctgaagtacgtggaggatgtgacaaacgtggtcagacgggatgtggagaagtggggccccttcgatctggtgtacggcagcacccaacccctgggcagctcttgtgaccggtgccctggctggtacatgtttcagttccaccggatcctgcagtacgccctgccgagacaggagtcccagcggccattcttttggattttcatggacaacttgctgctgaccgaggatgaccaggaaactaccactcggttcctgcagaccgaagccgtgaccctgcaggacgtgagaggccgggactaccagaacgccatgcgggtgtggtccaacatccctggactgaaaagcaagcacgcacctctgacccctaaagaagaggagtacctgcaggcccaggtgcggagcagaagcaagctggacgcccctaaggtggatctgctggtgaagaattgcctcctgcccctgagagagtacttcaagtatttcagccagaatagtctgcccctgggcggcccaagcagcggcgcccctcctcccagcggcggcagcccagccggctccccaacctctaccgaggagggcacctctgagtccgccacccccgagagcggccctggcacctccaccgagcccagcgagggcagcgcacccggcagccctgccggcagccccacctccacagaggagggaaccagcaccgagcccagcgaaggcagcgccccaggcaccagcaccgagcctagtgagggcggctctggcggcggcagcgcccaggagattaaacggatcaacaagatcagaagaagacttgtgaaagacagcaacaccaagaaggccggcaagacaggccccatgaaaaccctgctggttagagtgatgacacccgatctgagagagcggctggaaaacctgagaaagaagcctgaaaatatcccccagcccatcagcaatacatctagagccaacctgaataagctgctgaccgattacaccgaaatgaagaaggcgatcctgcatgtgtactgggaagagttccagaaggaccctgtgggcctgatgagccgggtggcccagcctgccagcaagaagatcgatcagaacaagctgaaacctgagatggacgagaagggcaacctgaccaccgccggctttgcctgctctcagtgtggccagcccctgttcgtgtacaagctggagcaggtgtctgagaagggcaaggcttacaccaactacttcggacggtgcaatgtggccgagcacgaaaagctgatcctgctggcccagctgaagcccgagaaggatagcgacgaagccgtgacatatagcctgggaaagtttgggcagagggccctggatttctacagcattcatgtgaccaaggagtccacccaccccgtgaagcccctggcccagatcgccggaaacagatacgcctccggacctgtgggaaaggccctgagcgacgcatgtatgggcacaatcgcctccttcctgtctaagtaccaggacatcatcatcgaacaccagaaggtggtgaagggcaaccagaagagactggagagcctgcgggagctggccggcaaggaaaacctggaataccctagcgtgaccctgccacctcagcctcacaccaaggagggcgttgatgcctacaacgaagtgatcgcccgggtgcgaatgtgggtgaacctgaacctgtggcagaagctgaagctaagcagagatgatgccaagcctctgctgagactgaagggattcccttcctttcctctggtcgagagacaggccaacgaagtggactggtgggacatggtgtgtaacgtgaagaagctgatcaacgagaaaaaggaggatggcaaggtgttttggcagaatctggctggctacaagagacaggaagccctgagaccatacctgagcagcgaggaagatcggaagaagggaaagaaattcgctcggtaccagctgggcgacctgctgctgcacctggaaaagaagcacggcgaggactggggaaaggtgtacgacgaggcctgggagcggattgacaagaaagtggaaggcctgagcaagcacatcaagctggaagaggaacggagaagcgaggacgcccagagcaaggccgccctgaccgactggctgcgggctaaggccagcttcgtgatcgagggcctgaaggaggccgacaaggacgagttctgcagatgcgagctgaagctgcagaagtggtacggggacctgcggggaaagcccttcgccatcgaagccgagaacagcatcctggacatcagcggcttcagcaagcagtacaactgtgccttcatctggcagaaggacggcgtgaagaagctgaacctgtacctgatcatcaactacttcaagggcggcaagctgcggttcaagaagatcaaacctgaagccttcgaagccaacagattctacaccgtgatcaacaaaaagagcggcgagatcgtgcccatggaggtgaacttcaacttcgacgaccccaacctgatcatcctgcctctggcctttggcaagagacagggcagagaattcatctggaacgacctgctgtccctggaaaccggcagcctgaagctggccaacggaagagtgatcgagaagacactgtacaacagaagaacccggcaggatgagcctgccctgttcgtggccctgaccttcgagcggcgggaggtcctggactcctccaatatcaaaccaatgaacctgatcggcgtggcaagaggcgaaaacatccccgccgtgatcgccctgaccgaccccgagggctgcccactgagccggtttaaggatagcctgggaaacccaacccacatcctgagaatcggcgagagctataaggagaagcagcggaccatccaggccaagaaggaggtggagcagcggagagccggcggctacagccggaagtacgccagcaaagccaagaatctggcagacgatatggtgagaaacaccgctagagatctgctgtactacgccgtgacccaggatgccatgctgatcttcgccaacctgagccggggcttcggccggcagggcaagcggaccttcatggccgagagacagtacacacggatggaggactggctgaccgccaagctggcctacgagggcctgagcaagacctacctgtccaagacactggcccagtacacctccaagacatgcagcaactgtgggtttaccatcaccagcgccgactacgacagggtgctggagaagctgaagaagacagcaacaggctggatgaccacaattaacggcaaggagctgaaggtggagggccagattacctactacaacagatacaagagacagaacgtagtcaaggacctgtccgtcgagctggatagactgagcgaagaatctgtgaacaacgacatctcctcctggacaaagggcagaagcggagaagctctgagcctcctgaagaaaagattctcccatagacccgtgcaggagaagttcgtgtgcctgaactgcggcttcgagacacacgcagccgagcaagccgccctgaacatcgccagatcctggctgttcctgcggagccaggagtacaagaaataccagacaaacaagacaaccggcaacaccgataagagagccttcgtcgagacctggcagtccttttaccggaagaagcttaaggaggtgtggaaacctgccgtgcggtctggcggatctggcggaggctccacaagcatggagggcctggtgatgttccaggacctgagcatcgacttcagccaggaggagtgggagtgcctggacgccgcccagaaggacctgtacagggacgtgatgatggagaactacagcagcctggtgagcctgggcctgagcacccccaagcccgacgtgatcagcctgctggagcagggcaaggagccctggatggtgagcagggacgtgctgggcggctggtgccccgacaggctgaagaagaccagccccaagaaaaagagaaaagtctaagctgccttctgcggggcttgccttctggccatgcccttcttctctcccttgcacctgtacctcttggtctttgaataaagcctgagtaggaaggctagcaaaaaaaaaaaaaaaaaaaaaaaaaaaaaaaaaaaaaaaaaaaaaaaaaaaaaaaaaaaaaaaaaaaaaaaaaaaaaaaa

SEQ ID NO: 6188 - RNA, 5797 nt, synthetic construct
  source 1..5797: mol_type = other RNA
aggaaataagagagaaaagaagagtaagaagaaatataagagccaccatggcccctaagaagaagcgtaaagtgagccggatggaacgcctcgtctacgaggtgcggcagaagtgcagaaacatcgaggacatctgcatctcctgcggatctctgaacgtgaccctggagcacccactgttcatcggcggcatgtgccagaactgtaaaaactgttttctggagtgtgcctatcaatacgacgatgacggctaccagagctactgcaccatctgttgcggcggaagagaggtgctgatgtgtggaaataacaactgctgccggtgcttctgcgtggaatgcgtggacctgctggtgggccccggcgccgcccaggccgctattaaggaagatccttggaactgctacatgtgcggccacaagggcacatacggcctgctgagacggagagaggactggcctagcagactgcagatgttcttcgccaataaccacgaccaggagttcgacccccctaaggtgtaccctcccgtccccgccgagaagagaaagcccatccgggtcctgagcctgttcgatggcatcgccaccggtctgctggtgctgaaggacctgggcatccaggtggataggtacattgcctccgaggtgtgcgaggactccatcaccgtgggaatggtgcgtcatcagggcaagatcatgtacgtgggcgacgtgcggagcgtgacacagaagcatatccaggagtggggccctttcgacctggtgatcggcggcagcccttgcaatgacctgagcatcgtgaacccagcccggaagggcctgtacgagggaaccggcagactgttcttcgagttttacagactgctgcacgacgcccggcctaaggaaggcgacgaccggcccttcttttggctgttcgagaatgtggtggccatgggagtcagcgacaagcgggatattagccggttcctggagagcaaccccgtgatgatcgatgccaaggaagtgagcgccgcccaccgggccagatacttctggggcaatctgcctggcatgaacagacccctggccagcaccgtgaacgacaagctggagctgcaggagtgcctggagcacggccggatcgccaagttcagcaaggtgagaaccatcaccacccgaagcaacagcatcaaacaaggcaaggaccagcactttcctgtgttcatgaacgagaaggaggacatcctgtggtgtaccgagatggagagagtgttcgggttcccagtccactacacagatgtcagcaacatgtctagactggccagacagagactgctgggaagaagctggtccgtccctgtgatcagacacctgttcgcccctctgaaggagtacttcgcctgcgtgagcagcggcaacagcaacgccaacagccggggccccagcttctctagcggcctggtgccactgtccctgagagggagccacatgggccccatggagatctacaaaaccgtgagcgcctggaagcggcagcctgtgcgcgtgctgagcctgtttcggaatatcgataaagtcctgaaaagcctgggattcctggagagcggctctggctccggcggtggcaccctgaagtacgtggaggatgtgacaaacgtggtcagacgggatgtggagaagtggggccccttcgatctggtgtacggcagcacccaacccctgggcagctcttgtgaccggtgccctggctggtacatgtttcagttccaccggatcctgcagtacgccctgccgagacaggagtcccagcggccattcttttggattttcatggacaacttgctgctgaccgaggatgaccaggaaactaccactcggttcctgcagaccgaagccgtgaccctgcaggacgtgagaggccgggactaccagaacgccatgcgggtgtggtccaacatccctggactgaaaagcaagcacgcacctctgacccctaaagaagaggagtacctgcaggcccaggtgcggagcagaagcaagctggacgcccctaaggtggatctgctggtgaagaattgcctcctgcccctgagagagtacttcaagtatttcagccagaatagtctgcccctgggcggcccaagcagcggcgcccctcctcccagcggcggcagcccagccggctccccaacctctaccgaggagggcacctctgagtccgccacccccgagagcggccctggcacctccaccgagcccagcgagggcagcgcacccggcagccctgccggcagccccacctccacagaggagggaaccagcaccgagcccagcgaaggcagcgccccaggcaccagcaccgagcctagtgagggcggctctggcggcggcagcgcccaggagattaaacggatcaacaagatcagaagaagacttgtgaaagacagcaacaccaagaaggccggcaagacaggccccatgaaaaccctgctggttagagtgatgacacccgatctgagagagcggctggaaaacctgagaaagaagcctgaaaatatcccccagcccatcagcaatacatctagagccaacctgaataagctgctgaccgattacaccgaaatgaagaaggcgatcctgcatgtgtactgggaagagttccagaaggaccctgtgggcctgatgagccgggtggcccagcctgccagcaagaagatcgatcagaacaagctgaaacctgagatggacgagaagggcaacctgaccaccgccggctttgcctgctctcagtgtggccagcccctgttcgtgtacaagctggagcaggtgtctgagaagggcaaggcttacaccaactacttcggacggtgcaatgtggccgagcacgaaaagctgatcctgctggcccagctgaagcccgagaaggatagcgacgaagccgtgacatatagcctgggaaagtttgggcagagggccctggatttctacagcattcatgtgaccaaggagtccacccaccccgtgaagcccctggcccagatcgccggaaacagatacgcctccggacctgtgggaaaggccctgagcgacgcatgtatgggcacaatcgcctccttcctgtctaagtaccaggacatcatcatcgaacaccagaaggtggtgaagggcaaccagaagagactggagagcctgcgggagctggccggcaaggaaaacctggaataccctagcgtgaccctgccacctcagcctcacaccaaggagggcgttgatgcctacaacgaagtgatcgcccgggtgcgaatgtgggtgaacctgaacctgtggcagaagctgaagctaagcagagatgatgccaagcctctgctgagactgaagggattcccttcctttcctctggtcgagagacaggccaacgaagtggactggtgggacatggtgtgtaacgtgaagaagctgatcaacgagaaaaaggaggatggcaaggtgttttggcagaatctggctggctacaagagacaggaagccctgagaccatacctgagcagcgaggaagatcggaagaagggaaagaaattcgctcggtaccagctgggcgacctgctgctgcacctggaaaagaagcacggcgaggactggggaaaggtgtacgacgaggcctgggagcggattgacaagaaagtggaaggcctgagcaagcacatcaagctggaagaggaacggagaagcgaggacgcccagagcaaggccgccctgaccgactggctgcgggctaaggccagcttcgtgatcgagggcctgaaggaggccgacaaggacgagttctgcagatgcgagctgaagctgcagaagtggtacggggacctgcggggaaagcccttcgccatcgaagccgagaacagcatcctggacatcagcggcttcagcaagcagtacaactgtgccttcatctggcagaaggacggcgtgaagaagctgaacctgtacctgatcatcaactacttcaagggcggcaagctgcggttcaagaagatcaaacctgaagccttcgaagccaacagattctacaccgtgatcaacaaaaagagcggcgagatcgtgcccatggaggtgaacttcaacttcgacgaccccaacctgatcatcctgcctctggcctttggcaagagacagggcagagaattcatctggaacgacctgctgtccctggaaaccggcagcctgaagctggccaacggaagagtgatcgagaagacactgtacaacagaagaacccggcaggatgagcctgccctgttcgtggccctgaccttcgagcggcgggaggtcctggactcctccaatatcaaaccaatgaacctgatcggcgtggcaagaggcgaaaacatccccgccgtgatcgccctgaccgaccccgagggctgcccactgagccggtttaaggatagcctgggaaacccaacccacatcctgagaatcggcgagagctataaggagaagcagcggaccatccaggccaagaaggaggtggagcagcggagagccggcggctacagccggaagtacgccagcaaagccaagaatctggcagacgatatggtgagaaacaccgctagagatctgctgtactacgccgtgacccaggatgccatgctgatcttcgccaacctgagccggggcttcggccggcagggcaagcggaccttcatggccgagagacagtacacacggatggaggactggctgaccgccaagctggcctacgagggcctgagcaagacctacctgtccaagacactggcccagtacacctccaagacatgcagcaactgtgggtttaccatcaccagcgccgactacgacagggtgctggagaagctgaagaagacagcaacaggctggatgaccacaattaacggcaaggagctgaaggtggagggccagattacctactacaacagatacaagagacagaacgtagtcaaggacctgtccgtcgagctggatagactgagcgaagaatctgtgaacaacgacatctcctcctggacaaagggcagaagcggagaagctctgagcctcctgaagaaaagattctcccatagacccgtgcaggagaagttcgtgtgcctgaactgcggcttcgagacacacgcagccgagcaagccgccctgaacatcgccagatcctggctgttcctgcggagccaggagtacaagaaataccagacaaacaagacaaccggcaacaccgataagagagccttcgtcgagacctggcagtccttttaccggaagaagcttaaggaggtgtggaaacctgccgtgcggtctggcggatctggcggaggctccacaagcacccaggagcacgtgaccttcagggacgtggccgtgttcttcagccaggacgagtggctgcacctggacagcgcccagagggccctgtacagggaggtgatgctggagaactacagcagcctggtgagcctgggcatccccttcagcatgcccaagctgatccaccagctgcagcagggcgaggacccctgcatggtggagagggaggtgagcgccgacacctgcctgggcttcaagacctggaccagccccaagaaaaagagaaaagtctaagctgccttctgcggggcttgccttctggccatgcccttcttctctcccttgcacctgtacctcttggtctttgaataaagcctgagtaggaaggctagcaaaaaaaaaaaaaaaaaaaaaaaaaaaaaaaaaaaaaaaaaaaaaaaaaaaaaaaaaaaaaaaaaaaaaaaaaaaaaaaa

SEQ ID NO: 6189 - RNA, 5797 nt, synthetic construct
  source 1..5797: mol_type = other RNA
aggaaataagagagaaaagaagagtaagaagaaatataagagccaccatggcccctaagaagaagcgtaaagtgagccggatggaacgcctcgtctacgaggtgcggcagaagtgcagaaacatcgaggacatctgcatctcctgcggatctctgaacgtgaccctggagcacccactgttcatcggcggcatgtgccagaactgtaaaaactgttttctggagtgtgcctatcaatacgacgatgacggctaccagagctactgcaccatctgttgcggcggaagagaggtgctgatgtgtggaaataacaactgctgccggtgcttctgcgtggaatgcgtggacctgctggtgggccccggcgccgcccaggccgctattaaggaagatccttggaactgctacatgtgcggccacaagggcacatacggcctgctgagacggagagaggactggcctagcagactgcagatgttcttcgccaataaccacgaccaggagttcgacccccctaaggtgtaccctcccgtccccgccgagaagagaaagcccatccgggtcctgagcctgttcgatggcatcgccaccggtctgctggtgctgaaggacctgggcatccaggtggataggtacattgcctccgaggtgtgcgaggactccatcaccgtgggaatggtgcgtcatcagggcaagatcatgtacgtgggcgacgtgcggagcgtgacacagaagcatatccaggagtggggccctttcgacctggtgatcggcggcagcccttgcaatgacctgagcatcgtgaacccagcccggaagggcctgtacgagggaaccggcagactgttcttcgagttttacagactgctgcacgacgcccggcctaaggaaggcgacgaccggcccttcttttggctgttcgagaatgtggtggccatgggagtcagcgacaagcgggatattagccggttcctggagagcaaccccgtgatgatcgatgccaaggaagtgagcgccgcccaccgggccagatacttctggggcaatctgcctggcatgaacagacccctggccagcaccgtgaacgacaagctggagctgcaggagtgcctggagcacggccggatcgccaagttcagcaaggtgagaaccatcaccacccgaagcaacagcatcaaacaaggcaaggaccagcactttcctgtgttcatgaacgagaaggaggacatcctgtggtgtaccgagatggagagagtgttcgggttcccagtccactacacagatgtcagcaacatgtctagactggccagacagagactgctgggaagaagctggtccgtccctgtgatcagacacctgttcgcccctctgaaggagtacttcgcctgcgtgagcagcggcaacagcaacgccaacagccggggccccagcttctctagcggcctggtgccactgtccctgagagggagccacatgggccccatggagatctacaaaaccgtgagcgcctggaagcggcagcctgtgcgcgtgctgagcctgtttcggaatatcgataaagtcctgaaaagcctgggattcctggagagcggctctggctccggcggtggcaccctgaagtacgtggaggatgtgacaaacgtggtcagacgggatgtggagaagtggggccccttcgatctggtgtacggcagcacccaacccctgggcagctcttgtgaccggtgccctggctggtacatgtttcagttccaccggatcctgcagtacgccctgccgagacaggagtcccagcggccattcttttggattttcatggacaacttgctgctgaccgaggatgaccaggaaactaccactcggttcctgcagaccgaagccgtgaccctgcaggacgtgagaggccgggactaccagaacgccatgcgggtgtggtccaacatccctggactgaaaagcaagcacgcacctctgacccctaaagaagaggagtacctgcaggcccaggtgcggagcagaagcaagctggacgcccctaaggtggatctgctggtgaagaattgcctcctgcccctgagagagtacttcaagtatttcagccagaatagtctgcccctgggcggcccaagcagcggcgcccctcctcccagcggcggcagcccagccggctccccaacctctaccgaggagggcacctctgagtccgccacccccgagagcggccctggcacctccaccgagcccagcgagggcagcgcacccggcagccctgccggcagccccacctccacagaggagggaaccagcaccgagcccagcgaaggcagcgccccaggcaccagcaccgagcctagtgagggcggctctggcggcggcagcgcccaggagattaaacggatcaacaagatcagaagaagacttgtgaaagacagcaacaccaagaaggccggcaagacaggccccatgaaaaccctgctggttagagtgatgacacccgatctgagagagcggctggaaaacctgagaaagaagcctgaaaatatcccccagcccatcagcaatacatctagagccaacctgaataagctgctgaccgattacaccgaaatgaagaaggcgatcctgcatgtgtactgggaagagttccagaaggaccctgtgggcctgatgagccgggtggcccagcctgccagcaagaagatcgatcagaacaagctgaaacctgagatggacgagaagggcaacctgaccaccgccggctttgcctgctctcagtgtggccagcccctgttcgtgtacaagctggagcaggtgtctgagaagggcaaggcttacaccaactacttcggacggtgcaatgtggccgagcacgaaaagctgatcctgctggcccagctgaagcccgagaaggatagcgacgaagccgtgacatatagcctgggaaagtttgggcagagggccctggatttctacagcattcatgtgaccaaggagtccacccaccccgtgaagcccctggcccagatcgccggaaacagatacgcctccggacctgtgggaaaggccctgagcgacgcatgtatgggcacaatcgcctccttcctgtctaagtaccaggacatcatcatcgaacaccagaaggtggtgaagggcaaccagaagagactggagagcctgcgggagctggccggcaaggaaaacctggaataccctagcgtgaccctgccacctcagcctcacaccaaggagggcgttgatgcctacaacgaagtgatcgcccgggtgcgaatgtgggtgaacctgaacctgtggcagaagctgaagctaagcagagatgatgccaagcctctgctgagactgaagggattcccttcctttcctctggtcgagagacaggccaacgaagtggactggtgggacatggtgtgtaacgtgaagaagctgatcaacgagaaaaaggaggatggcaaggtgttttggcagaatctggctggctacaagagacaggaagccctgagaccatacctgagcagcgaggaagatcggaagaagggaaagaaattcgctcggtaccagctgggcgacctgctgctgcacctggaaaagaagcacggcgaggactggggaaaggtgtacgacgaggcctgggagcggattgacaagaaagtggaaggcctgagcaagcacatcaagctggaagaggaacggagaagcgaggacgcccagagcaaggccgccctgaccgactggctgcgggctaaggccagcttcgtgatcgagggcctgaaggaggccgacaaggacgagttctgcagatgcgagctgaagctgcagaagtggtacggggacctgcggggaaagcccttcgccatcgaagccgagaacagcatcctggacatcagcggcttcagcaagcagtacaactgtgccttcatctggcagaaggacggcgtgaagaagctgaacctgtacctgatcatcaactacttcaagggcggcaagctgcggttcaagaagatcaaacctgaagccttcgaagccaacagattctacaccgtgatcaacaaaaagagcggcgagatcgtgcccatggaggtgaacttcaacttcgacgaccccaacctgatcatcctgcctctggcctttggcaagagacagggcagagaattcatctggaacgacctgctgtccctggaaaccggcagcctgaagctggccaacggaagagtgatcgagaagacactgtacaacagaagaacccggcaggatgagcctgccctgttcgtggccctgaccttcgagcggcgggaggtcctggactcctccaatatcaaaccaatgaacctgatcggcgtggcaagaggcgaaaacatccccgccgtgatcgccctgaccgaccccgagggctgcccactgagccggtttaaggatagcctgggaaacccaacccacatcctgagaatcggcgagagctataaggagaagcagcggaccatccaggccaagaaggaggtggagcagcggagagccggcggctacagccggaagtacgccagcaaagccaagaatctggcagacgatatggtgagaaacaccgctagagatctgctgtactacgccgtgacccaggatgccatgctgatcttcgccaacctgagccggggcttcggccggcagggcaagcggaccttcatggccgagagacagtacacacggatggaggactggctgaccgccaagctggcctacgagggcctgagcaagacctacctgtccaagacactggcccagtacacctccaagacatgcagcaactgtgggtttaccatcaccagcgccgactacgacagggtgctggagaagctgaagaagacagcaacaggctggatgaccacaattaacggcaaggagctgaaggtggagggccagattacctactacaacagatacaagagacagaacgtagtcaaggacctgtccgtcgagctggatagactgagcgaagaatctgtgaacaacgacatctcctcctggacaaagggcagaagcggagaagctctgagcctcctgaagaaaagattctcccatagacccgtgcaggagaagttcgtgtgcctgaactgcggcttcgagacacacgcagccgagcaagccgccctgaacatcgccagatcctggctgttcctgcggagccaggagtacaagaaataccagacaaacaagacaaccggcaacaccgataagagagccttcgtcgagacctggcagtccttttaccggaagaagcttaaggaggtgtggaaacctgccgtgcggtctggcggatctggcggaggctccacaagccaggccgaggtgaccttcgaggacgtggccgtgctgttcagcagggaggagtggggcaggctgggccccgcccagaggggcctgtacagggacgtgatgctggagacctacaggaacctggtgagcctgggcgccggccccgccggccccaagcccggcgtgatcacccagctggagcagggcgacgagccctgggtgctggacgcccagggcgccaagggcaaggagaggctgagggtgagcaccagccccaagaaaaagagaaaagtctaagctgccttctgcggggcttgccttctggccatgcccttcttctctcccttgcacctgtacctcttggtctttgaataaagcctgagtaggaaggctagcaaaaaaaaaaaaaaaaaaaaaaaaaaaaaaaaaaaaaaaaaaaaaaaaaaaaaaaaaaaaaaaaaaaaaaaaaaaaaaaa

SEQ ID NO: 6190 - RNA, 5797 nt, synthetic construct
  source 1..5797: mol_type = other RNA
aggaaataagagagaaaagaagagtaagaagaaatataagagccaccatggcccctaagaagaagcgtaaagtgagccggatggaacgcctcgtctacgaggtgcggcagaagtgcagaaacatcgaggacatctgcatctcctgcggatctctgaacgtgaccctggagcacccactgttcatcggcggcatgtgccagaactgtaaaaactgttttctggagtgtgcctatcaatacgacgatgacggctaccagagctactgcaccatctgttgcggcggaagagaggtgctgatgtgtggaaataacaactgctgccggtgcttctgcgtggaatgcgtggacctgctggtgggccccggcgccgcccaggccgctattaaggaagatccttggaactgctacatgtgcggccacaagggcacatacggcctgctgagacggagagaggactggcctagcagactgcagatgttcttcgccaataaccacgaccaggagttcgacccccctaaggtgtaccctcccgtccccgccgagaagagaaagcccatccgggtcctgagcctgttcgatggcatcgccaccggtctgctggtgctgaaggacctgggcatccaggtggataggtacattgcctccgaggtgtgcgaggactccatcaccgtgggaatggtgcgtcatcagggcaagatcatgtacgtgggcgacgtgcggagcgtgacacagaagcatatccaggagtggggccctttcgacctggtgatcggcggcagcccttgcaatgacctgagcatcgtgaacccagcccggaagggcctgtacgagggaaccggcagactgttcttcgagttttacagactgctgcacgacgcccggcctaaggaaggcgacgaccggcccttcttttggctgttcgagaatgtggtggccatgggagtcagcgacaagcgggatattagccggttcctggagagcaaccccgtgatgatcgatgccaaggaagtgagcgccgcccaccgggccagatacttctggggcaatctgcctggcatgaacagacccctggccagcaccgtgaacgacaagctggagctgcaggagtgcctggagcacggccggatcgccaagttcagcaaggtgagaaccatcaccacccgaagcaacagcatcaaacaaggcaaggaccagcactttcctgtgttcatgaacgagaaggaggacatcctgtggtgtaccgagatggagagagtgttcgggttcccagtccactacacagatgtcagcaacatgtctagactggccagacagagactgctgggaagaagctggtccgtccctgtgatcagacacctgttcgcccctctgaaggagtacttcgcctgcgtgagcagcggcaacagcaacgccaacagccggggccccagcttctctagcggcctggtgccactgtccctgagagggagccacatgggccccatggagatctacaaaaccgtgagcgcctggaagcggcagcctgtgcgcgtgctgagcctgtttcggaatatcgataaagtcctgaaaagcctgggattcctggagagcggctctggctccggcggtggcaccctgaagtacgtggaggatgtgacaaacgtggtcagacgggatgtggagaagtggggccccttcgatctggtgtacggcagcacccaacccctgggcagctcttgtgaccggtgccctggctggtacatgtttcagttccaccggatcctgcagtacgccctgccgagacaggagtcccagcggccattcttttggattttcatggacaacttgctgctgaccgaggatgaccaggaaactaccactcggttcctgcagaccgaagccgtgaccctgcaggacgtgagaggccgggactaccagaacgccatgcgggtgtggtccaacatccctggactgaaaagcaagcacgcacctctgacccctaaagaagaggagtacctgcaggcccaggtgcggagcagaagcaagctggacgcccctaaggtggatctgctggtgaagaattgcctcctgcccctgagagagtacttcaagtatttcagccagaatagtctgcccctgggcggcccaagcagcggcgcccctcctcccagcggcggcagcccagccggctccccaacctctaccgaggagggcacctctgagtccgccacccccgagagcggccctggcacctccaccgagcccagcgagggcagcgcacccggcagccctgccggcagccccacctccacagaggagggaaccagcaccgagcccagcgaaggcagcgccccaggcaccagcaccgagcctagtgagggcggctctggcggcggcagcgcccaggagattaaacggatcaacaagatcagaagaagacttgtgaaagacagcaacaccaagaaggccggcaagacaggccccatgaaaaccctgctggttagagtgatgacacccgatctgagagagcggctggaaaacctgagaaagaagcctgaaaatatcccccagcccatcagcaatacatctagagccaacctgaataagctgctgaccgattacaccgaaatgaagaaggcgatcctgcatgtgtactgggaagagttccagaaggaccctgtgggcctgatgagccgggtggcccagcctgccagcaagaagatcgatcagaacaagctgaaacctgagatggacgagaagggcaacctgaccaccgccggctttgcctgctctcagtgtggccagcccctgttcgtgtacaagctggagcaggtgtctgagaagggcaaggcttacaccaactacttcggacggtgcaatgtggccgagcacgaaaagctgatcctgctggcccagctgaagcccgagaaggatagcgacgaagccgtgacatatagcctgggaaagtttgggcagagggccctggatttctacagcattcatgtgaccaaggagtccacccaccccgtgaagcccctggcccagatcgccggaaacagatacgcctccggacctgtgggaaaggccctgagcgacgcatgtatgggcacaatcgcctccttcctgtctaagtaccaggacatcatcatcgaacaccagaaggtggtgaagggcaaccagaagagactggagagcctgcgggagctggccggcaaggaaaacctggaataccctagcgtgaccctgccacctcagcctcacaccaaggagggcgttgatgcctacaacgaagtgatcgcccgggtgcgaatgtgggtgaacctgaacctgtggcagaagctgaagctaagcagagatgatgccaagcctctgctgagactgaagggattcccttcctttcctctggtcgagagacaggccaacgaagtggactggtgggacatggtgtgtaacgtgaagaagctgatcaacgagaaaaaggaggatggcaaggtgttttggcagaatctggctggctacaagagacaggaagccctgagaccatacctgagcagcgaggaagatcggaagaagggaaagaaattcgctcggtaccagctgggcgacctgctgctgcacctggaaaagaagcacggcgaggactggggaaaggtgtacgacgaggcctgggagcggattgacaagaaagtggaaggcctgagcaagcacatcaagctggaagaggaacggagaagcgaggacgcccagagcaaggccgccctgaccgactggctgcgggctaaggccagcttcgtgatcgagggcctgaaggaggccgacaaggacgagttctgcagatgcgagctgaagctgcagaagtggtacggggacctgcggggaaagcccttcgccatcgaagccgagaacagcatcctggacatcagcggcttcagcaagcagtacaactgtgccttcatctggcagaaggacggcgtgaagaagctgaacctgtacctgatcatcaactacttcaagggcggcaagctgcggttcaagaagatcaaacctgaagccttcgaagccaacagattctacaccgtgatcaacaaaaagagcggcgagatcgtgcccatggaggtgaacttcaacttcgacgaccccaacctgatcatcctgcctctggcctttggcaagagacagggcagagaattcatctggaacgacctgctgtccctggaaaccggcagcctgaagctggccaacggaagagtgatcgagaagacactgtacaacagaagaacccggcaggatgagcctgccctgttcgtggccctgaccttcgagcggcgggaggtcctggactcctccaatatcaaaccaatgaacctgatcggcgtggcaagaggcgaaaacatccccgccgtgatcgccctgaccgaccccgagggctgcccactgagccggtttaaggatagcctgggaaacccaacccacatcctgagaatcggcgagagctataaggagaagcagcggaccatccaggccaagaaggaggtggagcagcggagagccggcggctacagccggaagtacgccagcaaagccaagaatctggcagacgatatggtgagaaacaccgctagagatctgctgtactacgccgtgacccaggatgccatgctgatcttcgccaacctgagccggggcttcggccggcagggcaagcggaccttcatggccgagagacagtacacacggatggaggactggctgaccgccaagctggcctacgagggcctgagcaagacctacctgtccaagacactggcccagtacacctccaagacatgcagcaactgtgggtttaccatcaccagcgccgactacgacagggtgctggagaagctgaagaagacagcaacaggctggatgaccacaattaacggcaaggagctgaaggtggagggccagattacctactacaacagatacaagagacagaacgtagtcaaggacctgtccgtcgagctggatagactgagcgaagaatctgtgaacaacgacatctcctcctggacaaagggcagaagcggagaagctctgagcctcctgaagaaaagattctcccatagacccgtgcaggagaagttcgtgtgcctgaactgcggcttcgagacacacgcagccgagcaagccgccctgaacatcgccagatcctggctgttcctgcggagccaggagtacaagaaataccagacaaacaagacaaccggcaacaccgataagagagccttcgtcgagacctggcagtccttttaccggaagaagcttaaggaggtgtggaaacctgccgtgcggtctggcggatctggcggaggctccacaagcgagccctgggccatcaccttcgccgacgtggccgtgtacttcagccccgaggagtggggctgcctgcagcccacccagagggccctgtacagggacgtgatgagggacacctacgtgctgctgagcgccctgggcggcggcggcggcgccaagcccgccctgatcagctgggtggagagggagagcgagctgtgggacagcgacgcccaggaccccgaggtgcccaagtggcccaccgaggccaccagccccaagaaaaagagaaaagtctaagctgccttctgcggggcttgccttctggccatgcccttcttctctcccttgcacctgtacctcttggtctttgaataaagcctgagtaggaaggctagcaaaaaaaaaaaaaaaaaaaaaaaaaaaaaaaaaaaaaaaaaaaaaaaaaaaaaaaaaaaaaaaaaaaaaaaaaaaaaaaa

SEQ ID NO: 6191 - RNA, 5797 nt, synthetic construct
  source 1..5797: mol_type = other RNA
aggaaataagagagaaaagaagagtaagaagaaatataagagccaccatggcccctaagaagaagcgtaaagtgagccggatggaacgcctcgtctacgaggtgcggcagaagtgcagaaacatcgaggacatctgcatctcctgcggatctctgaacgtgaccctggagcacccactgttcatcggcggcatgtgccagaactgtaaaaactgttttctggagtgtgcctatcaatacgacgatgacggctaccagagctactgcaccatctgttgcggcggaagagaggtgctgatgtgtggaaataacaactgctgccggtgcttctgcgtggaatgcgtggacctgctggtgggccccggcgccgcccaggccgctattaaggaagatccttggaactgctacatgtgcggccacaagggcacatacggcctgctgagacggagagaggactggcctagcagactgcagatgttcttcgccaataaccacgaccaggagttcgacccccctaaggtgtaccctcccgtccccgccgagaagagaaagcccatccgggtcctgagcctgttcgatggcatcgccaccggtctgctggtgctgaaggacctgggcatccaggtggataggtacattgcctccgaggtgtgcgaggactccatcaccgtgggaatggtgcgtcatcagggcaagatcatgtacgtgggcgacgtgcggagcgtgacacagaagcatatccaggagtggggccctttcgacctggtgatcggcggcagcccttgcaatgacctgagcatcgtgaacccagcccggaagggcctgtacgagggaaccggcagactgttcttcgagttttacagactgctgcacgacgcccggcctaaggaaggcgacgaccggcccttcttttggctgttcgagaatgtggtggccatgggagtcagcgacaagcgggatattagccggttcctggagagcaaccccgtgatgatcgatgccaaggaagtgagcgccgcccaccgggccagatacttctggggcaatctgcctggcatgaacagacccctggccagcaccgtgaacgacaagctggagctgcaggagtgcctggagcacggccggatcgccaagttcagcaaggtgagaaccatcaccacccgaagcaacagcatcaaacaaggcaaggaccagcactttcctgtgttcatgaacgagaaggaggacatcctgtggtgtaccgagatggagagagtgttcgggttcccagtccactacacagatgtcagcaacatgtctagactggccagacagagactgctgggaagaagctggtccgtccctgtgatcagacacctgttcgcccctctgaaggagtacttcgcctgcgtgagcagcggcaacagcaacgccaacagccggggccccagcttctctagcggcctggtgccactgtccctgagagggagccacatgggccccatggagatctacaaaaccgtgagcgcctggaagcggcagcctgtgcgcgtgctgagcctgtttcggaatatcgataaagtcctgaaaagcctgggattcctggagagcggctctggctccggcggtggcaccctgaagtacgtggaggatgtgacaaacgtggtcagacgggatgtggagaagtggggccccttcgatctggtgtacggcagcacccaacccctgggcagctcttgtgaccggtgccctggctggtacatgtttcagttccaccggatcctgcagtacgccctgccgagacaggagtcccagcggccattcttttggattttcatggacaacttgctgctgaccgaggatgaccaggaaactaccactcggttcctgcagaccgaagccgtgaccctgcaggacgtgagaggccgggactaccagaacgccatgcgggtgtggtccaacatccctggactgaaaagcaagcacgcacctctgacccctaaagaagaggagtacctgcaggcccaggtgcggagcagaagcaagctggacgcccctaaggtggatctgctggtgaagaattgcctcctgcccctgagagagtacttcaagtatttcagccagaatagtctgcccctgggcggcccaagcagcggcgcccctcctcccagcggcggcagcccagccggctccccaacctctaccgaggagggcacctctgagtccgccacccccgagagcggccctggcacctccaccgagcccagcgagggcagcgcacccggcagccctgccggcagccccacctccacagaggagggaaccagcaccgagcccagcgaaggcagcgccccaggcaccagcaccgagcctagtgagggcggctctggcggcggcagcgcccaggagattaaacggatcaacaagatcagaagaagacttgtgaaagacagcaacaccaagaaggccggcaagacaggccccatgaaaaccctgctggttagagtgatgacacccgatctgagagagcggctggaaaacctgagaaagaagcctgaaaatatcccccagcccatcagcaatacatctagagccaacctgaataagctgctgaccgattacaccgaaatgaagaaggcgatcctgcatgtgtactgggaagagttccagaaggaccctgtgggcctgatgagccgggtggcccagcctgccagcaagaagatcgatcagaacaagctgaaacctgagatggacgagaagggcaacctgaccaccgccggctttgcctgctctcagtgtggccagcccctgttcgtgtacaagctggagcaggtgtctgagaagggcaaggcttacaccaactacttcggacggtgcaatgtggccgagcacgaaaagctgatcctgctggcccagctgaagcccgagaaggatagcgacgaagccgtgacatatagcctgggaaagtttgggcagagggccctggatttctacagcattcatgtgaccaaggagtccacccaccccgtgaagcccctggcccagatcgccggaaacagatacgcctccggacctgtgggaaaggccctgagcgacgcatgtatgggcacaatcgcctccttcctgtctaagtaccaggacatcatcatcgaacaccagaaggtggtgaagggcaaccagaagagactggagagcctgcgggagctggccggcaaggaaaacctggaataccctagcgtgaccctgccacctcagcctcacaccaaggagggcgttgatgcctacaacgaagtgatcgcccgggtgcgaatgtgggtgaacctgaacctgtggcagaagctgaagctaagcagagatgatgccaagcctctgctgagactgaagggattcccttcctttcctctggtcgagagacaggccaacgaagtggactggtgggacatggtgtgtaacgtgaagaagctgatcaacgagaaaaaggaggatggcaaggtgttttggcagaatctggctggctacaagagacaggaagccctgagaccatacctgagcagcgaggaagatcggaagaagggaaagaaattcgctcggtaccagctgggcgacctgctgctgcacctggaaaagaagcacggcgaggactggggaaaggtgtacgacgaggcctgggagcggattgacaagaaagtggaaggcctgagcaagcacatcaagctggaagaggaacggagaagcgaggacgcccagagcaaggccgccctgaccgactggctgcgggctaaggccagcttcgtgatcgagggcctgaaggaggccgacaaggacgagttctgcagatgcgagctgaagctgcagaagtggtacggggacctgcggggaaagcccttcgccatcgaagccgagaacagcatcctggacatcagcggcttcagcaagcagtacaactgtgccttcatctggcagaaggacggcgtgaagaagctgaacctgtacctgatcatcaactacttcaagggcggcaagctgcggttcaagaagatcaaacctgaagccttcgaagccaacagattctacaccgtgatcaacaaaaagagcggcgagatcgtgcccatggaggtgaacttcaacttcgacgaccccaacctgatcatcctgcctctggcctttggcaagagacagggcagagaattcatctggaacgacctgctgtccctggaaaccggcagcctgaagctggccaacggaagagtgatcgagaagacactgtacaacagaagaacccggcaggatgagcctgccctgttcgtggccctgaccttcgagcggcgggaggtcctggactcctccaatatcaaaccaatgaacctgatcggcgtggcaagaggcgaaaacatccccgccgtgatcgccctgaccgaccccgagggctgcccactgagccggtttaaggatagcctgggaaacccaacccacatcctgagaatcggcgagagctataaggagaagcagcggaccatccaggccaagaaggaggtggagcagcggagagccggcggctacagccggaagtacgccagcaaagccaagaatctggcagacgatatggtgagaaacaccgctagagatctgctgtactacgccgtgacccaggatgccatgctgatcttcgccaacctgagccggggcttcggccggcagggcaagcggaccttcatggccgagagacagtacacacggatggaggactggctgaccgccaagctggcctacgagggcctgagcaagacctacctgtccaagacactggcccagtacacctccaagacatgcagcaactgtgggtttaccatcaccagcgccgactacgacagggtgctggagaagctgaagaagacagcaacaggctggatgaccacaattaacggcaaggagctgaaggtggagggccagattacctactacaacagatacaagagacagaacgtagtcaaggacctgtccgtcgagctggatagactgagcgaagaatctgtgaacaacgacatctcctcctggacaaagggcagaagcggagaagctctgagcctcctgaagaaaagattctcccatagacccgtgcaggagaagttcgtgtgcctgaactgcggcttcgagacacacgcagccgagcaagccgccctgaacatcgccagatcctggctgttcctgcggagccaggagtacaagaaataccagacaaacaagacaaccggcaacaccgataagagagccttcgtcgagacctggcagtccttttaccggaagaagcttaaggaggtgtggaaacctgccgtgcggtctggcggatctggcggaggctccacaagctgccaggagcccgtgagcttcgcccaggtggccgtgtacttcagcagggaggagtgggccctgctggaccccgcccagagggccctgtacagggacgtgatgctggagacctaccagtgcgtggccagcctggcccccctgcccgcccacaagcccatggtgatcagcctgctggagggcggcgaggacccctggatccccgacgtgaggagccccgaggccgtgcccggcgacctgagccccaccagccccaagaaaaagagaaaagtctaagctgccttctgcggggcttgccttctggccatgcccttcttctctcccttgcacctgtacctcttggtctttgaataaagcctgagtaggaaggctagcaaaaaaaaaaaaaaaaaaaaaaaaaaaaaaaaaaaaaaaaaaaaaaaaaaaaaaaaaaaaaaaaaaaaaaaaaaaaaaaa

SEQ ID NO: 6192 - RNA, 5797 nt, synthetic construct
  source 1..5797: mol_type = other RNA
aggaaataagagagaaaagaagagtaagaagaaatataagagccaccatggcccctaagaagaagcgtaaagtgagccggatggaacgcctcgtctacgaggtgcggcagaagtgcagaaacatcgaggacatctgcatctcctgcggatctctgaacgtgaccctggagcacccactgttcatcggcggcatgtgccagaactgtaaaaactgttttctggagtgtgcctatcaatacgacgatgacggctaccagagctactgcaccatctgttgcggcggaagagaggtgctgatgtgtggaaataacaactgctgccggtgcttctgcgtggaatgcgtggacctgctggtgggccccggcgccgcccaggccgctattaaggaagatccttggaactgctacatgtgcggccacaagggcacatacggcctgctgagacggagagaggactggcctagcagactgcagatgttcttcgccaataaccacgaccaggagttcgacccccctaaggtgtaccctcccgtccccgccgagaagagaaagcccatccgggtcctgagcctgttcgatggcatcgccaccggtctgctggtgctgaaggacctgggcatccaggtggataggtacattgcctccgaggtgtgcgaggactccatcaccgtgggaatggtgcgtcatcagggcaagatcatgtacgtgggcgacgtgcggagcgtgacacagaagcatatccaggagtggggccctttcgacctggtgatcggcggcagcccttgcaatgacctgagcatcgtgaacccagcccggaagggcctgtacgagggaaccggcagactgttcttcgagttttacagactgctgcacgacgcccggcctaaggaaggcgacgaccggcccttcttttggctgttcgagaatgtggtggccatgggagtcagcgacaagcgggatattagccggttcctggagagcaaccccgtgatgatcgatgccaaggaagtgagcgccgcccaccgggccagatacttctggggcaatctgcctggcatgaacagacccctggccagcaccgtgaacgacaagctggagctgcaggagtgcctggagcacggccggatcgccaagttcagcaaggtgagaaccatcaccacccgaagcaacagcatcaaacaaggcaaggaccagcactttcctgtgttcatgaacgagaaggaggacatcctgtggtgtaccgagatggagagagtgttcgggttcccagtccactacacagatgtcagcaacatgtctagactggccagacagagactgctgggaagaagctggtccgtccctgtgatcagacacctgttcgcccctctgaaggagtacttcgcctgcgtgagcagcggcaacagcaacgccaacagccggggccccagcttctctagcggcctggtgccactgtccctgagagggagccacatgggccccatggagatctacaaaaccgtgagcgcctggaagcggcagcctgtgcgcgtgctgagcctgtttcggaatatcgataaagtcctgaaaagcctgggattcctggagagcggctctggctccggcggtggcaccctgaagtacgtggaggatgtgacaaacgtggtcagacgggatgtggagaagtggggccccttcgatctggtgtacggcagcacccaacccctgggcagctcttgtgaccggtgccctggctggtacatgtttcagttccaccggatcctgcagtacgccctgccgagacaggagtcccagcggccattcttttggattttcatggacaacttgctgctgaccgaggatgaccaggaaactaccactcggttcctgcagaccgaagccgtgaccctgcaggacgtgagaggccgggactaccagaacgccatgcgggtgtggtccaacatccctggactgaaaagcaagcacgcacctctgacccctaaagaagaggagtacctgcaggcccaggtgcggagcagaagcaagctggacgcccctaaggtggatctgctggtgaagaattgcctcctgcccctgagagagtacttcaagtatttcagccagaatagtctgcccctgggcggcccaagcagcggcgcccctcctcccagcggcggcagcccagccggctccccaacctctaccgaggagggcacctctgagtccgccacccccgagagcggccctggcacctccaccgagcccagcgagggcagcgcacccggcagccctgccggcagccccacctccacagaggagggaaccagcaccgagcccagcgaaggcagcgccccaggcaccagcaccgagcctagtgagggcggctctggcggcggcagcgcccaggagattaaacggatcaacaagatcagaagaagacttgtgaaagacagcaacaccaagaaggccggcaagacaggccccatgaaaaccctgctggttagagtgatgacacccgatctgagagagcggctggaaaacctgagaaagaagcctgaaaatatcccccagcccatcagcaatacatctagagccaacctgaataagctgctgaccgattacaccgaaatgaagaaggcgatcctgcatgtgtactgggaagagttccagaaggaccctgtgggcctgatgagccgggtggcccagcctgccagcaagaagatcgatcagaacaagctgaaacctgagatggacgagaagggcaacctgaccaccgccggctttgcctgctctcagtgtggccagcccctgttcgtgtacaagctggagcaggtgtctgagaagggcaaggcttacaccaactacttcggacggtgcaatgtggccgagcacgaaaagctgatcctgctggcccagctgaagcccgagaaggatagcgacgaagccgtgacatatagcctgggaaagtttgggcagagggccctggatttctacagcattcatgtgaccaaggagtccacccaccccgtgaagcccctggcccagatcgccggaaacagatacgcctccggacctgtgggaaaggccctgagcgacgcatgtatgggcacaatcgcctccttcctgtctaagtaccaggacatcatcatcgaacaccagaaggtggtgaagggcaaccagaagagactggagagcctgcgggagctggccggcaaggaaaacctggaataccctagcgtgaccctgccacctcagcctcacaccaaggagggcgttgatgcctacaacgaagtgatcgcccgggtgcgaatgtgggtgaacctgaacctgtggcagaagctgaagctaagcagagatgatgccaagcctctgctgagactgaagggattcccttcctttcctctggtcgagagacaggccaacgaagtggactggtgggacatggtgtgtaacgtgaagaagctgatcaacgagaaaaaggaggatggcaaggtgttttggcagaatctggctggctacaagagacaggaagccctgagaccatacctgagcagcgaggaagatcggaagaagggaaagaaattcgctcggtaccagctgggcgacctgctgctgcacctggaaaagaagcacggcgaggactggggaaaggtgtacgacgaggcctgggagcggattgacaagaaagtggaaggcctgagcaagcacatcaagctggaagaggaacggagaagcgaggacgcccagagcaaggccgccctgaccgactggctgcgggctaaggccagcttcgtgatcgagggcctgaaggaggccgacaaggacgagttctgcagatgcgagctgaagctgcagaagtggtacggggacctgcggggaaagcccttcgccatcgaagccgagaacagcatcctggacatcagcggcttcagcaagcagtacaactgtgccttcatctggcagaaggacggcgtgaagaagctgaacctgtacctgatcatcaactacttcaagggcggcaagctgcggttcaagaagatcaaacctgaagccttcgaagccaacagattctacaccgtgatcaacaaaaagagcggcgagatcgtgcccatggaggtgaacttcaacttcgacgaccccaacctgatcatcctgcctctggcctttggcaagagacagggcagagaattcatctggaacgacctgctgtccctggaaaccggcagcctgaagctggccaacggaagagtgatcgagaagacactgtacaacagaagaacccggcaggatgagcctgccctgttcgtggccctgaccttcgagcggcgggaggtcctggactcctccaatatcaaaccaatgaacctgatcggcgtggcaagaggcgaaaacatccccgccgtgatcgccctgaccgaccccgagggctgcccactgagccggtttaaggatagcctgggaaacccaacccacatcctgagaatcggcgagagctataaggagaagcagcggaccatccaggccaagaaggaggtggagcagcggagagccggcggctacagccggaagtacgccagcaaagccaagaatctggcagacgatatggtgagaaacaccgctagagatctgctgtactacgccgtgacccaggatgccatgctgatcttcgccaacctgagccggggcttcggccggcagggcaagcggaccttcatggccgagagacagtacacacggatggaggactggctgaccgccaagctggcctacgagggcctgagcaagacctacctgtccaagacactggcccagtacacctccaagacatgcagcaactgtgggtttaccatcaccagcgccgactacgacagggtgctggagaagctgaagaagacagcaacaggctggatgaccacaattaacggcaaggagctgaaggtggagggccagattacctactacaacagatacaagagacagaacgtagtcaaggacctgtccgtcgagctggatagactgagcgaagaatctgtgaacaacgacatctcctcctggacaaagggcagaagcggagaagctctgagcctcctgaagaaaagattctcccatagacccgtgcaggagaagttcgtgtgcctgaactgcggcttcgagacacacgcagccgagcaagccgccctgaacatcgccagatcctggctgttcctgcggagccaggagtacaagaaataccagacaaacaagacaaccggcaacaccgataagagagccttcgtcgagacctggcagtccttttaccggaagaagcttaaggaggtgtggaaacctgccgtgcggtctggcggatctggcggaggctccacaagcagccagagcctggtggagttcggcgacgtggccatcgacttcagccaggaggagtgggagtggctgaaccccgcccagaggaccctgtacaggaaggtgatgctggagaactacaggaacctggccagcctgggcctgtgcggcagcaagcccgccgtgatcagcagcctggagcagggcaaggagccctgggccgtgaagaggaaggtggccaggggctggagccccgacctgaagaccgtgaccagccccaagaaaaagagaaaagtctaagctgccttctgcggggcttgccttctggccatgcccttcttctctcccttgcacctgtacctcttggtctttgaataaagcctgagtaggaaggctagcaaaaaaaaaaaaaaaaaaaaaaaaaaaaaaaaaaaaaaaaaaaaaaaaaaaaaaaaaaaaaaaaaaaaaaaaaaaaaaaa

SEQ ID NO: 6193 - RNA, 5797 nt, synthetic construct
  source 1..5797: mol_type = other RNA
aggaaataagagagaaaagaagagtaagaagaaatataagagccaccatggcccctaagaagaagcgtaaagtgagccggatggaacgcctcgtctacgaggtgcggcagaagtgcagaaacatcgaggacatctgcatctcctgcggatctctgaacgtgaccctggagcacccactgttcatcggcggcatgtgccagaactgtaaaaactgttttctggagtgtgcctatcaatacgacgatgacggctaccagagctactgcaccatctgttgcggcggaagagaggtgctgatgtgtggaaataacaactgctgccggtgcttctgcgtggaatgcgtggacctgctggtgggccccggcgccgcccaggccgctattaaggaagatccttggaactgctacatgtgcggccacaagggcacatacggcctgctgagacggagagaggactggcctagcagactgcagatgttcttcgccaataaccacgaccaggagttcgacccccctaaggtgtaccctcccgtccccgccgagaagagaaagcccatccgggtcctgagcctgttcgatggcatcgccaccggtctgctggtgctgaaggacctgggcatccaggtggataggtacattgcctccgaggtgtgcgaggactccatcaccgtgggaatggtgcgtcatcagggcaagatcatgtacgtgggcgacgtgcggagcgtgacacagaagcatatccaggagtggggccctttcgacctggtgatcggcggcagcccttgcaatgacctgagcatcgtgaacccagcccggaagggcctgtacgagggaaccggcagactgttcttcgagttttacagactgctgcacgacgcccggcctaaggaaggcgacgaccggcccttcttttggctgttcgagaatgtggtggccatgggagtcagcgacaagcgggatattagccggttcctggagagcaaccccgtgatgatcgatgccaaggaagtgagcgccgcccaccgggccagatacttctggggcaatctgcctggcatgaacagacccctggccagcaccgtgaacgacaagctggagctgcaggagtgcctggagcacggccggatcgccaagttcagcaaggtgagaaccatcaccacccgaagcaacagcatcaaacaaggcaaggaccagcactttcctgtgttcatgaacgagaaggaggacatcctgtggtgtaccgagatggagagagtgttcgggttcccagtccactacacagatgtcagcaacatgtctagactggccagacagagactgctgggaagaagctggtccgtccctgtgatcagacacctgttcgcccctctgaaggagtacttcgcctgcgtgagcagcggcaacagcaacgccaacagccggggccccagcttctctagcggcctggtgccactgtccctgagagggagccacatgggccccatggagatctacaaaaccgtgagcgcctggaagcggcagcctgtgcgcgtgctgagcctgtttcggaatatcgataaagtcctgaaaagcctgggattcctggagagcggctctggctccggcggtggcaccctgaagtacgtggaggatgtgacaaacgtggtcagacgggatgtggagaagtggggccccttcgatctggtgtacggcagcacccaacccctgggcagctcttgtgaccggtgccctggctggtacatgtttcagttccaccggatcctgcagtacgccctgccgagacaggagtcccagcggccattcttttggattttcatggacaacttgctgctgaccgaggatgaccaggaaactaccactcggttcctgcagaccgaagccgtgaccctgcaggacgtgagaggccgggactaccagaacgccatgcgggtgtggtccaacatccctggactgaaaagcaagcacgcacctctgacccctaaagaagaggagtacctgcaggcccaggtgcggagcagaagcaagctggacgcccctaaggtggatctgctggtgaagaattgcctcctgcccctgagagagtacttcaagtatttcagccagaatagtctgcccctgggcggcccaagcagcggcgcccctcctcccagcggcggcagcccagccggctccccaacctctaccgaggagggcacctctgagtccgccacccccgagagcggccctggcacctccaccgagcccagcgagggcagcgcacccggcagccctgccggcagccccacctccacagaggagggaaccagcaccgagcccagcgaaggcagcgccccaggcaccagcaccgagcctagtgagggcggctctggcggcggcagcgcccaggagattaaacggatcaacaagatcagaagaagacttgtgaaagacagcaacaccaagaaggccggcaagacaggccccatgaaaaccctgctggttagagtgatgacacccgatctgagagagcggctggaaaacctgagaaagaagcctgaaaatatcccccagcccatcagcaatacatctagagccaacctgaataagctgctgaccgattacaccgaaatgaagaaggcgatcctgcatgtgtactgggaagagttccagaaggaccctgtgggcctgatgagccgggtggcccagcctgccagcaagaagatcgatcagaacaagctgaaacctgagatggacgagaagggcaacctgaccaccgccggctttgcctgctctcagtgtggccagcccctgttcgtgtacaagctggagcaggtgtctgagaagggcaaggcttacaccaactacttcggacggtgcaatgtggccgagcacgaaaagctgatcctgctggcccagctgaagcccgagaaggatagcgacgaagccgtgacatatagcctgggaaagtttgggcagagggccctggatttctacagcattcatgtgaccaaggagtccacccaccccgtgaagcccctggcccagatcgccggaaacagatacgcctccggacctgtgggaaaggccctgagcgacgcatgtatgggcacaatcgcctccttcctgtctaagtaccaggacatcatcatcgaacaccagaaggtggtgaagggcaaccagaagagactggagagcctgcgggagctggccggcaaggaaaacctggaataccctagcgtgaccctgccacctcagcctcacaccaaggagggcgttgatgcctacaacgaagtgatcgcccgggtgcgaatgtgggtgaacctgaacctgtggcagaagctgaagctaagcagagatgatgccaagcctctgctgagactgaagggattcccttcctttcctctggtcgagagacaggccaacgaagtggactggtgggacatggtgtgtaacgtgaagaagctgatcaacgagaaaaaggaggatggcaaggtgttttggcagaatctggctggctacaagagacaggaagccctgagaccatacctgagcagcgaggaagatcggaagaagggaaagaaattcgctcggtaccagctgggcgacctgctgctgcacctggaaaagaagcacggcgaggactggggaaaggtgtacgacgaggcctgggagcggattgacaagaaagtggaaggcctgagcaagcacatcaagctggaagaggaacggagaagcgaggacgcccagagcaaggccgccctgaccgactggctgcgggctaaggccagcttcgtgatcgagggcctgaaggaggccgacaaggacgagttctgcagatgcgagctgaagctgcagaagtggtacggggacctgcggggaaagcccttcgccatcgaagccgagaacagcatcctggacatcagcggcttcagcaagcagtacaactgtgccttcatctggcagaaggacggcgtgaagaagctgaacctgtacctgatcatcaactacttcaagggcggcaagctgcggttcaagaagatcaaacctgaagccttcgaagccaacagattctacaccgtgatcaacaaaaagagcggcgagatcgtgcccatggaggtgaacttcaacttcgacgaccccaacctgatcatcctgcctctggcctttggcaagagacagggcagagaattcatctggaacgacctgctgtccctggaaaccggcagcctgaagctggccaacggaagagtgatcgagaagacactgtacaacagaagaacccggcaggatgagcctgccctgttcgtggccctgaccttcgagcggcgggaggtcctggactcctccaatatcaaaccaatgaacctgatcggcgtggcaagaggcgaaaacatccccgccgtgatcgccctgaccgaccccgagggctgcccactgagccggtttaaggatagcctgggaaacccaacccacatcctgagaatcggcgagagctataaggagaagcagcggaccatccaggccaagaaggaggtggagcagcggagagccggcggctacagccggaagtacgccagcaaagccaagaatctggcagacgatatggtgagaaacaccgctagagatctgctgtactacgccgtgacccaggatgccatgctgatcttcgccaacctgagccggggcttcggccggcagggcaagcggaccttcatggccgagagacagtacacacggatggaggactggctgaccgccaagctggcctacgagggcctgagcaagacctacctgtccaagacactggcccagtacacctccaagacatgcagcaactgtgggtttaccatcaccagcgccgactacgacagggtgctggagaagctgaagaagacagcaacaggctggatgaccacaattaacggcaaggagctgaaggtggagggccagattacctactacaacagatacaagagacagaacgtagtcaaggacctgtccgtcgagctggatagactgagcgaagaatctgtgaacaacgacatctcctcctggacaaagggcagaagcggagaagctctgagcctcctgaagaaaagattctcccatagacccgtgcaggagaagttcgtgtgcctgaactgcggcttcgagacacacgcagccgagcaagccgccctgaacatcgccagatcctggctgttcctgcggagccaggagtacaagaaataccagacaaacaagacaaccggcaacaccgataagagagccttcgtcgagacctggcagtccttttaccggaagaagcttaaggaggtgtggaaacctgccgtgcggtctggcggatctggcggaggctccacaagcctggcccccgaggaccacggcagcagctacgagggcagcgtgagcttcagggacgtggccatcgacttcagcagggaggagtggaggcacctggaccccagccagaggaacctgtacagggacgtgatgctggagacctacagccacctgctgagcgtgggctaccaggtgcccgaggccgaggtggtgatgctggagcagggcaaggagccctgggccctgcagggcgagaggcccaggcagaccagccccaagaaaaagagaaaagtctaagctgccttctgcggggcttgccttctggccatgcccttcttctctcccttgcacctgtacctcttggtctttgaataaagcctgagtaggaaggctagcaaaaaaaaaaaaaaaaaaaaaaaaaaaaaaaaaaaaaaaaaaaaaaaaaaaaaaaaaaaaaaaaaaaaaaaaaaaaaaaa

SEQ ID NO: 6194 - RNA, 5797 nt, synthetic construct
  source 1..5797: mol_type = other RNA
aggaaataagagagaaaagaagagtaagaagaaatataagagccaccatggcccctaagaagaagcgtaaagtgagccggatggaacgcctcgtctacgaggtgcggcagaagtgcagaaacatcgaggacatctgcatctcctgcggatctctgaacgtgaccctggagcacccactgttcatcggcggcatgtgccagaactgtaaaaactgttttctggagtgtgcctatcaatacgacgatgacggctaccagagctactgcaccatctgttgcggcggaagagaggtgctgatgtgtggaaataacaactgctgccggtgcttctgcgtggaatgcgtggacctgctggtgggccccggcgccgcccaggccgctattaaggaagatccttggaactgctacatgtgcggccacaagggcacatacggcctgctgagacggagagaggactggcctagcagactgcagatgttcttcgccaataaccacgaccaggagttcgacccccctaaggtgtaccctcccgtccccgccgagaagagaaagcccatccgggtcctgagcctgttcgatggcatcgccaccggtctgctggtgctgaaggacctgggcatccaggtggataggtacattgcctccgaggtgtgcgaggactccatcaccgtgggaatggtgcgtcatcagggcaagatcatgtacgtgggcgacgtgcggagcgtgacacagaagcatatccaggagtggggccctttcgacctggtgatcggcggcagcccttgcaatgacctgagcatcgtgaacccagcccggaagggcctgtacgagggaaccggcagactgttcttcgagttttacagactgctgcacgacgcccggcctaaggaaggcgacgaccggcccttcttttggctgttcgagaatgtggtggccatgggagtcagcgacaagcgggatattagccggttcctggagagcaaccccgtgatgatcgatgccaaggaagtgagcgccgcccaccgggccagatacttctggggcaatctgcctggcatgaacagacccctggccagcaccgtgaacgacaagctggagctgcaggagtgcctggagcacggccggatcgccaagttcagcaaggtgagaaccatcaccacccgaagcaacagcatcaaacaaggcaaggaccagcactttcctgtgttcatgaacgagaaggaggacatcctgtggtgtaccgagatggagagagtgttcgggttcccagtccactacacagatgtcagcaacatgtctagactggccagacagagactgctgggaagaagctggtccgtccctgtgatcagacacctgttcgcccctctgaaggagtacttcgcctgcgtgagcagcggcaacagcaacgccaacagccggggccccagcttctctagcggcctggtgccactgtccctgagagggagccacatgggccccatggagatctacaaaaccgtgagcgcctggaagcggcagcctgtgcgcgtgctgagcctgtttcggaatatcgataaagtcctgaaaagcctgggattcctggagagcggctctggctccggcggtggcaccctgaagtacgtggaggatgtgacaaacgtggtcagacgggatgtggagaagtggggccccttcgatctggtgtacggcagcacccaacccctgggcagctcttgtgaccggtgccctggctggtacatgtttcagttccaccggatcctgcagtacgccctgccgagacaggagtcccagcggccattcttttggattttcatggacaacttgctgctgaccgaggatgaccaggaaactaccactcggttcctgcagaccgaagccgtgaccctgcaggacgtgagaggccgggactaccagaacgccatgcgggtgtggtccaacatccctggactgaaaagcaagcacgcacctctgacccctaaagaagaggagtacctgcaggcccaggtgcggagcagaagcaagctggacgcccctaaggtggatctgctggtgaagaattgcctcctgcccctgagagagtacttcaagtatttcagccagaatagtctgcccctgggcggcccaagcagcggcgcccctcctcccagcggcggcagcccagccggctccccaacctctaccgaggagggcacctctgagtccgccacccccgagagcggccctggcacctccaccgagcccagcgagggcagcgcacccggcagccctgccggcagccccacctccacagaggagggaaccagcaccgagcccagcgaaggcagcgccccaggcaccagcaccgagcctagtgagggcggctctggcggcggcagcgcccaggagattaaacggatcaacaagatcagaagaagacttgtgaaagacagcaacaccaagaaggccggcaagacaggccccatgaaaaccctgctggttagagtgatgacacccgatctgagagagcggctggaaaacctgagaaagaagcctgaaaatatcccccagcccatcagcaatacatctagagccaacctgaataagctgctgaccgattacaccgaaatgaagaaggcgatcctgcatgtgtactgggaagagttccagaaggaccctgtgggcctgatgagccgggtggcccagcctgccagcaagaagatcgatcagaacaagctgaaacctgagatggacgagaagggcaacctgaccaccgccggctttgcctgctctcagtgtggccagcccctgttcgtgtacaagctggagcaggtgtctgagaagggcaaggcttacaccaactacttcggacggtgcaatgtggccgagcacgaaaagctgatcctgctggcccagctgaagcccgagaaggatagcgacgaagccgtgacatatagcctgggaaagtttgggcagagggccctggatttctacagcattcatgtgaccaaggagtccacccaccccgtgaagcccctggcccagatcgccggaaacagatacgcctccggacctgtgggaaaggccctgagcgacgcatgtatgggcacaatcgcctccttcctgtctaagtaccaggacatcatcatcgaacaccagaaggtggtgaagggcaaccagaagagactggagagcctgcgggagctggccggcaaggaaaacctggaataccctagcgtgaccctgccacctcagcctcacaccaaggagggcgttgatgcctacaacgaagtgatcgcccgggtgcgaatgtgggtgaacctgaacctgtggcagaagctgaagctaagcagagatgatgccaagcctctgctgagactgaagggattcccttcctttcctctggtcgagagacaggccaacgaagtggactggtgggacatggtgtgtaacgtgaagaagctgatcaacgagaaaaaggaggatggcaaggtgttttggcagaatctggctggctacaagagacaggaagccctgagaccatacctgagcagcgaggaagatcggaagaagggaaagaaattcgctcggtaccagctgggcgacctgctgctgcacctggaaaagaagcacggcgaggactggggaaaggtgtacgacgaggcctgggagcggattgacaagaaagtggaaggcctgagcaagcacatcaagctggaagaggaacggagaagcgaggacgcccagagcaaggccgccctgaccgactggctgcgggctaaggccagcttcgtgatcgagggcctgaaggaggccgacaaggacgagttctgcagatgcgagctgaagctgcagaagtggtacggggacctgcggggaaagcccttcgccatcgaagccgagaacagcatcctggacatcagcggcttcagcaagcagtacaactgtgccttcatctggcagaaggacggcgtgaagaagctgaacctgtacctgatcatcaactacttcaagggcggcaagctgcggttcaagaagatcaaacctgaagccttcgaagccaacagattctacaccgtgatcaacaaaaagagcggcgagatcgtgcccatggaggtgaacttcaacttcgacgaccccaacctgatcatcctgcctctggcctttggcaagagacagggcagagaattcatctggaacgacctgctgtccctggaaaccggcagcctgaagctggccaacggaagagtgatcgagaagacactgtacaacagaagaacccggcaggatgagcctgccctgttcgtggccctgaccttcgagcggcgggaggtcctggactcctccaatatcaaaccaatgaacctgatcggcgtggcaagaggcgaaaacatccccgccgtgatcgccctgaccgaccccgagggctgcccactgagccggtttaaggatagcctgggaaacccaacccacatcctgagaatcggcgagagctataaggagaagcagcggaccatccaggccaagaaggaggtggagcagcggagagccggcggctacagccggaagtacgccagcaaagccaagaatctggcagacgatatggtgagaaacaccgctagagatctgctgtactacgccgtgacccaggatgccatgctgatcttcgccaacctgagccggggcttcggccggcagggcaagcggaccttcatggccgagagacagtacacacggatggaggactggctgaccgccaagctggcctacgagggcctgagcaagacctacctgtccaagacactggcccagtacacctccaagacatgcagcaactgtgggtttaccatcaccagcgccgactacgacagggtgctggagaagctgaagaagacagcaacaggctggatgaccacaattaacggcaaggagctgaaggtggagggccagattacctactacaacagatacaagagacagaacgtagtcaaggacctgtccgtcgagctggatagactgagcgaagaatctgtgaacaacgacatctcctcctggacaaagggcagaagcggagaagctctgagcctcctgaagaaaagattctcccatagacccgtgcaggagaagttcgtgtgcctgaactgcggcttcgagacacacgcagccgagcaagccgccctgaacatcgccagatcctggctgttcctgcggagccaggagtacaagaaataccagacaaacaagacaaccggcaacaccgataagagagccttcgtcgagacctggcagtccttttaccggaagaagcttaaggaggtgtggaaacctgccgtgcggtctggcggatctggcggaggctccacaagcatggagggcctggtgatgttccaggacctgttcatcgacttcagccaggaggagtgggagtgcctggacgccgcccagaaggacctgtacagggacgtgatgatggagaactacagcagcctggtgagcctgggcctgtgcatccccaagcccgacgtgatcagcctgctggagcagggcaaggagccctggatggtgagcagggacgtgctgggcggctggtgccccgacaggctgaagaagaccagccccaagaaaaagagaaaagtctaagctgccttctgcggggcttgccttctggccatgcccttcttctctcccttgcacctgtacctcttggtctttgaataaagcctgagtaggaaggctagcaaaaaaaaaaaaaaaaaaaaaaaaaaaaaaaaaaaaaaaaaaaaaaaaaaaaaaaaaaaaaaaaaaaaaaaaaaaaaaaa

SEQ ID NO: 6195 - RNA, 5797 nt, synthetic construct
  source 1..5797: mol_type = other RNA
aggaaataagagagaaaagaagagtaagaagaaatataagagccaccatggcccctaagaagaagcgtaaagtgagccggatggaacgcctcgtctacgaggtgcggcagaagtgcagaaacatcgaggacatctgcatctcctgcggatctctgaacgtgaccctggagcacccactgttcatcggcggcatgtgccagaactgtaaaaactgttttctggagtgtgcctatcaatacgacgatgacggctaccagagctactgcaccatctgttgcggcggaagagaggtgctgatgtgtggaaataacaactgctgccggtgcttctgcgtggaatgcgtggacctgctggtgggccccggcgccgcccaggccgctattaaggaagatccttggaactgctacatgtgcggccacaagggcacatacggcctgctgagacggagagaggactggcctagcagactgcagatgttcttcgccaataaccacgaccaggagttcgacccccctaaggtgtaccctcccgtccccgccgagaagagaaagcccatccgggtcctgagcctgttcgatggcatcgccaccggtctgctggtgctgaaggacctgggcatccaggtggataggtacattgcctccgaggtgtgcgaggactccatcaccgtgggaatggtgcgtcatcagggcaagatcatgtacgtgggcgacgtgcggagcgtgacacagaagcatatccaggagtggggccctttcgacctggtgatcggcggcagcccttgcaatgacctgagcatcgtgaacccagcccggaagggcctgtacgagggaaccggcagactgttcttcgagttttacagactgctgcacgacgcccggcctaaggaaggcgacgaccggcccttcttttggctgttcgagaatgtggtggccatgggagtcagcgacaagcgggatattagccggttcctggagagcaaccccgtgatgatcgatgccaaggaagtgagcgccgcccaccgggccagatacttctggggcaatctgcctggcatgaacagacccctggccagcaccgtgaacgacaagctggagctgcaggagtgcctggagcacggccggatcgccaagttcagcaaggtgagaaccatcaccacccgaagcaacagcatcaaacaaggcaaggaccagcactttcctgtgttcatgaacgagaaggaggacatcctgtggtgtaccgagatggagagagtgttcgggttcccagtccactacacagatgtcagcaacatgtctagactggccagacagagactgctgggaagaagctggtccgtccctgtgatcagacacctgttcgcccctctgaaggagtacttcgcctgcgtgagcagcggcaacagcaacgccaacagccggggccccagcttctctagcggcctggtgccactgtccctgagagggagccacatgggccccatggagatctacaaaaccgtgagcgcctggaagcggcagcctgtgcgcgtgctgagcctgtttcggaatatcgataaagtcctgaaaagcctgggattcctggagagcggctctggctccggcggtggcaccctgaagtacgtggaggatgtgacaaacgtggtcagacgggatgtggagaagtggggccccttcgatctggtgtacggcagcacccaacccctgggcagctcttgtgaccggtgccctggctggtacatgtttcagttccaccggatcctgcagtacgccctgccgagacaggagtcccagcggccattcttttggattttcatggacaacttgctgctgaccgaggatgaccaggaaactaccactcggttcctgcagaccgaagccgtgaccctgcaggacgtgagaggccgggactaccagaacgccatgcgggtgtggtccaacatccctggactgaaaagcaagcacgcacctctgacccctaaagaagaggagtacctgcaggcccaggtgcggagcagaagcaagctggacgcccctaaggtggatctgctggtgaagaattgcctcctgcccctgagagagtacttcaagtatttcagccagaatagtctgcccctgggcggcccaagcagcggcgcccctcctcccagcggcggcagcccagccggctccccaacctctaccgaggagggcacctctgagtccgccacccccgagagcggccctggcacctccaccgagcccagcgagggcagcgcacccggcagccctgccggcagccccacctccacagaggagggaaccagcaccgagcccagcgaaggcagcgccccaggcaccagcaccgagcctagtgagggcggctctggcggcggcagcgcccaggagattaaacggatcaacaagatcagaagaagacttgtgaaagacagcaacaccaagaaggccggcaagacaggccccatgaaaaccctgctggttagagtgatgacacccgatctgagagagcggctggaaaacctgagaaagaagcctgaaaatatcccccagcccatcagcaatacatctagagccaacctgaataagctgctgaccgattacaccgaaatgaagaaggcgatcctgcatgtgtactgggaagagttccagaaggaccctgtgggcctgatgagccgggtggcccagcctgccagcaagaagatcgatcagaacaagctgaaacctgagatggacgagaagggcaacctgaccaccgccggctttgcctgctctcagtgtggccagcccctgttcgtgtacaagctggagcaggtgtctgagaagggcaaggcttacaccaactacttcggacggtgcaatgtggccgagcacgaaaagctgatcctgctggcccagctgaagcccgagaaggatagcgacgaagccgtgacatatagcctgggaaagtttgggcagagggccctggatttctacagcattcatgtgaccaaggagtccacccaccccgtgaagcccctggcccagatcgccggaaacagatacgcctccggacctgtgggaaaggccctgagcgacgcatgtatgggcacaatcgcctccttcctgtctaagtaccaggacatcatcatcgaacaccagaaggtggtgaagggcaaccagaagagactggagagcctgcgggagctggccggcaaggaaaacctggaataccctagcgtgaccctgccacctcagcctcacaccaaggagggcgttgatgcctacaacgaagtgatcgcccgggtgcgaatgtgggtgaacctgaacctgtggcagaagctgaagctaagcagagatgatgccaagcctctgctgagactgaagggattcccttcctttcctctggtcgagagacaggccaacgaagtggactggtgggacatggtgtgtaacgtgaagaagctgatcaacgagaaaaaggaggatggcaaggtgttttggcagaatctggctggctacaagagacaggaagccctgagaccatacctgagcagcgaggaagatcggaagaagggaaagaaattcgctcggtaccagctgggcgacctgctgctgcacctggaaaagaagcacggcgaggactggggaaaggtgtacgacgaggcctgggagcggattgacaagaaagtggaaggcctgagcaagcacatcaagctggaagaggaacggagaagcgaggacgcccagagcaaggccgccctgaccgactggctgcgggctaaggccagcttcgtgatcgagggcctgaaggaggccgacaaggacgagttctgcagatgcgagctgaagctgcagaagtggtacggggacctgcggggaaagcccttcgccatcgaagccgagaacagcatcctggacatcagcggcttcagcaagcagtacaactgtgccttcatctggcagaaggacggcgtgaagaagctgaacctgtacctgatcatcaactacttcaagggcggcaagctgcggttcaagaagatcaaacctgaagccttcgaagccaacagattctacaccgtgatcaacaaaaagagcggcgagatcgtgcccatggaggtgaacttcaacttcgacgaccccaacctgatcatcctgcctctggcctttggcaagagacagggcagagaattcatctggaacgacctgctgtccctggaaaccggcagcctgaagctggccaacggaagagtgatcgagaagacactgtacaacagaagaacccggcaggatgagcctgccctgttcgtggccctgaccttcgagcggcgggaggtcctggactcctccaatatcaaaccaatgaacctgatcggcgtggcaagaggcgaaaacatccccgccgtgatcgccctgaccgaccccgagggctgcccactgagccggtttaaggatagcctgggaaacccaacccacatcctgagaatcggcgagagctataaggagaagcagcggaccatccaggccaagaaggaggtggagcagcggagagccggcggctacagccggaagtacgccagcaaagccaagaatctggcagacgatatggtgagaaacaccgctagagatctgctgtactacgccgtgacccaggatgccatgctgatcttcgccaacctgagccggggcttcggccggcagggcaagcggaccttcatggccgagagacagtacacacggatggaggactggctgaccgccaagctggcctacgagggcctgagcaagacctacctgtccaagacactggcccagtacacctccaagacatgcagcaactgtgggtttaccatcaccagcgccgactacgacagggtgctggagaagctgaagaagacagcaacaggctggatgaccacaattaacggcaaggagctgaaggtggagggccagattacctactacaacagatacaagagacagaacgtagtcaaggacctgtccgtcgagctggatagactgagcgaagaatctgtgaacaacgacatctcctcctggacaaagggcagaagcggagaagctctgagcctcctgaagaaaagattctcccatagacccgtgcaggagaagttcgtgtgcctgaactgcggcttcgagacacacgcagccgagcaagccgccctgaacatcgccagatcctggctgttcctgcggagccaggagtacaagaaataccagacaaacaagacaaccggcaacaccgataagagagccttcgtcgagacctggcagtccttttaccggaagaagcttaaggaggtgtggaaacctgccgtgcggtctggcggatctggcggaggctccacaagcccccaggccagcgtgagcttcaaggacgtgaccgtggagttcacccaggaggagtggtggcagatggacagcgcccagaggaccctgtacagggacgtgatgctggagaactacagccacctggtgagcgtgggctactgcttcaccaagcccgagctgatcttcatgctggagcagggcgaggacccctggctgctggagaaggagttcgtgaacaggagcagccccgaggagagccagcccaccagccccaagaaaaagagaaaagtctaagctgccttctgcggggcttgccttctggccatgcccttcttctctcccttgcacctgtacctcttggtctttgaataaagcctgagtaggaaggctagcaaaaaaaaaaaaaaaaaaaaaaaaaaaaaaaaaaaaaaaaaaaaaaaaaaaaaaaaaaaaaaaaaaaaaaaaaaaaaaaa

SEQ ID NO: 6196 - RNA, 5797 nt, synthetic construct
  source 1..5797: mol_type = other RNA
aggaaataagagagaaaagaagagtaagaagaaatataagagccaccatggcccctaagaagaagcgtaaagtgagccggatggaacgcctcgtctacgaggtgcggcagaagtgcagaaacatcgaggacatctgcatctcctgcggatctctgaacgtgaccctggagcacccactgttcatcggcggcatgtgccagaactgtaaaaactgttttctggagtgtgcctatcaatacgacgatgacggctaccagagctactgcaccatctgttgcggcggaagagaggtgctgatgtgtggaaataacaactgctgccggtgcttctgcgtggaatgcgtggacctgctggtgggccccggcgccgcccaggccgctattaaggaagatccttggaactgctacatgtgcggccacaagggcacatacggcctgctgagacggagagaggactggcctagcagactgcagatgttcttcgccaataaccacgaccaggagttcgacccccctaaggtgtaccctcccgtccccgccgagaagagaaagcccatccgggtcctgagcctgttcgatggcatcgccaccggtctgctggtgctgaaggacctgggcatccaggtggataggtacattgcctccgaggtgtgcgaggactccatcaccgtgggaatggtgcgtcatcagggcaagatcatgtacgtgggcgacgtgcggagcgtgacacagaagcatatccaggagtggggccctttcgacctggtgatcggcggcagcccttgcaatgacctgagcatcgtgaacccagcccggaagggcctgtacgagggaaccggcagactgttcttcgagttttacagactgctgcacgacgcccggcctaaggaaggcgacgaccggcccttcttttggctgttcgagaatgtggtggccatgggagtcagcgacaagcgggatattagccggttcctggagagcaaccccgtgatgatcgatgccaaggaagtgagcgccgcccaccgggccagatacttctggggcaatctgcctggcatgaacagacccctggccagcaccgtgaacgacaagctggagctgcaggagtgcctggagcacggccggatcgccaagttcagcaaggtgagaaccatcaccacccgaagcaacagcatcaaacaaggcaaggaccagcactttcctgtgttcatgaacgagaaggaggacatcctgtggtgtaccgagatggagagagtgttcgggttcccagtccactacacagatgtcagcaacatgtctagactggccagacagagactgctgggaagaagctggtccgtccctgtgatcagacacctgttcgcccctctgaaggagtacttcgcctgcgtgagcagcggcaacagcaacgccaacagccggggccccagcttctctagcggcctggtgccactgtccctgagagggagccacatgggccccatggagatctacaaaaccgtgagcgcctggaagcggcagcctgtgcgcgtgctgagcctgtttcggaatatcgataaagtcctgaaaagcctgggattcctggagagcggctctggctccggcggtggcaccctgaagtacgtggaggatgtgacaaacgtggtcagacgggatgtggagaagtggggccccttcgatctggtgtacggcagcacccaacccctgggcagctcttgtgaccggtgccctggctggtacatgtttcagttccaccggatcctgcagtacgccctgccgagacaggagtcccagcggccattcttttggattttcatggacaacttgctgctgaccgaggatgaccaggaaactaccactcggttcctgcagaccgaagccgtgaccctgcaggacgtgagaggccgggactaccagaacgccatgcgggtgtggtccaacatccctggactgaaaagcaagcacgcacctctgacccctaaagaagaggagtacctgcaggcccaggtgcggagcagaagcaagctggacgcccctaaggtggatctgctggtgaagaattgcctcctgcccctgagagagtacttcaagtatttcagccagaatagtctgcccctgggcggcccaagcagcggcgcccctcctcccagcggcggcagcccagccggctccccaacctctaccgaggagggcacctctgagtccgccacccccgagagcggccctggcacctccaccgagcccagcgagggcagcgcacccggcagccctgccggcagccccacctccacagaggagggaaccagcaccgagcccagcgaaggcagcgccccaggcaccagcaccgagcctagtgagggcggctctggcggcggcagcgcccaggagattaaacggatcaacaagatcagaagaagacttgtgaaagacagcaacaccaagaaggccggcaagacaggccccatgaaaaccctgctggttagagtgatgacacccgatctgagagagcggctggaaaacctgagaaagaagcctgaaaatatcccccagcccatcagcaatacatctagagccaacctgaataagctgctgaccgattacaccgaaatgaagaaggcgatcctgcatgtgtactgggaagagttccagaaggaccctgtgggcctgatgagccgggtggcccagcctgccagcaagaagatcgatcagaacaagctgaaacctgagatggacgagaagggcaacctgaccaccgccggctttgcctgctctcagtgtggccagcccctgttcgtgtacaagctggagcaggtgtctgagaagggcaaggcttacaccaactacttcggacggtgcaatgtggccgagcacgaaaagctgatcctgctggcccagctgaagcccgagaaggatagcgacgaagccgtgacatatagcctgggaaagtttgggcagagggccctggatttctacagcattcatgtgaccaaggagtccacccaccccgtgaagcccctggcccagatcgccggaaacagatacgcctccggacctgtgggaaaggccctgagcgacgcatgtatgggcacaatcgcctccttcctgtctaagtaccaggacatcatcatcgaacaccagaaggtggtgaagggcaaccagaagagactggagagcctgcgggagctggccggcaaggaaaacctggaataccctagcgtgaccctgccacctcagcctcacaccaaggagggcgttgatgcctacaacgaagtgatcgcccgggtgcgaatgtgggtgaacctgaacctgtggcagaagctgaagctaagcagagatgatgccaagcctctgctgagactgaagggattcccttcctttcctctggtcgagagacaggccaacgaagtggactggtgggacatggtgtgtaacgtgaagaagctgatcaacgagaaaaaggaggatggcaaggtgttttggcagaatctggctggctacaagagacaggaagccctgagaccatacctgagcagcgaggaagatcggaagaagggaaagaaattcgctcggtaccagctgggcgacctgctgctgcacctggaaaagaagcacggcgaggactggggaaaggtgtacgacgaggcctgggagcggattgacaagaaagtggaaggcctgagcaagcacatcaagctggaagaggaacggagaagcgaggacgcccagagcaaggccgccctgaccgactggctgcgggctaaggccagcttcgtgatcgagggcctgaaggaggccgacaaggacgagttctgcagatgcgagctgaagctgcagaagtggtacggggacctgcggggaaagcccttcgccatcgaagccgagaacagcatcctggacatcagcggcttcagcaagcagtacaactgtgccttcatctggcagaaggacggcgtgaagaagctgaacctgtacctgatcatcaactacttcaagggcggcaagctgcggttcaagaagatcaaacctgaagccttcgaagccaacagattctacaccgtgatcaacaaaaagagcggcgagatcgtgcccatggaggtgaacttcaacttcgacgaccccaacctgatcatcctgcctctggcctttggcaagagacagggcagagaattcatctggaacgacctgctgtccctggaaaccggcagcctgaagctggccaacggaagagtgatcgagaagacactgtacaacagaagaacccggcaggatgagcctgccctgttcgtggccctgaccttcgagcggcgggaggtcctggactcctccaatatcaaaccaatgaacctgatcggcgtggcaagaggcgaaaacatccccgccgtgatcgccctgaccgaccccgagggctgcccactgagccggtttaaggatagcctgggaaacccaacccacatcctgagaatcggcgagagctataaggagaagcagcggaccatccaggccaagaaggaggtggagcagcggagagccggcggctacagccggaagtacgccagcaaagccaagaatctggcagacgatatggtgagaaacaccgctagagatctgctgtactacgccgtgacccaggatgccatgctgatcttcgccaacctgagccggggcttcggccggcagggcaagcggaccttcatggccgagagacagtacacacggatggaggactggctgaccgccaagctggcctacgagggcctgagcaagacctacctgtccaagacactggcccagtacacctccaagacatgcagcaactgtgggtttaccatcaccagcgccgactacgacagggtgctggagaagctgaagaagacagcaacaggctggatgaccacaattaacggcaaggagctgaaggtggagggccagattacctactacaacagatacaagagacagaacgtagtcaaggacctgtccgtcgagctggatagactgagcgaagaatctgtgaacaacgacatctcctcctggacaaagggcagaagcggagaagctctgagcctcctgaagaaaagattctcccatagacccgtgcaggagaagttcgtgtgcctgaactgcggcttcgagacacacgcagccgagcaagccgccctgaacatcgccagatcctggctgttcctgcggagccaggagtacaagaaataccagacaaacaagacaaccggcaacaccgataagagagccttcgtcgagacctggcagtccttttaccggaagaagcttaaggaggtgtggaaacctgccgtgcggtctggcggatctggcggaggctccacaagcttccaggagctggtgaccttcagggacgtggccatcgacttcagcaggcaggagtgggagtacctggacagcgtgcagagggacctgtacagggacgtgatgctggagaactacaggaacctggtgagcctgggccacagcatcagcaagcccgacgtggtggacctgctggagcagggcaaggagccctggatgatcctgagggaggagacccagaggcagtacaccgacctggacctgcacaccagccccaagaaaaagagaaaagtctaagctgccttctgcggggcttgccttctggccatgcccttcttctctcccttgcacctgtacctcttggtctttgaataaagcctgagtaggaaggctagcaaaaaaaaaaaaaaaaaaaaaaaaaaaaaaaaaaaaaaaaaaaaaaaaaaaaaaaaaaaaaaaaaaaaaaaaaaaaaaaa

SEQ ID NO: 6197 - RNA, 5797 nt, synthetic construct
  source 1..5797: mol_type = other RNA
aggaaataagagagaaaagaagagtaagaagaaatataagagccaccatggcccctaagaagaagcgtaaagtgagccggatggaacgcctcgtctacgaggtgcggcagaagtgcagaaacatcgaggacatctgcatctcctgcggatctctgaacgtgaccctggagcacccactgttcatcggcggcatgtgccagaactgtaaaaactgttttctggagtgtgcctatcaatacgacgatgacggctaccagagctactgcaccatctgttgcggcggaagagaggtgctgatgtgtggaaataacaactgctgccggtgcttctgcgtggaatgcgtggacctgctggtgggccccggcgccgcccaggccgctattaaggaagatccttggaactgctacatgtgcggccacaagggcacatacggcctgctgagacggagagaggactggcctagcagactgcagatgttcttcgccaataaccacgaccaggagttcgacccccctaaggtgtaccctcccgtccccgccgagaagagaaagcccatccgggtcctgagcctgttcgatggcatcgccaccggtctgctggtgctgaaggacctgggcatccaggtggataggtacattgcctccgaggtgtgcgaggactccatcaccgtgggaatggtgcgtcatcagggcaagatcatgtacgtgggcgacgtgcggagcgtgacacagaagcatatccaggagtggggccctttcgacctggtgatcggcggcagcccttgcaatgacctgagcatcgtgaacccagcccggaagggcctgtacgagggaaccggcagactgttcttcgagttttacagactgctgcacgacgcccggcctaaggaaggcgacgaccggcccttcttttggctgttcgagaatgtggtggccatgggagtcagcgacaagcgggatattagccggttcctggagagcaaccccgtgatgatcgatgccaaggaagtgagcgccgcccaccgggccagatacttctggggcaatctgcctggcatgaacagacccctggccagcaccgtgaacgacaagctggagctgcaggagtgcctggagcacggccggatcgccaagttcagcaaggtgagaaccatcaccacccgaagcaacagcatcaaacaaggcaaggaccagcactttcctgtgttcatgaacgagaaggaggacatcctgtggtgtaccgagatggagagagtgttcgggttcccagtccactacacagatgtcagcaacatgtctagactggccagacagagactgctgggaagaagctggtccgtccctgtgatcagacacctgttcgcccctctgaaggagtacttcgcctgcgtgagcagcggcaacagcaacgccaacagccggggccccagcttctctagcggcctggtgccactgtccctgagagggagccacatgggccccatggagatctacaaaaccgtgagcgcctggaagcggcagcctgtgcgcgtgctgagcctgtttcggaatatcgataaagtcctgaaaagcctgggattcctggagagcggctctggctccggcggtggcaccctgaagtacgtggaggatgtgacaaacgtggtcagacgggatgtggagaagtggggccccttcgatctggtgtacggcagcacccaacccctgggcagctcttgtgaccggtgccctggctggtacatgtttcagttccaccggatcctgcagtacgccctgccgagacaggagtcccagcggccattcttttggattttcatggacaacttgctgctgaccgaggatgaccaggaaactaccactcggttcctgcagaccgaagccgtgaccctgcaggacgtgagaggccgggactaccagaacgccatgcgggtgtggtccaacatccctggactgaaaagcaagcacgcacctctgacccctaaagaagaggagtacctgcaggcccaggtgcggagcagaagcaagctggacgcccctaaggtggatctgctggtgaagaattgcctcctgcccctgagagagtacttcaagtatttcagccagaatagtctgcccctgggcggcccaagcagcggcgcccctcctcccagcggcggcagcccagccggctccccaacctctaccgaggagggcacctctgagtccgccacccccgagagcggccctggcacctccaccgagcccagcgagggcagcgcacccggcagccctgccggcagccccacctccacagaggagggaaccagcaccgagcccagcgaaggcagcgccccaggcaccagcaccgagcctagtgagggcggctctggcggcggcagcgcccaggagattaaacggatcaacaagatcagaagaagacttgtgaaagacagcaacaccaagaaggccggcaagacaggccccatgaaaaccctgctggttagagtgatgacacccgatctgagagagcggctggaaaacctgagaaagaagcctgaaaatatcccccagcccatcagcaatacatctagagccaacctgaataagctgctgaccgattacaccgaaatgaagaaggcgatcctgcatgtgtactgggaagagttccagaaggaccctgtgggcctgatgagccgggtggcccagcctgccagcaagaagatcgatcagaacaagctgaaacctgagatggacgagaagggcaacctgaccaccgccggctttgcctgctctcagtgtggccagcccctgttcgtgtacaagctggagcaggtgtctgagaagggcaaggcttacaccaactacttcggacggtgcaatgtggccgagcacgaaaagctgatcctgctggcccagctgaagcccgagaaggatagcgacgaagccgtgacatatagcctgggaaagtttgggcagagggccctggatttctacagcattcatgtgaccaaggagtccacccaccccgtgaagcccctggcccagatcgccggaaacagatacgcctccggacctgtgggaaaggccctgagcgacgcatgtatgggcacaatcgcctccttcctgtctaagtaccaggacatcatcatcgaacaccagaaggtggtgaagggcaaccagaagagactggagagcctgcgggagctggccggcaaggaaaacctggaataccctagcgtgaccctgccacctcagcctcacaccaaggagggcgttgatgcctacaacgaagtgatcgcccgggtgcgaatgtgggtgaacctgaacctgtggcagaagctgaagctaagcagagatgatgccaagcctctgctgagactgaagggattcccttcctttcctctggtcgagagacaggccaacgaagtggactggtgggacatggtgtgtaacgtgaagaagctgatcaacgagaaaaaggaggatggcaaggtgttttggcagaatctggctggctacaagagacaggaagccctgagaccatacctgagcagcgaggaagatcggaagaagggaaagaaattcgctcggtaccagctgggcgacctgctgctgcacctggaaaagaagcacggcgaggactggggaaaggtgtacgacgaggcctgggagcggattgacaagaaagtggaaggcctgagcaagcacatcaagctggaagaggaacggagaagcgaggacgcccagagcaaggccgccctgaccgactggctgcgggctaaggccagcttcgtgatcgagggcctgaaggaggccgacaaggacgagttctgcagatgcgagctgaagctgcagaagtggtacggggacctgcggggaaagcccttcgccatcgaagccgagaacagcatcctggacatcagcggcttcagcaagcagtacaactgtgccttcatctggcagaaggacggcgtgaagaagctgaacctgtacctgatcatcaactacttcaagggcggcaagctgcggttcaagaagatcaaacctgaagccttcgaagccaacagattctacaccgtgatcaacaaaaagagcggcgagatcgtgcccatggaggtgaacttcaacttcgacgaccccaacctgatcatcctgcctctggcctttggcaagagacagggcagagaattcatctggaacgacctgctgtccctggaaaccggcagcctgaagctggccaacggaagagtgatcgagaagacactgtacaacagaagaacccggcaggatgagcctgccctgttcgtggccctgaccttcgagcggcgggaggtcctggactcctccaatatcaaaccaatgaacctgatcggcgtggcaagaggcgaaaacatccccgccgtgatcgccctgaccgaccccgagggctgcccactgagccggtttaaggatagcctgggaaacccaacccacatcctgagaatcggcgagagctataaggagaagcagcggaccatccaggccaagaaggaggtggagcagcggagagccggcggctacagccggaagtacgccagcaaagccaagaatctggcagacgatatggtgagaaacaccgctagagatctgctgtactacgccgtgacccaggatgccatgctgatcttcgccaacctgagccggggcttcggccggcagggcaagcggaccttcatggccgagagacagtacacacggatggaggactggctgaccgccaagctggcctacgagggcctgagcaagacctacctgtccaagacactggcccagtacacctccaagacatgcagcaactgtgggtttaccatcaccagcgccgactacgacagggtgctggagaagctgaagaagacagcaacaggctggatgaccacaattaacggcaaggagctgaaggtggagggccagattacctactacaacagatacaagagacagaacgtagtcaaggacctgtccgtcgagctggatagactgagcgaagaatctgtgaacaacgacatctcctcctggacaaagggcagaagcggagaagctctgagcctcctgaagaaaagattctcccatagacccgtgcaggagaagttcgtgtgcctgaactgcggcttcgagacacacgcagccgagcaagccgccctgaacatcgccagatcctggctgttcctgcggagccaggagtacaagaaataccagacaaacaagacaaccggcaacaccgataagagagccttcgtcgagacctggcagtccttttaccggaagaagcttaaggaggtgtggaaacctgccgtgcggtctggcggatctggcggaggctccacaagcacccagaggagcatcagcttcaaggacctggccgtggacttcaccagggaggagtggcagaggctgggccccgcccagaggctgctgtacagggacgtgatgctggagaactacagcaacctgatcgccgtgggcctgcacgtgagcaagcccgacgtgatcctgaagctggagcagggcaaggagccctgggtggtggagaacagcagcaggcagaaccacgccgaggacgacgagcccctgaccagccccaagaaaaagagaaaagtctaagctgccttctgcggggcttgccttctggccatgcccttcttctctcccttgcacctgtacctcttggtctttgaataaagcctgagtaggaaggctagcaaaaaaaaaaaaaaaaaaaaaaaaaaaaaaaaaaaaaaaaaaaaaaaaaaaaaaaaaaaaaaaaaaaaaaaaaaaaaaaa

SEQ ID NO: 6198 - RNA, 5797 nt, synthetic construct
  source 1..5797: mol_type = other RNA
aggaaataagagagaaaagaagagtaagaagaaatataagagccaccatggcccctaagaagaagcgtaaagtgagccggatggaacgcctcgtctacgaggtgcggcagaagtgcagaaacatcgaggacatctgcatctcctgcggatctctgaacgtgaccctggagcacccactgttcatcggcggcatgtgccagaactgtaaaaactgttttctggagtgtgcctatcaatacgacgatgacggctaccagagctactgcaccatctgttgcggcggaagagaggtgctgatgtgtggaaataacaactgctgccggtgcttctgcgtggaatgcgtggacctgctggtgggccccggcgccgcccaggccgctattaaggaagatccttggaactgctacatgtgcggccacaagggcacatacggcctgctgagacggagagaggactggcctagcagactgcagatgttcttcgccaataaccacgaccaggagttcgacccccctaaggtgtaccctcccgtccccgccgagaagagaaagcccatccgggtcctgagcctgttcgatggcatcgccaccggtctgctggtgctgaaggacctgggcatccaggtggataggtacattgcctccgaggtgtgcgaggactccatcaccgtgggaatggtgcgtcatcagggcaagatcatgtacgtgggcgacgtgcggagcgtgacacagaagcatatccaggagtggggccctttcgacctggtgatcggcggcagcccttgcaatgacctgagcatcgtgaacccagcccggaagggcctgtacgagggaaccggcagactgttcttcgagttttacagactgctgcacgacgcccggcctaaggaaggcgacgaccggcccttcttttggctgttcgagaatgtggtggccatgggagtcagcgacaagcgggatattagccggttcctggagagcaaccccgtgatgatcgatgccaaggaagtgagcgccgcccaccgggccagatacttctggggcaatctgcctggcatgaacagacccctggccagcaccgtgaacgacaagctggagctgcaggagtgcctggagcacggccggatcgccaagttcagcaaggtgagaaccatcaccacccgaagcaacagcatcaaacaaggcaaggaccagcactttcctgtgttcatgaacgagaaggaggacatcctgtggtgtaccgagatggagagagtgttcgggttcccagtccactacacagatgtcagcaacatgtctagactggccagacagagactgctgggaagaagctggtccgtccctgtgatcagacacctgttcgcccctctgaaggagtacttcgcctgcgtgagcagcggcaacagcaacgccaacagccggggccccagcttctctagcggcctggtgccactgtccctgagagggagccacatgggccccatggagatctacaaaaccgtgagcgcctggaagcggcagcctgtgcgcgtgctgagcctgtttcggaatatcgataaagtcctgaaaagcctgggattcctggagagcggctctggctccggcggtggcaccctgaagtacgtggaggatgtgacaaacgtggtcagacgggatgtggagaagtggggccccttcgatctggtgtacggcagcacccaacccctgggcagctcttgtgaccggtgccctggctggtacatgtttcagttccaccggatcctgcagtacgccctgccgagacaggagtcccagcggccattcttttggattttcatggacaacttgctgctgaccgaggatgaccaggaaactaccactcggttcctgcagaccgaagccgtgaccctgcaggacgtgagaggccgggactaccagaacgccatgcgggtgtggtccaacatccctggactgaaaagcaagcacgcacctctgacccctaaagaagaggagtacctgcaggcccaggtgcggagcagaagcaagctggacgcccctaaggtggatctgctggtgaagaattgcctcctgcccctgagagagtacttcaagtatttcagccagaatagtctgcccctgggcggcccaagcagcggcgcccctcctcccagcggcggcagcccagccggctccccaacctctaccgaggagggcacctctgagtccgccacccccgagagcggccctggcacctccaccgagcccagcgagggcagcgcacccggcagccctgccggcagccccacctccacagaggagggaaccagcaccgagcccagcgaaggcagcgccccaggcaccagcaccgagcctagtgagggcggctctggcggcggcagcgcccaggagattaaacggatcaacaagatcagaagaagacttgtgaaagacagcaacaccaagaaggccggcaagacaggccccatgaaaaccctgctggttagagtgatgacacccgatctgagagagcggctggaaaacctgagaaagaagcctgaaaatatcccccagcccatcagcaatacatctagagccaacctgaataagctgctgaccgattacaccgaaatgaagaaggcgatcctgcatgtgtactgggaagagttccagaaggaccctgtgggcctgatgagccgggtggcccagcctgccagcaagaagatcgatcagaacaagctgaaacctgagatggacgagaagggcaacctgaccaccgccggctttgcctgctctcagtgtggccagcccctgttcgtgtacaagctggagcaggtgtctgagaagggcaaggcttacaccaactacttcggacggtgcaatgtggccgagcacgaaaagctgatcctgctggcccagctgaagcccgagaaggatagcgacgaagccgtgacatatagcctgggaaagtttgggcagagggccctggatttctacagcattcatgtgaccaaggagtccacccaccccgtgaagcccctggcccagatcgccggaaacagatacgcctccggacctgtgggaaaggccctgagcgacgcatgtatgggcacaatcgcctccttcctgtctaagtaccaggacatcatcatcgaacaccagaaggtggtgaagggcaaccagaagagactggagagcctgcgggagctggccggcaaggaaaacctggaataccctagcgtgaccctgccacctcagcctcacaccaaggagggcgttgatgcctacaacgaagtgatcgcccgggtgcgaatgtgggtgaacctgaacctgtggcagaagctgaagctaagcagagatgatgccaagcctctgctgagactgaagggattcccttcctttcctctggtcgagagacaggccaacgaagtggactggtgggacatggtgtgtaacgtgaagaagctgatcaacgagaaaaaggaggatggcaaggtgttttggcagaatctggctggctacaagagacaggaagccctgagaccatacctgagcagcgaggaagatcggaagaagggaaagaaattcgctcggtaccagctgggcgacctgctgctgcacctggaaaagaagcacggcgaggactggggaaaggtgtacgacgaggcctgggagcggattgacaagaaagtggaaggcctgagcaagcacatcaagctggaagaggaacggagaagcgaggacgcccagagcaaggccgccctgaccgactggctgcgggctaaggccagcttcgtgatcgagggcctgaaggaggccgacaaggacgagttctgcagatgcgagctgaagctgcagaagtggtacggggacctgcggggaaagcccttcgccatcgaagccgagaacagcatcctggacatcagcggcttcagcaagcagtacaactgtgccttcatctggcagaaggacggcgtgaagaagctgaacctgtacctgatcatcaactacttcaagggcggcaagctgcggttcaagaagatcaaacctgaagccttcgaagccaacagattctacaccgtgatcaacaaaaagagcggcgagatcgtgcccatggaggtgaacttcaacttcgacgaccccaacctgatcatcctgcctctggcctttggcaagagacagggcagagaattcatctggaacgacctgctgtccctggaaaccggcagcctgaagctggccaacggaagagtgatcgagaagacactgtacaacagaagaacccggcaggatgagcctgccctgttcgtggccctgaccttcgagcggcgggaggtcctggactcctccaatatcaaaccaatgaacctgatcggcgtggcaagaggcgaaaacatccccgccgtgatcgccctgaccgaccccgagggctgcccactgagccggtttaaggatagcctgggaaacccaacccacatcctgagaatcggcgagagctataaggagaagcagcggaccatccaggccaagaaggaggtggagcagcggagagccggcggctacagccggaagtacgccagcaaagccaagaatctggcagacgatatggtgagaaacaccgctagagatctgctgtactacgccgtgacccaggatgccatgctgatcttcgccaacctgagccggggcttcggccggcagggcaagcggaccttcatggccgagagacagtacacacggatggaggactggctgaccgccaagctggcctacgagggcctgagcaagacctacctgtccaagacactggcccagtacacctccaagacatgcagcaactgtgggtttaccatcaccagcgccgactacgacagggtgctggagaagctgaagaagacagcaacaggctggatgaccacaattaacggcaaggagctgaaggtggagggccagattacctactacaacagatacaagagacagaacgtagtcaaggacctgtccgtcgagctggatagactgagcgaagaatctgtgaacaacgacatctcctcctggacaaagggcagaagcggagaagctctgagcctcctgaagaaaagattctcccatagacccgtgcaggagaagttcgtgtgcctgaactgcggcttcgagacacacgcagccgagcaagccgccctgaacatcgccagatcctggctgttcctgcggagccaggagtacaagaaataccagacaaacaagacaaccggcaacaccgataagagagccttcgtcgagacctggcagtccttttaccggaagaagcttaaggaggtgtggaaacctgccgtgcggtctggcggatctggcggaggctccacaagcatggacagcgtgaccatcgaggacgtggccgtggacttcaccctggaggagtgggccctgctgggccccagccagaggaagctgtacagggacgtgatgcaggagaccctgaggaacctggccgccgtgggcgccaagagggagtaccacgacatcgaggaccagtacaagaaccagggcaggaagctgaggaccttcatggtggagaggctgtgcaagagcaaggacatcagcctgtgcggcaccagccccaagaaaaagagaaaagtctaagctgccttctgcggggcttgccttctggccatgcccttcttctctcccttgcacctgtacctcttggtctttgaataaagcctgagtaggaaggctagcaaaaaaaaaaaaaaaaaaaaaaaaaaaaaaaaaaaaaaaaaaaaaaaaaaaaaaaaaaaaaaaaaaaaaaaaaaaaaaaa

SEQ ID NO: 6199 - RNA, 5797 nt, synthetic construct
  source 1..5797: mol_type = other RNA
aggaaataagagagaaaagaagagtaagaagaaatataagagccaccatggcccctaagaagaagcgtaaagtgagccggatggaacgcctcgtctacgaggtgcggcagaagtgcagaaacatcgaggacatctgcatctcctgcggatctctgaacgtgaccctggagcacccactgttcatcggcggcatgtgccagaactgtaaaaactgttttctggagtgtgcctatcaatacgacgatgacggctaccagagctactgcaccatctgttgcggcggaagagaggtgctgatgtgtggaaataacaactgctgccggtgcttctgcgtggaatgcgtggacctgctggtgggccccggcgccgcccaggccgctattaaggaagatccttggaactgctacatgtgcggccacaagggcacatacggcctgctgagacggagagaggactggcctagcagactgcagatgttcttcgccaataaccacgaccaggagttcgacccccctaaggtgtaccctcccgtccccgccgagaagagaaagcccatccgggtcctgagcctgttcgatggcatcgccaccggtctgctggtgctgaaggacctgggcatccaggtggataggtacattgcctccgaggtgtgcgaggactccatcaccgtgggaatggtgcgtcatcagggcaagatcatgtacgtgggcgacgtgcggagcgtgacacagaagcatatccaggagtggggccctttcgacctggtgatcggcggcagcccttgcaatgacctgagcatcgtgaacccagcccggaagggcctgtacgagggaaccggcagactgttcttcgagttttacagactgctgcacgacgcccggcctaaggaaggcgacgaccggcccttcttttggctgttcgagaatgtggtggccatgggagtcagcgacaagcgggatattagccggttcctggagagcaaccccgtgatgatcgatgccaaggaagtgagcgccgcccaccgggccagatacttctggggcaatctgcctggcatgaacagacccctggccagcaccgtgaacgacaagctggagctgcaggagtgcctggagcacggccggatcgccaagttcagcaaggtgagaaccatcaccacccgaagcaacagcatcaaacaaggcaaggaccagcactttcctgtgttcatgaacgagaaggaggacatcctgtggtgtaccgagatggagagagtgttcgggttcccagtccactacacagatgtcagcaacatgtctagactggccagacagagactgctgggaagaagctggtccgtccctgtgatcagacacctgttcgcccctctgaaggagtacttcgcctgcgtgagcagcggcaacagcaacgccaacagccggggccccagcttctctagcggcctggtgccactgtccctgagagggagccacatgggccccatggagatctacaaaaccgtgagcgcctggaagcggcagcctgtgcgcgtgctgagcctgtttcggaatatcgataaagtcctgaaaagcctgggattcctggagagcggctctggctccggcggtggcaccctgaagtacgtggaggatgtgacaaacgtggtcagacgggatgtggagaagtggggccccttcgatctggtgtacggcagcacccaacccctgggcagctcttgtgaccggtgccctggctggtacatgtttcagttccaccggatcctgcagtacgccctgccgagacaggagtcccagcggccattcttttggattttcatggacaacttgctgctgaccgaggatgaccaggaaactaccactcggttcctgcagaccgaagccgtgaccctgcaggacgtgagaggccgggactaccagaacgccatgcgggtgtggtccaacatccctggactgaaaagcaagcacgcacctctgacccctaaagaagaggagtacctgcaggcccaggtgcggagcagaagcaagctggacgcccctaaggtggatctgctggtgaagaattgcctcctgcccctgagagagtacttcaagtatttcagccagaatagtctgcccctgggcggcccaagcagcggcgcccctcctcccagcggcggcagcccagccggctccccaacctctaccgaggagggcacctctgagtccgccacccccgagagcggccctggcacctccaccgagcccagcgagggcagcgcacccggcagccctgccggcagccccacctccacagaggagggaaccagcaccgagcccagcgaaggcagcgccccaggcaccagcaccgagcctagtgagggcggctctggcggcggcagcgcccaggagattaaacggatcaacaagatcagaagaagacttgtgaaagacagcaacaccaagaaggccggcaagacaggccccatgaaaaccctgctggttagagtgatgacacccgatctgagagagcggctggaaaacctgagaaagaagcctgaaaatatcccccagcccatcagcaatacatctagagccaacctgaataagctgctgaccgattacaccgaaatgaagaaggcgatcctgcatgtgtactgggaagagttccagaaggaccctgtgggcctgatgagccgggtggcccagcctgccagcaagaagatcgatcagaacaagctgaaacctgagatggacgagaagggcaacctgaccaccgccggctttgcctgctctcagtgtggccagcccctgttcgtgtacaagctggagcaggtgtctgagaagggcaaggcttacaccaactacttcggacggtgcaatgtggccgagcacgaaaagctgatcctgctggcccagctgaagcccgagaaggatagcgacgaagccgtgacatatagcctgggaaagtttgggcagagggccctggatttctacagcattcatgtgaccaaggagtccacccaccccgtgaagcccctggcccagatcgccggaaacagatacgcctccggacctgtgggaaaggccctgagcgacgcatgtatgggcacaatcgcctccttcctgtctaagtaccaggacatcatcatcgaacaccagaaggtggtgaagggcaaccagaagagactggagagcctgcgggagctggccggcaaggaaaacctggaataccctagcgtgaccctgccacctcagcctcacaccaaggagggcgttgatgcctacaacgaagtgatcgcccgggtgcgaatgtgggtgaacctgaacctgtggcagaagctgaagctaagcagagatgatgccaagcctctgctgagactgaagggattcccttcctttcctctggtcgagagacaggccaacgaagtggactggtgggacatggtgtgtaacgtgaagaagctgatcaacgagaaaaaggaggatggcaaggtgttttggcagaatctggctggctacaagagacaggaagccctgagaccatacctgagcagcgaggaagatcggaagaagggaaagaaattcgctcggtaccagctgggcgacctgctgctgcacctggaaaagaagcacggcgaggactggggaaaggtgtacgacgaggcctgggagcggattgacaagaaagtggaaggcctgagcaagcacatcaagctggaagaggaacggagaagcgaggacgcccagagcaaggccgccctgaccgactggctgcgggctaaggccagcttcgtgatcgagggcctgaaggaggccgacaaggacgagttctgcagatgcgagctgaagctgcagaagtggtacggggacctgcggggaaagcccttcgccatcgaagccgagaacagcatcctggacatcagcggcttcagcaagcagtacaactgtgccttcatctggcagaaggacggcgtgaagaagctgaacctgtacctgatcatcaactacttcaagggcggcaagctgcggttcaagaagatcaaacctgaagccttcgaagccaacagattctacaccgtgatcaacaaaaagagcggcgagatcgtgcccatggaggtgaacttcaacttcgacgaccccaacctgatcatcctgcctctggcctttggcaagagacagggcagagaattcatctggaacgacctgctgtccctggaaaccggcagcctgaagctggccaacggaagagtgatcgagaagacactgtacaacagaagaacccggcaggatgagcctgccctgttcgtggccctgaccttcgagcggcgggaggtcctggactcctccaatatcaaaccaatgaacctgatcggcgtggcaagaggcgaaaacatccccgccgtgatcgccctgaccgaccccgagggctgcccactgagccggtttaaggatagcctgggaaacccaacccacatcctgagaatcggcgagagctataaggagaagcagcggaccatccaggccaagaaggaggtggagcagcggagagccggcggctacagccggaagtacgccagcaaagccaagaatctggcagacgatatggtgagaaacaccgctagagatctgctgtactacgccgtgacccaggatgccatgctgatcttcgccaacctgagccggggcttcggccggcagggcaagcggaccttcatggccgagagacagtacacacggatggaggactggctgaccgccaagctggcctacgagggcctgagcaagacctacctgtccaagacactggcccagtacacctccaagacatgcagcaactgtgggtttaccatcaccagcgccgactacgacagggtgctggagaagctgaagaagacagcaacaggctggatgaccacaattaacggcaaggagctgaaggtggagggccagattacctactacaacagatacaagagacagaacgtagtcaaggacctgtccgtcgagctggatagactgagcgaagaatctgtgaacaacgacatctcctcctggacaaagggcagaagcggagaagctctgagcctcctgaagaaaagattctcccatagacccgtgcaggagaagttcgtgtgcctgaactgcggcttcgagacacacgcagccgagcaagccgccctgaacatcgccagatcctggctgttcctgcggagccaggagtacaagaaataccagacaaacaagacaaccggcaacaccgataagagagccttcgtcgagacctggcagtccttttaccggaagaagcttaaggaggtgtggaaacctgccgtgcggtctggcggatctggcggaggctccacaagcctgcagggcagcgtgagcttcaaggacgtgaccgtggacttcacccaggaggagtggcagcagctggaccccgcccagaaggccctgtacagggacgtgatgctggagaactactgccacttcgtgagcgtgggcttccacatgaccaagcccgacatgatcaggaggctggagcagggcgaggagctgtggaccgagaggatcttccccggccagagctacctggaggaggacggcaaggccaccagccccaagaaaaagagaaaagtctaagctgccttctgcggggcttgccttctggccatgcccttcttctctcccttgcacctgtacctcttggtctttgaataaagcctgagtaggaaggctagcaaaaaaaaaaaaaaaaaaaaaaaaaaaaaaaaaaaaaaaaaaaaaaaaaaaaaaaaaaaaaaaaaaaaaaaaaaaaaaaa

SEQ ID NO: 6200 - RNA, 5797 nt, synthetic construct
  source 1..5797: mol_type = other RNA
aggaaataagagagaaaagaagagtaagaagaaatataagagccaccatggcccctaagaagaagcgtaaagtgagccggatggaacgcctcgtctacgaggtgcggcagaagtgcagaaacatcgaggacatctgcatctcctgcggatctctgaacgtgaccctggagcacccactgttcatcggcggcatgtgccagaactgtaaaaactgttttctggagtgtgcctatcaatacgacgatgacggctaccagagctactgcaccatctgttgcggcggaagagaggtgctgatgtgtggaaataacaactgctgccggtgcttctgcgtggaatgcgtggacctgctggtgggccccggcgccgcccaggccgctattaaggaagatccttggaactgctacatgtgcggccacaagggcacatacggcctgctgagacggagagaggactggcctagcagactgcagatgttcttcgccaataaccacgaccaggagttcgacccccctaaggtgtaccctcccgtccccgccgagaagagaaagcccatccgggtcctgagcctgttcgatggcatcgccaccggtctgctggtgctgaaggacctgggcatccaggtggataggtacattgcctccgaggtgtgcgaggactccatcaccgtgggaatggtgcgtcatcagggcaagatcatgtacgtgggcgacgtgcggagcgtgacacagaagcatatccaggagtggggccctttcgacctggtgatcggcggcagcccttgcaatgacctgagcatcgtgaacccagcccggaagggcctgtacgagggaaccggcagactgttcttcgagttttacagactgctgcacgacgcccggcctaaggaaggcgacgaccggcccttcttttggctgttcgagaatgtggtggccatgggagtcagcgacaagcgggatattagccggttcctggagagcaaccccgtgatgatcgatgccaaggaagtgagcgccgcccaccgggccagatacttctggggcaatctgcctggcatgaacagacccctggccagcaccgtgaacgacaagctggagctgcaggagtgcctggagcacggccggatcgccaagttcagcaaggtgagaaccatcaccacccgaagcaacagcatcaaacaaggcaaggaccagcactttcctgtgttcatgaacgagaaggaggacatcctgtggtgtaccgagatggagagagtgttcgggttcccagtccactacacagatgtcagcaacatgtctagactggccagacagagactgctgggaagaagctggtccgtccctgtgatcagacacctgttcgcccctctgaaggagtacttcgcctgcgtgagcagcggcaacagcaacgccaacagccggggccccagcttctctagcggcctggtgccactgtccctgagagggagccacatgggccccatggagatctacaaaaccgtgagcgcctggaagcggcagcctgtgcgcgtgctgagcctgtttcggaatatcgataaagtcctgaaaagcctgggattcctggagagcggctctggctccggcggtggcaccctgaagtacgtggaggatgtgacaaacgtggtcagacgggatgtggagaagtggggccccttcgatctggtgtacggcagcacccaacccctgggcagctcttgtgaccggtgccctggctggtacatgtttcagttccaccggatcctgcagtacgccctgccgagacaggagtcccagcggccattcttttggattttcatggacaacttgctgctgaccgaggatgaccaggaaactaccactcggttcctgcagaccgaagccgtgaccctgcaggacgtgagaggccgggactaccagaacgccatgcgggtgtggtccaacatccctggactgaaaagcaagcacgcacctctgacccctaaagaagaggagtacctgcaggcccaggtgcggagcagaagcaagctggacgcccctaaggtggatctgctggtgaagaattgcctcctgcccctgagagagtacttcaagtatttcagccagaatagtctgcccctgggcggcccaagcagcggcgcccctcctcccagcggcggcagcccagccggctccccaacctctaccgaggagggcacctctgagtccgccacccccgagagcggccctggcacctccaccgagcccagcgagggcagcgcacccggcagccctgccggcagccccacctccacagaggagggaaccagcaccgagcccagcgaaggcagcgccccaggcaccagcaccgagcctagtgagggcggctctggcggcggcagcgcccaggagattaaacggatcaacaagatcagaagaagacttgtgaaagacagcaacaccaagaaggccggcaagacaggccccatgaaaaccctgctggttagagtgatgacacccgatctgagagagcggctggaaaacctgagaaagaagcctgaaaatatcccccagcccatcagcaatacatctagagccaacctgaataagctgctgaccgattacaccgaaatgaagaaggcgatcctgcatgtgtactgggaagagttccagaaggaccctgtgggcctgatgagccgggtggcccagcctgccagcaagaagatcgatcagaacaagctgaaacctgagatggacgagaagggcaacctgaccaccgccggctttgcctgctctcagtgtggccagcccctgttcgtgtacaagctggagcaggtgtctgagaagggcaaggcttacaccaactacttcggacggtgcaatgtggccgagcacgaaaagctgatcctgctggcccagctgaagcccgagaaggatagcgacgaagccgtgacatatagcctgggaaagtttgggcagagggccctggatttctacagcattcatgtgaccaaggagtccacccaccccgtgaagcccctggcccagatcgccggaaacagatacgcctccggacctgtgggaaaggccctgagcgacgcatgtatgggcacaatcgcctccttcctgtctaagtaccaggacatcatcatcgaacaccagaaggtggtgaagggcaaccagaagagactggagagcctgcgggagctggccggcaaggaaaacctggaataccctagcgtgaccctgccacctcagcctcacaccaaggagggcgttgatgcctacaacgaagtgatcgcccgggtgcgaatgtgggtgaacctgaacctgtggcagaagctgaagctaagcagagatgatgccaagcctctgctgagactgaagggattcccttcctttcctctggtcgagagacaggccaacgaagtggactggtgggacatggtgtgtaacgtgaagaagctgatcaacgagaaaaaggaggatggcaaggtgttttggcagaatctggctggctacaagagacaggaagccctgagaccatacctgagcagcgaggaagatcggaagaagggaaagaaattcgctcggtaccagctgggcgacctgctgctgcacctggaaaagaagcacggcgaggactggggaaaggtgtacgacgaggcctgggagcggattgacaagaaagtggaaggcctgagcaagcacatcaagctggaagaggaacggagaagcgaggacgcccagagcaaggccgccctgaccgactggctgcgggctaaggccagcttcgtgatcgagggcctgaaggaggccgacaaggacgagttctgcagatgcgagctgaagctgcagaagtggtacggggacctgcggggaaagcccttcgccatcgaagccgagaacagcatcctggacatcagcggcttcagcaagcagtacaactgtgccttcatctggcagaaggacggcgtgaagaagctgaacctgtacctgatcatcaactacttcaagggcggcaagctgcggttcaagaagatcaaacctgaagccttcgaagccaacagattctacaccgtgatcaacaaaaagagcggcgagatcgtgcccatggaggtgaacttcaacttcgacgaccccaacctgatcatcctgcctctggcctttggcaagagacagggcagagaattcatctggaacgacctgctgtccctggaaaccggcagcctgaagctggccaacggaagagtgatcgagaagacactgtacaacagaagaacccggcaggatgagcctgccctgttcgtggccctgaccttcgagcggcgggaggtcctggactcctccaatatcaaaccaatgaacctgatcggcgtggcaagaggcgaaaacatccccgccgtgatcgccctgaccgaccccgagggctgcccactgagccggtttaaggatagcctgggaaacccaacccacatcctgagaatcggcgagagctataaggagaagcagcggaccatccaggccaagaaggaggtggagcagcggagagccggcggctacagccggaagtacgccagcaaagccaagaatctggcagacgatatggtgagaaacaccgctagagatctgctgtactacgccgtgacccaggatgccatgctgatcttcgccaacctgagccggggcttcggccggcagggcaagcggaccttcatggccgagagacagtacacacggatggaggactggctgaccgccaagctggcctacgagggcctgagcaagacctacctgtccaagacactggcccagtacacctccaagacatgcagcaactgtgggtttaccatcaccagcgccgactacgacagggtgctggagaagctgaagaagacagcaacaggctggatgaccacaattaacggcaaggagctgaaggtggagggccagattacctactacaacagatacaagagacagaacgtagtcaaggacctgtccgtcgagctggatagactgagcgaagaatctgtgaacaacgacatctcctcctggacaaagggcagaagcggagaagctctgagcctcctgaagaaaagattctcccatagacccgtgcaggagaagttcgtgtgcctgaactgcggcttcgagacacacgcagccgagcaagccgccctgaacatcgccagatcctggctgttcctgcggagccaggagtacaagaaataccagacaaacaagacaaccggcaacaccgataagagagccttcgtcgagacctggcagtccttttaccggaagaagcttaaggaggtgtggaaacctgccgtgcggtctggcggatctggcggaggctccacaagctgcaaggagagcgtgatcttcaaggacgtgtgcgtgaacttcagcctggaggagtgggagtgcctggacctgacccagaggaacctgtacaggtgcgtgatgctggagaactacagcaacctggtgagcgtgggcctgagcatccccaagcccgacgtgatcagcctgctggagcagggcaaggagccctggggcgtgttcgacagcgagatgaccaggggcctgaaccaggactgcggcagcaccagccccaagaaaaagagaaaagtctaagctgccttctgcggggcttgccttctggccatgcccttcttctctcccttgcacctgtacctcttggtctttgaataaagcctgagtaggaaggctagcaaaaaaaaaaaaaaaaaaaaaaaaaaaaaaaaaaaaaaaaaaaaaaaaaaaaaaaaaaaaaaaaaaaaaaaaaaaaaaaa

SEQ ID NO: 6201 - RNA, 5797 nt, synthetic construct
  source 1..5797: mol_type = other RNA
aggaaataagagagaaaagaagagtaagaagaaatataagagccaccatggcccctaagaagaagcgtaaagtgagccggatggaacgcctcgtctacgaggtgcggcagaagtgcagaaacatcgaggacatctgcatctcctgcggatctctgaacgtgaccctggagcacccactgttcatcggcggcatgtgccagaactgtaaaaactgttttctggagtgtgcctatcaatacgacgatgacggctaccagagctactgcaccatctgttgcggcggaagagaggtgctgatgtgtggaaataacaactgctgccggtgcttctgcgtggaatgcgtggacctgctggtgggccccggcgccgcccaggccgctattaaggaagatccttggaactgctacatgtgcggccacaagggcacatacggcctgctgagacggagagaggactggcctagcagactgcagatgttcttcgccaataaccacgaccaggagttcgacccccctaaggtgtaccctcccgtccccgccgagaagagaaagcccatccgggtcctgagcctgttcgatggcatcgccaccggtctgctggtgctgaaggacctgggcatccaggtggataggtacattgcctccgaggtgtgcgaggactccatcaccgtgggaatggtgcgtcatcagggcaagatcatgtacgtgggcgacgtgcggagcgtgacacagaagcatatccaggagtggggccctttcgacctggtgatcggcggcagcccttgcaatgacctgagcatcgtgaacccagcccggaagggcctgtacgagggaaccggcagactgttcttcgagttttacagactgctgcacgacgcccggcctaaggaaggcgacgaccggcccttcttttggctgttcgagaatgtggtggccatgggagtcagcgacaagcgggatattagccggttcctggagagcaaccccgtgatgatcgatgccaaggaagtgagcgccgcccaccgggccagatacttctggggcaatctgcctggcatgaacagacccctggccagcaccgtgaacgacaagctggagctgcaggagtgcctggagcacggccggatcgccaagttcagcaaggtgagaaccatcaccacccgaagcaacagcatcaaacaaggcaaggaccagcactttcctgtgttcatgaacgagaaggaggacatcctgtggtgtaccgagatggagagagtgttcgggttcccagtccactacacagatgtcagcaacatgtctagactggccagacagagactgctgggaagaagctggtccgtccctgtgatcagacacctgttcgcccctctgaaggagtacttcgcctgcgtgagcagcggcaacagcaacgccaacagccggggccccagcttctctagcggcctggtgccactgtccctgagagggagccacatgggccccatggagatctacaaaaccgtgagcgcctggaagcggcagcctgtgcgcgtgctgagcctgtttcggaatatcgataaagtcctgaaaagcctgggattcctggagagcggctctggctccggcggtggcaccctgaagtacgtggaggatgtgacaaacgtggtcagacgggatgtggagaagtggggccccttcgatctggtgtacggcagcacccaacccctgggcagctcttgtgaccggtgccctggctggtacatgtttcagttccaccggatcctgcagtacgccctgccgagacaggagtcccagcggccattcttttggattttcatggacaacttgctgctgaccgaggatgaccaggaaactaccactcggttcctgcagaccgaagccgtgaccctgcaggacgtgagaggccgggactaccagaacgccatgcgggtgtggtccaacatccctggactgaaaagcaagcacgcacctctgacccctaaagaagaggagtacctgcaggcccaggtgcggagcagaagcaagctggacgcccctaaggtggatctgctggtgaagaattgcctcctgcccctgagagagtacttcaagtatttcagccagaatagtctgcccctgggcggcccaagcagcggcgcccctcctcccagcggcggcagcccagccggctccccaacctctaccgaggagggcacctctgagtccgccacccccgagagcggccctggcacctccaccgagcccagcgagggcagcgcacccggcagccctgccggcagccccacctccacagaggagggaaccagcaccgagcccagcgaaggcagcgccccaggcaccagcaccgagcctagtgagggcggctctggcggcggcagcgcccaggagattaaacggatcaacaagatcagaagaagacttgtgaaagacagcaacaccaagaaggccggcaagacaggccccatgaaaaccctgctggttagagtgatgacacccgatctgagagagcggctggaaaacctgagaaagaagcctgaaaatatcccccagcccatcagcaatacatctagagccaacctgaataagctgctgaccgattacaccgaaatgaagaaggcgatcctgcatgtgtactgggaagagttccagaaggaccctgtgggcctgatgagccgggtggcccagcctgccagcaagaagatcgatcagaacaagctgaaacctgagatggacgagaagggcaacctgaccaccgccggctttgcctgctctcagtgtggccagcccctgttcgtgtacaagctggagcaggtgtctgagaagggcaaggcttacaccaactacttcggacggtgcaatgtggccgagcacgaaaagctgatcctgctggcccagctgaagcccgagaaggatagcgacgaagccgtgacatatagcctgggaaagtttgggcagagggccctggatttctacagcattcatgtgaccaaggagtccacccaccccgtgaagcccctggcccagatcgccggaaacagatacgcctccggacctgtgggaaaggccctgagcgacgcatgtatgggcacaatcgcctccttcctgtctaagtaccaggacatcatcatcgaacaccagaaggtggtgaagggcaaccagaagagactggagagcctgcgggagctggccggcaaggaaaacctggaataccctagcgtgaccctgccacctcagcctcacaccaaggagggcgttgatgcctacaacgaagtgatcgcccgggtgcgaatgtgggtgaacctgaacctgtggcagaagctgaagctaagcagagatgatgccaagcctctgctgagactgaagggattcccttcctttcctctggtcgagagacaggccaacgaagtggactggtgggacatggtgtgtaacgtgaagaagctgatcaacgagaaaaaggaggatggcaaggtgttttggcagaatctggctggctacaagagacaggaagccctgagaccatacctgagcagcgaggaagatcggaagaagggaaagaaattcgctcggtaccagctgggcgacctgctgctgcacctggaaaagaagcacggcgaggactggggaaaggtgtacgacgaggcctgggagcggattgacaagaaagtggaaggcctgagcaagcacatcaagctggaagaggaacggagaagcgaggacgcccagagcaaggccgccctgaccgactggctgcgggctaaggccagcttcgtgatcgagggcctgaaggaggccgacaaggacgagttctgcagatgcgagctgaagctgcagaagtggtacggggacctgcggggaaagcccttcgccatcgaagccgagaacagcatcctggacatcagcggcttcagcaagcagtacaactgtgccttcatctggcagaaggacggcgtgaagaagctgaacctgtacctgatcatcaactacttcaagggcggcaagctgcggttcaagaagatcaaacctgaagccttcgaagccaacagattctacaccgtgatcaacaaaaagagcggcgagatcgtgcccatggaggtgaacttcaacttcgacgaccccaacctgatcatcctgcctctggcctttggcaagagacagggcagagaattcatctggaacgacctgctgtccctggaaaccggcagcctgaagctggccaacggaagagtgatcgagaagacactgtacaacagaagaacccggcaggatgagcctgccctgttcgtggccctgaccttcgagcggcgggaggtcctggactcctccaatatcaaaccaatgaacctgatcggcgtggcaagaggcgaaaacatccccgccgtgatcgccctgaccgaccccgagggctgcccactgagccggtttaaggatagcctgggaaacccaacccacatcctgagaatcggcgagagctataaggagaagcagcggaccatccaggccaagaaggaggtggagcagcggagagccggcggctacagccggaagtacgccagcaaagccaagaatctggcagacgatatggtgagaaacaccgctagagatctgctgtactacgccgtgacccaggatgccatgctgatcttcgccaacctgagccggggcttcggccggcagggcaagcggaccttcatggccgagagacagtacacacggatggaggactggctgaccgccaagctggcctacgagggcctgagcaagacctacctgtccaagacactggcccagtacacctccaagacatgcagcaactgtgggtttaccatcaccagcgccgactacgacagggtgctggagaagctgaagaagacagcaacaggctggatgaccacaattaacggcaaggagctgaaggtggagggccagattacctactacaacagatacaagagacagaacgtagtcaaggacctgtccgtcgagctggatagactgagcgaagaatctgtgaacaacgacatctcctcctggacaaagggcagaagcggagaagctctgagcctcctgaagaaaagattctcccatagacccgtgcaggagaagttcgtgtgcctgaactgcggcttcgagacacacgcagccgagcaagccgccctgaacatcgccagatcctggctgttcctgcggagccaggagtacaagaaataccagacaaacaagacaaccggcaacaccgataagagagccttcgtcgagacctggcagtccttttaccggaagaagcttaaggaggtgtggaaacctgccgtgcggtctggcggatctggcggaggctccacaagcgtgggccaccccgtgaccttcagggacgtggccgtggacttcagcctggaggagtggaggtgcctgagccccgcccagagggccctgtacagggacgtgatgctggagaactacgagaacctggtgagcgtgggcctgcccgtgagcaagcccaccgtgatcagcctgctggagaagggcgaggccccctggatgccccaggccggcgcccccaggggcccctgccccgactacctgagctggaccagccccaagaaaaagagaaaagtctaagctgccttctgcggggcttgccttctggccatgcccttcttctctcccttgcacctgtacctcttggtctttgaataaagcctgagtaggaaggctagcaaaaaaaaaaaaaaaaaaaaaaaaaaaaaaaaaaaaaaaaaaaaaaaaaaaaaaaaaaaaaaaaaaaaaaaaaaaaaaaa

SEQ ID NO: 6202 - RNA, 5797 nt, synthetic construct
  source 1..5797: mol_type = other RNA
aggaaataagagagaaaagaagagtaagaagaaatataagagccaccatggcccctaagaagaagcgtaaagtgagccggatggaacgcctcgtctacgaggtgcggcagaagtgcagaaacatcgaggacatctgcatctcctgcggatctctgaacgtgaccctggagcacccactgttcatcggcggcatgtgccagaactgtaaaaactgttttctggagtgtgcctatcaatacgacgatgacggctaccagagctactgcaccatctgttgcggcggaagagaggtgctgatgtgtggaaataacaactgctgccggtgcttctgcgtggaatgcgtggacctgctggtgggccccggcgccgcccaggccgctattaaggaagatccttggaactgctacatgtgcggccacaagggcacatacggcctgctgagacggagagaggactggcctagcagactgcagatgttcttcgccaataaccacgaccaggagttcgacccccctaaggtgtaccctcccgtccccgccgagaagagaaagcccatccgggtcctgagcctgttcgatggcatcgccaccggtctgctggtgctgaaggacctgggcatccaggtggataggtacattgcctccgaggtgtgcgaggactccatcaccgtgggaatggtgcgtcatcagggcaagatcatgtacgtgggcgacgtgcggagcgtgacacagaagcatatccaggagtggggccctttcgacctggtgatcggcggcagcccttgcaatgacctgagcatcgtgaacccagcccggaagggcctgtacgagggaaccggcagactgttcttcgagttttacagactgctgcacgacgcccggcctaaggaaggcgacgaccggcccttcttttggctgttcgagaatgtggtggccatgggagtcagcgacaagcgggatattagccggttcctggagagcaaccccgtgatgatcgatgccaaggaagtgagcgccgcccaccgggccagatacttctggggcaatctgcctggcatgaacagacccctggccagcaccgtgaacgacaagctggagctgcaggagtgcctggagcacggccggatcgccaagttcagcaaggtgagaaccatcaccacccgaagcaacagcatcaaacaaggcaaggaccagcactttcctgtgttcatgaacgagaaggaggacatcctgtggtgtaccgagatggagagagtgttcgggttcccagtccactacacagatgtcagcaacatgtctagactggccagacagagactgctgggaagaagctggtccgtccctgtgatcagacacctgttcgcccctctgaaggagtacttcgcctgcgtgagcagcggcaacagcaacgccaacagccggggccccagcttctctagcggcctggtgccactgtccctgagagggagccacatgggccccatggagatctacaaaaccgtgagcgcctggaagcggcagcctgtgcgcgtgctgagcctgtttcggaatatcgataaagtcctgaaaagcctgggattcctggagagcggctctggctccggcggtggcaccctgaagtacgtggaggatgtgacaaacgtggtcagacgggatgtggagaagtggggccccttcgatctggtgtacggcagcacccaacccctgggcagctcttgtgaccggtgccctggctggtacatgtttcagttccaccggatcctgcagtacgccctgccgagacaggagtcccagcggccattcttttggattttcatggacaacttgctgctgaccgaggatgaccaggaaactaccactcggttcctgcagaccgaagccgtgaccctgcaggacgtgagaggccgggactaccagaacgccatgcgggtgtggtccaacatccctggactgaaaagcaagcacgcacctctgacccctaaagaagaggagtacctgcaggcccaggtgcggagcagaagcaagctggacgcccctaaggtggatctgctggtgaagaattgcctcctgcccctgagagagtacttcaagtatttcagccagaatagtctgcccctgggcggcccaagcagcggcgcccctcctcccagcggcggcagcccagccggctccccaacctctaccgaggagggcacctctgagtccgccacccccgagagcggccctggcacctccaccgagcccagcgagggcagcgcacccggcagccctgccggcagccccacctccacagaggagggaaccagcaccgagcccagcgaaggcagcgccccaggcaccagcaccgagcctagtgagggcggctctggcggcggcagcgcccaggagattaaacggatcaacaagatcagaagaagacttgtgaaagacagcaacaccaagaaggccggcaagacaggccccatgaaaaccctgctggttagagtgatgacacccgatctgagagagcggctggaaaacctgagaaagaagcctgaaaatatcccccagcccatcagcaatacatctagagccaacctgaataagctgctgaccgattacaccgaaatgaagaaggcgatcctgcatgtgtactgggaagagttccagaaggaccctgtgggcctgatgagccgggtggcccagcctgccagcaagaagatcgatcagaacaagctgaaacctgagatggacgagaagggcaacctgaccaccgccggctttgcctgctctcagtgtggccagcccctgttcgtgtacaagctggagcaggtgtctgagaagggcaaggcttacaccaactacttcggacggtgcaatgtggccgagcacgaaaagctgatcctgctggcccagctgaagcccgagaaggatagcgacgaagccgtgacatatagcctgggaaagtttgggcagagggccctggatttctacagcattcatgtgaccaaggagtccacccaccccgtgaagcccctggcccagatcgccggaaacagatacgcctccggacctgtgggaaaggccctgagcgacgcatgtatgggcacaatcgcctccttcctgtctaagtaccaggacatcatcatcgaacaccagaaggtggtgaagggcaaccagaagagactggagagcctgcgggagctggccggcaaggaaaacctggaataccctagcgtgaccctgccacctcagcctcacaccaaggagggcgttgatgcctacaacgaagtgatcgcccgggtgcgaatgtgggtgaacctgaacctgtggcagaagctgaagctaagcagagatgatgccaagcctctgctgagactgaagggattcccttcctttcctctggtcgagagacaggccaacgaagtggactggtgggacatggtgtgtaacgtgaagaagctgatcaacgagaaaaaggaggatggcaaggtgttttggcagaatctggctggctacaagagacaggaagccctgagaccatacctgagcagcgaggaagatcggaagaagggaaagaaattcgctcggtaccagctgggcgacctgctgctgcacctggaaaagaagcacggcgaggactggggaaaggtgtacgacgaggcctgggagcggattgacaagaaagtggaaggcctgagcaagcacatcaagctggaagaggaacggagaagcgaggacgcccagagcaaggccgccctgaccgactggctgcgggctaaggccagcttcgtgatcgagggcctgaaggaggccgacaaggacgagttctgcagatgcgagctgaagctgcagaagtggtacggggacctgcggggaaagcccttcgccatcgaagccgagaacagcatcctggacatcagcggcttcagcaagcagtacaactgtgccttcatctggcagaaggacggcgtgaagaagctgaacctgtacctgatcatcaactacttcaagggcggcaagctgcggttcaagaagatcaaacctgaagccttcgaagccaacagattctacaccgtgatcaacaaaaagagcggcgagatcgtgcccatggaggtgaacttcaacttcgacgaccccaacctgatcatcctgcctctggcctttggcaagagacagggcagagaattcatctggaacgacctgctgtccctggaaaccggcagcctgaagctggccaacggaagagtgatcgagaagacactgtacaacagaagaacccggcaggatgagcctgccctgttcgtggccctgaccttcgagcggcgggaggtcctggactcctccaatatcaaaccaatgaacctgatcggcgtggcaagaggcgaaaacatccccgccgtgatcgccctgaccgaccccgagggctgcccactgagccggtttaaggatagcctgggaaacccaacccacatcctgagaatcggcgagagctataaggagaagcagcggaccatccaggccaagaaggaggtggagcagcggagagccggcggctacagccggaagtacgccagcaaagccaagaatctggcagacgatatggtgagaaacaccgctagagatctgctgtactacgccgtgacccaggatgccatgctgatcttcgccaacctgagccggggcttcggccggcagggcaagcggaccttcatggccgagagacagtacacacggatggaggactggctgaccgccaagctggcctacgagggcctgagcaagacctacctgtccaagacactggcccagtacacctccaagacatgcagcaactgtgggtttaccatcaccagcgccgactacgacagggtgctggagaagctgaagaagacagcaacaggctggatgaccacaattaacggcaaggagctgaaggtggagggccagattacctactacaacagatacaagagacagaacgtagtcaaggacctgtccgtcgagctggatagactgagcgaagaatctgtgaacaacgacatctcctcctggacaaagggcagaagcggagaagctctgagcctcctgaagaaaagattctcccatagacccgtgcaggagaagttcgtgtgcctgaactgcggcttcgagacacacgcagccgagcaagccgccctgaacatcgccagatcctggctgttcctgcggagccaggagtacaagaaataccagacaaacaagacaaccggcaacaccgataagagagccttcgtcgagacctggcagtccttttaccggaagaagcttaaggaggtgtggaaacctgccgtgcggtctggcggatctggcggaggctccacaagcttccaggacttcgtgagcttcaacgacgtgagcgtgaacttcaccgaggaggagtggagggagctggaccccgtgcagagggtgctgtacagggacgtgatgctggagaactacaggaacctggtgagcctgggcttccccttcagcaagcccgacatcatcagccagctggagcaggccgtgaacccctggatgcaggagggcgaggtgctgaggggcagctgcacccacctggagaccaggaccagccccaagaaaaagagaaaagtctaagctgccttctgcggggcttgccttctggccatgcccttcttctctcccttgcacctgtacctcttggtctttgaataaagcctgagtaggaaggctagcaaaaaaaaaaaaaaaaaaaaaaaaaaaaaaaaaaaaaaaaaaaaaaaaaaaaaaaaaaaaaaaaaaaaaaaaaaaaaaaa

SEQ ID NO: 6203 - RNA, 5797 nt, synthetic construct
  source 1..5797: mol_type = other RNA
aggaaataagagagaaaagaagagtaagaagaaatataagagccaccatggcccctaagaagaagcgtaaagtgagccggatggaacgcctcgtctacgaggtgcggcagaagtgcagaaacatcgaggacatctgcatctcctgcggatctctgaacgtgaccctggagcacccactgttcatcggcggcatgtgccagaactgtaaaaactgttttctggagtgtgcctatcaatacgacgatgacggctaccagagctactgcaccatctgttgcggcggaagagaggtgctgatgtgtggaaataacaactgctgccggtgcttctgcgtggaatgcgtggacctgctggtgggccccggcgccgcccaggccgctattaaggaagatccttggaactgctacatgtgcggccacaagggcacatacggcctgctgagacggagagaggactggcctagcagactgcagatgttcttcgccaataaccacgaccaggagttcgacccccctaaggtgtaccctcccgtccccgccgagaagagaaagcccatccgggtcctgagcctgttcgatggcatcgccaccggtctgctggtgctgaaggacctgggcatccaggtggataggtacattgcctccgaggtgtgcgaggactccatcaccgtgggaatggtgcgtcatcagggcaagatcatgtacgtgggcgacgtgcggagcgtgacacagaagcatatccaggagtggggccctttcgacctggtgatcggcggcagcccttgcaatgacctgagcatcgtgaacccagcccggaagggcctgtacgagggaaccggcagactgttcttcgagttttacagactgctgcacgacgcccggcctaaggaaggcgacgaccggcccttcttttggctgttcgagaatgtggtggccatgggagtcagcgacaagcgggatattagccggttcctggagagcaaccccgtgatgatcgatgccaaggaagtgagcgccgcccaccgggccagatacttctggggcaatctgcctggcatgaacagacccctggccagcaccgtgaacgacaagctggagctgcaggagtgcctggagcacggccggatcgccaagttcagcaaggtgagaaccatcaccacccgaagcaacagcatcaaacaaggcaaggaccagcactttcctgtgttcatgaacgagaaggaggacatcctgtggtgtaccgagatggagagagtgttcgggttcccagtccactacacagatgtcagcaacatgtctagactggccagacagagactgctgggaagaagctggtccgtccctgtgatcagacacctgttcgcccctctgaaggagtacttcgcctgcgtgagcagcggcaacagcaacgccaacagccggggccccagcttctctagcggcctggtgccactgtccctgagagggagccacatgggccccatggagatctacaaaaccgtgagcgcctggaagcggcagcctgtgcgcgtgctgagcctgtttcggaatatcgataaagtcctgaaaagcctgggattcctggagagcggctctggctccggcggtggcaccctgaagtacgtggaggatgtgacaaacgtggtcagacgggatgtggagaagtggggccccttcgatctggtgtacggcagcacccaacccctgggcagctcttgtgaccggtgccctggctggtacatgtttcagttccaccggatcctgcagtacgccctgccgagacaggagtcccagcggccattcttttggattttcatggacaacttgctgctgaccgaggatgaccaggaaactaccactcggttcctgcagaccgaagccgtgaccctgcaggacgtgagaggccgggactaccagaacgccatgcgggtgtggtccaacatccctggactgaaaagcaagcacgcacctctgacccctaaagaagaggagtacctgcaggcccaggtgcggagcagaagcaagctggacgcccctaaggtggatctgctggtgaagaattgcctcctgcccctgagagagtacttcaagtatttcagccagaatagtctgcccctgggcggcccaagcagcggcgcccctcctcccagcggcggcagcccagccggctccccaacctctaccgaggagggcacctctgagtccgccacccccgagagcggccctggcacctccaccgagcccagcgagggcagcgcacccggcagccctgccggcagccccacctccacagaggagggaaccagcaccgagcccagcgaaggcagcgccccaggcaccagcaccgagcctagtgagggcggctctggcggcggcagcgcccaggagattaaacggatcaacaagatcagaagaagacttgtgaaagacagcaacaccaagaaggccggcaagacaggccccatgaaaaccctgctggttagagtgatgacacccgatctgagagagcggctggaaaacctgagaaagaagcctgaaaatatcccccagcccatcagcaatacatctagagccaacctgaataagctgctgaccgattacaccgaaatgaagaaggcgatcctgcatgtgtactgggaagagttccagaaggaccctgtgggcctgatgagccgggtggcccagcctgccagcaagaagatcgatcagaacaagctgaaacctgagatggacgagaagggcaacctgaccaccgccggctttgcctgctctcagtgtggccagcccctgttcgtgtacaagctggagcaggtgtctgagaagggcaaggcttacaccaactacttcggacggtgcaatgtggccgagcacgaaaagctgatcctgctggcccagctgaagcccgagaaggatagcgacgaagccgtgacatatagcctgggaaagtttgggcagagggccctggatttctacagcattcatgtgaccaaggagtccacccaccccgtgaagcccctggcccagatcgccggaaacagatacgcctccggacctgtgggaaaggccctgagcgacgcatgtatgggcacaatcgcctccttcctgtctaagtaccaggacatcatcatcgaacaccagaaggtggtgaagggcaaccagaagagactggagagcctgcgggagctggccggcaaggaaaacctggaataccctagcgtgaccctgccacctcagcctcacaccaaggagggcgttgatgcctacaacgaagtgatcgcccgggtgcgaatgtgggtgaacctgaacctgtggcagaagctgaagctaagcagagatgatgccaagcctctgctgagactgaagggattcccttcctttcctctggtcgagagacaggccaacgaagtggactggtgggacatggtgtgtaacgtgaagaagctgatcaacgagaaaaaggaggatggcaaggtgttttggcagaatctggctggctacaagagacaggaagccctgagaccatacctgagcagcgaggaagatcggaagaagggaaagaaattcgctcggtaccagctgggcgacctgctgctgcacctggaaaagaagcacggcgaggactggggaaaggtgtacgacgaggcctgggagcggattgacaagaaagtggaaggcctgagcaagcacatcaagctggaagaggaacggagaagcgaggacgcccagagcaaggccgccctgaccgactggctgcgggctaaggccagcttcgtgatcgagggcctgaaggaggccgacaaggacgagttctgcagatgcgagctgaagctgcagaagtggtacggggacctgcggggaaagcccttcgccatcgaagccgagaacagcatcctggacatcagcggcttcagcaagcagtacaactgtgccttcatctggcagaaggacggcgtgaagaagctgaacctgtacctgatcatcaactacttcaagggcggcaagctgcggttcaagaagatcaaacctgaagccttcgaagccaacagattctacaccgtgatcaacaaaaagagcggcgagatcgtgcccatggaggtgaacttcaacttcgacgaccccaacctgatcatcctgcctctggcctttggcaagagacagggcagagaattcatctggaacgacctgctgtccctggaaaccggcagcctgaagctggccaacggaagagtgatcgagaagacactgtacaacagaagaacccggcaggatgagcctgccctgttcgtggccctgaccttcgagcggcgggaggtcctggactcctccaatatcaaaccaatgaacctgatcggcgtggcaagaggcgaaaacatccccgccgtgatcgccctgaccgaccccgagggctgcccactgagccggtttaaggatagcctgggaaacccaacccacatcctgagaatcggcgagagctataaggagaagcagcggaccatccaggccaagaaggaggtggagcagcggagagccggcggctacagccggaagtacgccagcaaagccaagaatctggcagacgatatggtgagaaacaccgctagagatctgctgtactacgccgtgacccaggatgccatgctgatcttcgccaacctgagccggggcttcggccggcagggcaagcggaccttcatggccgagagacagtacacacggatggaggactggctgaccgccaagctggcctacgagggcctgagcaagacctacctgtccaagacactggcccagtacacctccaagacatgcagcaactgtgggtttaccatcaccagcgccgactacgacagggtgctggagaagctgaagaagacagcaacaggctggatgaccacaattaacggcaaggagctgaaggtggagggccagattacctactacaacagatacaagagacagaacgtagtcaaggacctgtccgtcgagctggatagactgagcgaagaatctgtgaacaacgacatctcctcctggacaaagggcagaagcggagaagctctgagcctcctgaagaaaagattctcccatagacccgtgcaggagaagttcgtgtgcctgaactgcggcttcgagacacacgcagccgagcaagccgccctgaacatcgccagatcctggctgttcctgcggagccaggagtacaagaaataccagacaaacaagacaaccggcaacaccgataagagagccttcgtcgagacctggcagtccttttaccggaagaagcttaaggaggtgtggaaacctgccgtgcggtctggcggatctggcggaggctccacaagcccccacaggctggtgctgttcagggacgtggccgtggacttcagccaggaggagtgggcctgcctggacagcgagcagaaggacctgtacagggacgtgatgctggagaactacagcaacctggtgagcctgggcttcagcagcagcaaggccgacatgctgagcctgctggagcagggcaaggagccctggaaggtggtgcaggacgtggccaggagccagagcagcgacctgggcagcaggaccagccccaagaaaaagagaaaagtctaagctgccttctgcggggcttgccttctggccatgcccttcttctctcccttgcacctgtacctcttggtctttgaataaagcctgagtaggaaggctagcaaaaaaaaaaaaaaaaaaaaaaaaaaaaaaaaaaaaaaaaaaaaaaaaaaaaaaaaaaaaaaaaaaaaaaaaaaaaaaaa

SEQ ID NO: 6204 - RNA, 5797 nt, synthetic construct
  source 1..5797: mol_type = other RNA
aggaaataagagagaaaagaagagtaagaagaaatataagagccaccatggcccctaagaagaagcgtaaagtgagccggatggaacgcctcgtctacgaggtgcggcagaagtgcagaaacatcgaggacatctgcatctcctgcggatctctgaacgtgaccctggagcacccactgttcatcggcggcatgtgccagaactgtaaaaactgttttctggagtgtgcctatcaatacgacgatgacggctaccagagctactgcaccatctgttgcggcggaagagaggtgctgatgtgtggaaataacaactgctgccggtgcttctgcgtggaatgcgtggacctgctggtgggccccggcgccgcccaggccgctattaaggaagatccttggaactgctacatgtgcggccacaagggcacatacggcctgctgagacggagagaggactggcctagcagactgcagatgttcttcgccaataaccacgaccaggagttcgacccccctaaggtgtaccctcccgtccccgccgagaagagaaagcccatccgggtcctgagcctgttcgatggcatcgccaccggtctgctggtgctgaaggacctgggcatccaggtggataggtacattgcctccgaggtgtgcgaggactccatcaccgtgggaatggtgcgtcatcagggcaagatcatgtacgtgggcgacgtgcggagcgtgacacagaagcatatccaggagtggggccctttcgacctggtgatcggcggcagcccttgcaatgacctgagcatcgtgaacccagcccggaagggcctgtacgagggaaccggcagactgttcttcgagttttacagactgctgcacgacgcccggcctaaggaaggcgacgaccggcccttcttttggctgttcgagaatgtggtggccatgggagtcagcgacaagcgggatattagccggttcctggagagcaaccccgtgatgatcgatgccaaggaagtgagcgccgcccaccgggccagatacttctggggcaatctgcctggcatgaacagacccctggccagcaccgtgaacgacaagctggagctgcaggagtgcctggagcacggccggatcgccaagttcagcaaggtgagaaccatcaccacccgaagcaacagcatcaaacaaggcaaggaccagcactttcctgtgttcatgaacgagaaggaggacatcctgtggtgtaccgagatggagagagtgttcgggttcccagtccactacacagatgtcagcaacatgtctagactggccagacagagactgctgggaagaagctggtccgtccctgtgatcagacacctgttcgcccctctgaaggagtacttcgcctgcgtgagcagcggcaacagcaacgccaacagccggggccccagcttctctagcggcctggtgccactgtccctgagagggagccacatgggccccatggagatctacaaaaccgtgagcgcctggaagcggcagcctgtgcgcgtgctgagcctgtttcggaatatcgataaagtcctgaaaagcctgggattcctggagagcggctctggctccggcggtggcaccctgaagtacgtggaggatgtgacaaacgtggtcagacgggatgtggagaagtggggccccttcgatctggtgtacggcagcacccaacccctgggcagctcttgtgaccggtgccctggctggtacatgtttcagttccaccggatcctgcagtacgccctgccgagacaggagtcccagcggccattcttttggattttcatggacaacttgctgctgaccgaggatgaccaggaaactaccactcggttcctgcagaccgaagccgtgaccctgcaggacgtgagaggccgggactaccagaacgccatgcgggtgtggtccaacatccctggactgaaaagcaagcacgcacctctgacccctaaagaagaggagtacctgcaggcccaggtgcggagcagaagcaagctggacgcccctaaggtggatctgctggtgaagaattgcctcctgcccctgagagagtacttcaagtatttcagccagaatagtctgcccctgggcggcccaagcagcggcgcccctcctcccagcggcggcagcccagccggctccccaacctctaccgaggagggcacctctgagtccgccacccccgagagcggccctggcacctccaccgagcccagcgagggcagcgcacccggcagccctgccggcagccccacctccacagaggagggaaccagcaccgagcccagcgaaggcagcgccccaggcaccagcaccgagcctagtgagggcggctctggcggcggcagcgcccaggagattaaacggatcaacaagatcagaagaagacttgtgaaagacagcaacaccaagaaggccggcaagacaggccccatgaaaaccctgctggttagagtgatgacacccgatctgagagagcggctggaaaacctgagaaagaagcctgaaaatatcccccagcccatcagcaatacatctagagccaacctgaataagctgctgaccgattacaccgaaatgaagaaggcgatcctgcatgtgtactgggaagagttccagaaggaccctgtgggcctgatgagccgggtggcccagcctgccagcaagaagatcgatcagaacaagctgaaacctgagatggacgagaagggcaacctgaccaccgccggctttgcctgctctcagtgtggccagcccctgttcgtgtacaagctggagcaggtgtctgagaagggcaaggcttacaccaactacttcggacggtgcaatgtggccgagcacgaaaagctgatcctgctggcccagctgaagcccgagaaggatagcgacgaagccgtgacatatagcctgggaaagtttgggcagagggccctggatttctacagcattcatgtgaccaaggagtccacccaccccgtgaagcccctggcccagatcgccggaaacagatacgcctccggacctgtgggaaaggccctgagcgacgcatgtatgggcacaatcgcctccttcctgtctaagtaccaggacatcatcatcgaacaccagaaggtggtgaagggcaaccagaagagactggagagcctgcgggagctggccggcaaggaaaacctggaataccctagcgtgaccctgccacctcagcctcacaccaaggagggcgttgatgcctacaacgaagtgatcgcccgggtgcgaatgtgggtgaacctgaacctgtggcagaagctgaagctaagcagagatgatgccaagcctctgctgagactgaagggattcccttcctttcctctggtcgagagacaggccaacgaagtggactggtgggacatggtgtgtaacgtgaagaagctgatcaacgagaaaaaggaggatggcaaggtgttttggcagaatctggctggctacaagagacaggaagccctgagaccatacctgagcagcgaggaagatcggaagaagggaaagaaattcgctcggtaccagctgggcgacctgctgctgcacctggaaaagaagcacggcgaggactggggaaaggtgtacgacgaggcctgggagcggattgacaagaaagtggaaggcctgagcaagcacatcaagctggaagaggaacggagaagcgaggacgcccagagcaaggccgccctgaccgactggctgcgggctaaggccagcttcgtgatcgagggcctgaaggaggccgacaaggacgagttctgcagatgcgagctgaagctgcagaagtggtacggggacctgcggggaaagcccttcgccatcgaagccgagaacagcatcctggacatcagcggcttcagcaagcagtacaactgtgccttcatctggcagaaggacggcgtgaagaagctgaacctgtacctgatcatcaactacttcaagggcggcaagctgcggttcaagaagatcaaacctgaagccttcgaagccaacagattctacaccgtgatcaacaaaaagagcggcgagatcgtgcccatggaggtgaacttcaacttcgacgaccccaacctgatcatcctgcctctggcctttggcaagagacagggcagagaattcatctggaacgacctgctgtccctggaaaccggcagcctgaagctggccaacggaagagtgatcgagaagacactgtacaacagaagaacccggcaggatgagcctgccctgttcgtggccctgaccttcgagcggcgggaggtcctggactcctccaatatcaaaccaatgaacctgatcggcgtggcaagaggcgaaaacatccccgccgtgatcgccctgaccgaccccgagggctgcccactgagccggtttaaggatagcctgggaaacccaacccacatcctgagaatcggcgagagctataaggagaagcagcggaccatccaggccaagaaggaggtggagcagcggagagccggcggctacagccggaagtacgccagcaaagccaagaatctggcagacgatatggtgagaaacaccgctagagatctgctgtactacgccgtgacccaggatgccatgctgatcttcgccaacctgagccggggcttcggccggcagggcaagcggaccttcatggccgagagacagtacacacggatggaggactggctgaccgccaagctggcctacgagggcctgagcaagacctacctgtccaagacactggcccagtacacctccaagacatgcagcaactgtgggtttaccatcaccagcgccgactacgacagggtgctggagaagctgaagaagacagcaacaggctggatgaccacaattaacggcaaggagctgaaggtggagggccagattacctactacaacagatacaagagacagaacgtagtcaaggacctgtccgtcgagctggatagactgagcgaagaatctgtgaacaacgacatctcctcctggacaaagggcagaagcggagaagctctgagcctcctgaagaaaagattctcccatagacccgtgcaggagaagttcgtgtgcctgaactgcggcttcgagacacacgcagccgagcaagccgccctgaacatcgccagatcctggctgttcctgcggagccaggagtacaagaaataccagacaaacaagacaaccggcaacaccgataagagagccttcgtcgagacctggcagtccttttaccggaagaagcttaaggaggtgtggaaacctgccgtgcggtctggcggatctggcggaggctccacaagctaccaggagatggtgaccttcgaggacgtggccgtgcacttcaccaagaccgagtggaccggcctgagccccgcccagagggccctgtacaggagcgtgatgctggagaacttcggcaacctgaccgccctgggctaccccgtgcccaagcccgccctgatcagcctgctggagggcggcgacatggactggggcctggaggcccaggacgacccccccgccgagaggaccaagaacgtgtgcaccagccccaagaaaaagagaaaagtctaagctgccttctgcggggcttgccttctggccatgcccttcttctctcccttgcacctgtacctcttggtctttgaataaagcctgagtaggaaggctagcaaaaaaaaaaaaaaaaaaaaaaaaaaaaaaaaaaaaaaaaaaaaaaaaaaaaaaaaaaaaaaaaaaaaaaaaaaaaaaaa

SEQ ID NO: 6205 - RNA, 5797 nt, synthetic construct
  source 1..5797: mol_type = other RNA
aggaaataagagagaaaagaagagtaagaagaaatataagagccaccatggcccctaagaagaagcgtaaagtgagccggatggaacgcctcgtctacgaggtgcggcagaagtgcagaaacatcgaggacatctgcatctcctgcggatctctgaacgtgaccctggagcacccactgttcatcggcggcatgtgccagaactgtaaaaactgttttctggagtgtgcctatcaatacgacgatgacggctaccagagctactgcaccatctgttgcggcggaagagaggtgctgatgtgtggaaataacaactgctgccggtgcttctgcgtggaatgcgtggacctgctggtgggccccggcgccgcccaggccgctattaaggaagatccttggaactgctacatgtgcggccacaagggcacatacggcctgctgagacggagagaggactggcctagcagactgcagatgttcttcgccaataaccacgaccaggagttcgacccccctaaggtgtaccctcccgtccccgccgagaagagaaagcccatccgggtcctgagcctgttcgatggcatcgccaccggtctgctggtgctgaaggacctgggcatccaggtggataggtacattgcctccgaggtgtgcgaggactccatcaccgtgggaatggtgcgtcatcagggcaagatcatgtacgtgggcgacgtgcggagcgtgacacagaagcatatccaggagtggggccctttcgacctggtgatcggcggcagcccttgcaatgacctgagcatcgtgaacccagcccggaagggcctgtacgagggaaccggcagactgttcttcgagttttacagactgctgcacgacgcccggcctaaggaaggcgacgaccggcccttcttttggctgttcgagaatgtggtggccatgggagtcagcgacaagcgggatattagccggttcctggagagcaaccccgtgatgatcgatgccaaggaagtgagcgccgcccaccgggccagatacttctggggcaatctgcctggcatgaacagacccctggccagcaccgtgaacgacaagctggagctgcaggagtgcctggagcacggccggatcgccaagttcagcaaggtgagaaccatcaccacccgaagcaacagcatcaaacaaggcaaggaccagcactttcctgtgttcatgaacgagaaggaggacatcctgtggtgtaccgagatggagagagtgttcgggttcccagtccactacacagatgtcagcaacatgtctagactggccagacagagactgctgggaagaagctggtccgtccctgtgatcagacacctgttcgcccctctgaaggagtacttcgcctgcgtgagcagcggcaacagcaacgccaacagccggggccccagcttctctagcggcctggtgccactgtccctgagagggagccacatgggccccatggagatctacaaaaccgtgagcgcctggaagcggcagcctgtgcgcgtgctgagcctgtttcggaatatcgataaagtcctgaaaagcctgggattcctggagagcggctctggctccggcggtggcaccctgaagtacgtggaggatgtgacaaacgtggtcagacgggatgtggagaagtggggccccttcgatctggtgtacggcagcacccaacccctgggcagctcttgtgaccggtgccctggctggtacatgtttcagttccaccggatcctgcagtacgccctgccgagacaggagtcccagcggccattcttttggattttcatggacaacttgctgctgaccgaggatgaccaggaaactaccactcggttcctgcagaccgaagccgtgaccctgcaggacgtgagaggccgggactaccagaacgccatgcgggtgtggtccaacatccctggactgaaaagcaagcacgcacctctgacccctaaagaagaggagtacctgcaggcccaggtgcggagcagaagcaagctggacgcccctaaggtggatctgctggtgaagaattgcctcctgcccctgagagagtacttcaagtatttcagccagaatagtctgcccctgggcggcccaagcagcggcgcccctcctcccagcggcggcagcccagccggctccccaacctctaccgaggagggcacctctgagtccgccacccccgagagcggccctggcacctccaccgagcccagcgagggcagcgcacccggcagccctgccggcagccccacctccacagaggagggaaccagcaccgagcccagcgaaggcagcgccccaggcaccagcaccgagcctagtgagggcggctctggcggcggcagcgcccaggagattaaacggatcaacaagatcagaagaagacttgtgaaagacagcaacaccaagaaggccggcaagacaggccccatgaaaaccctgctggttagagtgatgacacccgatctgagagagcggctggaaaacctgagaaagaagcctgaaaatatcccccagcccatcagcaatacatctagagccaacctgaataagctgctgaccgattacaccgaaatgaagaaggcgatcctgcatgtgtactgggaagagttccagaaggaccctgtgggcctgatgagccgggtggcccagcctgccagcaagaagatcgatcagaacaagctgaaacctgagatggacgagaagggcaacctgaccaccgccggctttgcctgctctcagtgtggccagcccctgttcgtgtacaagctggagcaggtgtctgagaagggcaaggcttacaccaactacttcggacggtgcaatgtggccgagcacgaaaagctgatcctgctggcccagctgaagcccgagaaggatagcgacgaagccgtgacatatagcctgggaaagtttgggcagagggccctggatttctacagcattcatgtgaccaaggagtccacccaccccgtgaagcccctggcccagatcgccggaaacagatacgcctccggacctgtgggaaaggccctgagcgacgcatgtatgggcacaatcgcctccttcctgtctaagtaccaggacatcatcatcgaacaccagaaggtggtgaagggcaaccagaagagactggagagcctgcgggagctggccggcaaggaaaacctggaataccctagcgtgaccctgccacctcagcctcacaccaaggagggcgttgatgcctacaacgaagtgatcgcccgggtgcgaatgtgggtgaacctgaacctgtggcagaagctgaagctaagcagagatgatgccaagcctctgctgagactgaagggattcccttcctttcctctggtcgagagacaggccaacgaagtggactggtgggacatggtgtgtaacgtgaagaagctgatcaacgagaaaaaggaggatggcaaggtgttttggcagaatctggctggctacaagagacaggaagccctgagaccatacctgagcagcgaggaagatcggaagaagggaaagaaattcgctcggtaccagctgggcgacctgctgctgcacctggaaaagaagcacggcgaggactggggaaaggtgtacgacgaggcctgggagcggattgacaagaaagtggaaggcctgagcaagcacatcaagctggaagaggaacggagaagcgaggacgcccagagcaaggccgccctgaccgactggctgcgggctaaggccagcttcgtgatcgagggcctgaaggaggccgacaaggacgagttctgcagatgcgagctgaagctgcagaagtggtacggggacctgcggggaaagcccttcgccatcgaagccgagaacagcatcctggacatcagcggcttcagcaagcagtacaactgtgccttcatctggcagaaggacggcgtgaagaagctgaacctgtacctgatcatcaactacttcaagggcggcaagctgcggttcaagaagatcaaacctgaagccttcgaagccaacagattctacaccgtgatcaacaaaaagagcggcgagatcgtgcccatggaggtgaacttcaacttcgacgaccccaacctgatcatcctgcctctggcctttggcaagagacagggcagagaattcatctggaacgacctgctgtccctggaaaccggcagcctgaagctggccaacggaagagtgatcgagaagacactgtacaacagaagaacccggcaggatgagcctgccctgttcgtggccctgaccttcgagcggcgggaggtcctggactcctccaatatcaaaccaatgaacctgatcggcgtggcaagaggcgaaaacatccccgccgtgatcgccctgaccgaccccgagggctgcccactgagccggtttaaggatagcctgggaaacccaacccacatcctgagaatcggcgagagctataaggagaagcagcggaccatccaggccaagaaggaggtggagcagcggagagccggcggctacagccggaagtacgccagcaaagccaagaatctggcagacgatatggtgagaaacaccgctagagatctgctgtactacgccgtgacccaggatgccatgctgatcttcgccaacctgagccggggcttcggccggcagggcaagcggaccttcatggccgagagacagtacacacggatggaggactggctgaccgccaagctggcctacgagggcctgagcaagacctacctgtccaagacactggcccagtacacctccaagacatgcagcaactgtgggtttaccatcaccagcgccgactacgacagggtgctggagaagctgaagaagacagcaacaggctggatgaccacaattaacggcaaggagctgaaggtggagggccagattacctactacaacagatacaagagacagaacgtagtcaaggacctgtccgtcgagctggatagactgagcgaagaatctgtgaacaacgacatctcctcctggacaaagggcagaagcggagaagctctgagcctcctgaagaaaagattctcccatagacccgtgcaggagaagttcgtgtgcctgaactgcggcttcgagacacacgcagccgagcaagccgccctgaacatcgccagatcctggctgttcctgcggagccaggagtacaagaaataccagacaaacaagacaaccggcaacaccgataagagagccttcgtcgagacctggcagtccttttaccggaagaagcttaaggaggtgtggaaacctgccgtgcggtctggcggatctggcggaggctccacaagcgccgaggtgcccgtggccttcgaggacgtggccgtgtacttcacccaggaggagtggggcagcctggacaagaggcagaaggagctgtacagggacgtgatgtggatgaactacgagctgctggccagcctgggccccgccgccgccaagcccgacctgatcagcaagctggagaggagggccgccccctggatcaaggacaccaggggccccaagtggggcaagggcaagaggaagaccgtgaccagccccaagaaaaagagaaaagtctaagctgccttctgcggggcttgccttctggccatgcccttcttctctcccttgcacctgtacctcttggtctttgaataaagcctgagtaggaaggctagcaaaaaaaaaaaaaaaaaaaaaaaaaaaaaaaaaaaaaaaaaaaaaaaaaaaaaaaaaaaaaaaaaaaaaaaaaaaaaaaa

SEQ ID NO: 6206 - RNA, 5797 nt, synthetic construct
  source 1..5797: mol_type = other RNA
aggaaataagagagaaaagaagagtaagaagaaatataagagccaccatggcccctaagaagaagcgtaaagtgagccggatggaacgcctcgtctacgaggtgcggcagaagtgcagaaacatcgaggacatctgcatctcctgcggatctctgaacgtgaccctggagcacccactgttcatcggcggcatgtgccagaactgtaaaaactgttttctggagtgtgcctatcaatacgacgatgacggctaccagagctactgcaccatctgttgcggcggaagagaggtgctgatgtgtggaaataacaactgctgccggtgcttctgcgtggaatgcgtggacctgctggtgggccccggcgccgcccaggccgctattaaggaagatccttggaactgctacatgtgcggccacaagggcacatacggcctgctgagacggagagaggactggcctagcagactgcagatgttcttcgccaataaccacgaccaggagttcgacccccctaaggtgtaccctcccgtccccgccgagaagagaaagcccatccgggtcctgagcctgttcgatggcatcgccaccggtctgctggtgctgaaggacctgggcatccaggtggataggtacattgcctccgaggtgtgcgaggactccatcaccgtgggaatggtgcgtcatcagggcaagatcatgtacgtgggcgacgtgcggagcgtgacacagaagcatatccaggagtggggccctttcgacctggtgatcggcggcagcccttgcaatgacctgagcatcgtgaacccagcccggaagggcctgtacgagggaaccggcagactgttcttcgagttttacagactgctgcacgacgcccggcctaaggaaggcgacgaccggcccttcttttggctgttcgagaatgtggtggccatgggagtcagcgacaagcgggatattagccggttcctggagagcaaccccgtgatgatcgatgccaaggaagtgagcgccgcccaccgggccagatacttctggggcaatctgcctggcatgaacagacccctggccagcaccgtgaacgacaagctggagctgcaggagtgcctggagcacggccggatcgccaagttcagcaaggtgagaaccatcaccacccgaagcaacagcatcaaacaaggcaaggaccagcactttcctgtgttcatgaacgagaaggaggacatcctgtggtgtaccgagatggagagagtgttcgggttcccagtccactacacagatgtcagcaacatgtctagactggccagacagagactgctgggaagaagctggtccgtccctgtgatcagacacctgttcgcccctctgaaggagtacttcgcctgcgtgagcagcggcaacagcaacgccaacagccggggccccagcttctctagcggcctggtgccactgtccctgagagggagccacatgggccccatggagatctacaaaaccgtgagcgcctggaagcggcagcctgtgcgcgtgctgagcctgtttcggaatatcgataaagtcctgaaaagcctgggattcctggagagcggctctggctccggcggtggcaccctgaagtacgtggaggatgtgacaaacgtggtcagacgggatgtggagaagtggggccccttcgatctggtgtacggcagcacccaacccctgggcagctcttgtgaccggtgccctggctggtacatgtttcagttccaccggatcctgcagtacgccctgccgagacaggagtcccagcggccattcttttggattttcatggacaacttgctgctgaccgaggatgaccaggaaactaccactcggttcctgcagaccgaagccgtgaccctgcaggacgtgagaggccgggactaccagaacgccatgcgggtgtggtccaacatccctggactgaaaagcaagcacgcacctctgacccctaaagaagaggagtacctgcaggcccaggtgcggagcagaagcaagctggacgcccctaaggtggatctgctggtgaagaattgcctcctgcccctgagagagtacttcaagtatttcagccagaatagtctgcccctgggcggcccaagcagcggcgcccctcctcccagcggcggcagcccagccggctccccaacctctaccgaggagggcacctctgagtccgccacccccgagagcggccctggcacctccaccgagcccagcgagggcagcgcacccggcagccctgccggcagccccacctccacagaggagggaaccagcaccgagcccagcgaaggcagcgccccaggcaccagcaccgagcctagtgagggcggctctggcggcggcagcgcccaggagattaaacggatcaacaagatcagaagaagacttgtgaaagacagcaacaccaagaaggccggcaagacaggccccatgaaaaccctgctggttagagtgatgacacccgatctgagagagcggctggaaaacctgagaaagaagcctgaaaatatcccccagcccatcagcaatacatctagagccaacctgaataagctgctgaccgattacaccgaaatgaagaaggcgatcctgcatgtgtactgggaagagttccagaaggaccctgtgggcctgatgagccgggtggcccagcctgccagcaagaagatcgatcagaacaagctgaaacctgagatggacgagaagggcaacctgaccaccgccggctttgcctgctctcagtgtggccagcccctgttcgtgtacaagctggagcaggtgtctgagaagggcaaggcttacaccaactacttcggacggtgcaatgtggccgagcacgaaaagctgatcctgctggcccagctgaagcccgagaaggatagcgacgaagccgtgacatatagcctgggaaagtttgggcagagggccctggatttctacagcattcatgtgaccaaggagtccacccaccccgtgaagcccctggcccagatcgccggaaacagatacgcctccggacctgtgggaaaggccctgagcgacgcatgtatgggcacaatcgcctccttcctgtctaagtaccaggacatcatcatcgaacaccagaaggtggtgaagggcaaccagaagagactggagagcctgcgggagctggccggcaaggaaaacctggaataccctagcgtgaccctgccacctcagcctcacaccaaggagggcgttgatgcctacaacgaagtgatcgcccgggtgcgaatgtgggtgaacctgaacctgtggcagaagctgaagctaagcagagatgatgccaagcctctgctgagactgaagggattcccttcctttcctctggtcgagagacaggccaacgaagtggactggtgggacatggtgtgtaacgtgaagaagctgatcaacgagaaaaaggaggatggcaaggtgttttggcagaatctggctggctacaagagacaggaagccctgagaccatacctgagcagcgaggaagatcggaagaagggaaagaaattcgctcggtaccagctgggcgacctgctgctgcacctggaaaagaagcacggcgaggactggggaaaggtgtacgacgaggcctgggagcggattgacaagaaagtggaaggcctgagcaagcacatcaagctggaagaggaacggagaagcgaggacgcccagagcaaggccgccctgaccgactggctgcgggctaaggccagcttcgtgatcgagggcctgaaggaggccgacaaggacgagttctgcagatgcgagctgaagctgcagaagtggtacggggacctgcggggaaagcccttcgccatcgaagccgagaacagcatcctggacatcagcggcttcagcaagcagtacaactgtgccttcatctggcagaaggacggcgtgaagaagctgaacctgtacctgatcatcaactacttcaagggcggcaagctgcggttcaagaagatcaaacctgaagccttcgaagccaacagattctacaccgtgatcaacaaaaagagcggcgagatcgtgcccatggaggtgaacttcaacttcgacgaccccaacctgatcatcctgcctctggcctttggcaagagacagggcagagaattcatctggaacgacctgctgtccctggaaaccggcagcctgaagctggccaacggaagagtgatcgagaagacactgtacaacagaagaacccggcaggatgagcctgccctgttcgtggccctgaccttcgagcggcgggaggtcctggactcctccaatatcaaaccaatgaacctgatcggcgtggcaagaggcgaaaacatccccgccgtgatcgccctgaccgaccccgagggctgcccactgagccggtttaaggatagcctgggaaacccaacccacatcctgagaatcggcgagagctataaggagaagcagcggaccatccaggccaagaaggaggtggagcagcggagagccggcggctacagccggaagtacgccagcaaagccaagaatctggcagacgatatggtgagaaacaccgctagagatctgctgtactacgccgtgacccaggatgccatgctgatcttcgccaacctgagccggggcttcggccggcagggcaagcggaccttcatggccgagagacagtacacacggatggaggactggctgaccgccaagctggcctacgagggcctgagcaagacctacctgtccaagacactggcccagtacacctccaagacatgcagcaactgtgggtttaccatcaccagcgccgactacgacagggtgctggagaagctgaagaagacagcaacaggctggatgaccacaattaacggcaaggagctgaaggtggagggccagattacctactacaacagatacaagagacagaacgtagtcaaggacctgtccgtcgagctggatagactgagcgaagaatctgtgaacaacgacatctcctcctggacaaagggcagaagcggagaagctctgagcctcctgaagaaaagattctcccatagacccgtgcaggagaagttcgtgtgcctgaactgcggcttcgagacacacgcagccgagcaagccgccctgaacatcgccagatcctggctgttcctgcggagccaggagtacaagaaataccagacaaacaagacaaccggcaacaccgataagagagccttcgtcgagacctggcagtccttttaccggaagaagcttaaggaggtgtggaaacctgccgtgcggtctggcggatctggcggaggctccacaagccaccaggagatggtgaccttcgaggacgtggccgtgcacttcaccaagaccgagtggaccggcctgagccccgcccagagggccctgtacaggagcgtgatgctggagaacttcggcaacctgaccgccctgggctaccccgtgcccaagcccgccctgatcagcctgctggagggcggcgacatggcctggggcctggaggcccaggacgacgcccccgccgagaggaccaagaacatctgcaccagccccaagaaaaagagaaaagtctaagctgccttctgcggggcttgccttctggccatgcccttcttctctcccttgcacctgtacctcttggtctttgaataaagcctgagtaggaaggctagcaaaaaaaaaaaaaaaaaaaaaaaaaaaaaaaaaaaaaaaaaaaaaaaaaaaaaaaaaaaaaaaaaaaaaaaaaaaaaaaa

SEQ ID NO: 6207 - RNA, 5797 nt, synthetic construct
  source 1..5797: mol_type = other RNA
aggaaataagagagaaaagaagagtaagaagaaatataagagccaccatggcccctaagaagaagcgtaaagtgagccggatggaacgcctcgtctacgaggtgcggcagaagtgcagaaacatcgaggacatctgcatctcctgcggatctctgaacgtgaccctggagcacccactgttcatcggcggcatgtgccagaactgtaaaaactgttttctggagtgtgcctatcaatacgacgatgacggctaccagagctactgcaccatctgttgcggcggaagagaggtgctgatgtgtggaaataacaactgctgccggtgcttctgcgtggaatgcgtggacctgctggtgggccccggcgccgcccaggccgctattaaggaagatccttggaactgctacatgtgcggccacaagggcacatacggcctgctgagacggagagaggactggcctagcagactgcagatgttcttcgccaataaccacgaccaggagttcgacccccctaaggtgtaccctcccgtccccgccgagaagagaaagcccatccgggtcctgagcctgttcgatggcatcgccaccggtctgctggtgctgaaggacctgggcatccaggtggataggtacattgcctccgaggtgtgcgaggactccatcaccgtgggaatggtgcgtcatcagggcaagatcatgtacgtgggcgacgtgcggagcgtgacacagaagcatatccaggagtggggccctttcgacctggtgatcggcggcagcccttgcaatgacctgagcatcgtgaacccagcccggaagggcctgtacgagggaaccggcagactgttcttcgagttttacagactgctgcacgacgcccggcctaaggaaggcgacgaccggcccttcttttggctgttcgagaatgtggtggccatgggagtcagcgacaagcgggatattagccggttcctggagagcaaccccgtgatgatcgatgccaaggaagtgagcgccgcccaccgggccagatacttctggggcaatctgcctggcatgaacagacccctggccagcaccgtgaacgacaagctggagctgcaggagtgcctggagcacggccggatcgccaagttcagcaaggtgagaaccatcaccacccgaagcaacagcatcaaacaaggcaaggaccagcactttcctgtgttcatgaacgagaaggaggacatcctgtggtgtaccgagatggagagagtgttcgggttcccagtccactacacagatgtcagcaacatgtctagactggccagacagagactgctgggaagaagctggtccgtccctgtgatcagacacctgttcgcccctctgaaggagtacttcgcctgcgtgagcagcggcaacagcaacgccaacagccggggccccagcttctctagcggcctggtgccactgtccctgagagggagccacatgggccccatggagatctacaaaaccgtgagcgcctggaagcggcagcctgtgcgcgtgctgagcctgtttcggaatatcgataaagtcctgaaaagcctgggattcctggagagcggctctggctccggcggtggcaccctgaagtacgtggaggatgtgacaaacgtggtcagacgggatgtggagaagtggggccccttcgatctggtgtacggcagcacccaacccctgggcagctcttgtgaccggtgccctggctggtacatgtttcagttccaccggatcctgcagtacgccctgccgagacaggagtcccagcggccattcttttggattttcatggacaacttgctgctgaccgaggatgaccaggaaactaccactcggttcctgcagaccgaagccgtgaccctgcaggacgtgagaggccgggactaccagaacgccatgcgggtgtggtccaacatccctggactgaaaagcaagcacgcacctctgacccctaaagaagaggagtacctgcaggcccaggtgcggagcagaagcaagctggacgcccctaaggtggatctgctggtgaagaattgcctcctgcccctgagagagtacttcaagtatttcagccagaatagtctgcccctgggcggcccaagcagcggcgcccctcctcccagcggcggcagcccagccggctccccaacctctaccgaggagggcacctctgagtccgccacccccgagagcggccctggcacctccaccgagcccagcgagggcagcgcacccggcagccctgccggcagccccacctccacagaggagggaaccagcaccgagcccagcgaaggcagcgccccaggcaccagcaccgagcctagtgagggcggctctggcggcggcagcgcccaggagattaaacggatcaacaagatcagaagaagacttgtgaaagacagcaacaccaagaaggccggcaagacaggccccatgaaaaccctgctggttagagtgatgacacccgatctgagagagcggctggaaaacctgagaaagaagcctgaaaatatcccccagcccatcagcaatacatctagagccaacctgaataagctgctgaccgattacaccgaaatgaagaaggcgatcctgcatgtgtactgggaagagttccagaaggaccctgtgggcctgatgagccgggtggcccagcctgccagcaagaagatcgatcagaacaagctgaaacctgagatggacgagaagggcaacctgaccaccgccggctttgcctgctctcagtgtggccagcccctgttcgtgtacaagctggagcaggtgtctgagaagggcaaggcttacaccaactacttcggacggtgcaatgtggccgagcacgaaaagctgatcctgctggcccagctgaagcccgagaaggatagcgacgaagccgtgacatatagcctgggaaagtttgggcagagggccctggatttctacagcattcatgtgaccaaggagtccacccaccccgtgaagcccctggcccagatcgccggaaacagatacgcctccggacctgtgggaaaggccctgagcgacgcatgtatgggcacaatcgcctccttcctgtctaagtaccaggacatcatcatcgaacaccagaaggtggtgaagggcaaccagaagagactggagagcctgcgggagctggccggcaaggaaaacctggaataccctagcgtgaccctgccacctcagcctcacaccaaggagggcgttgatgcctacaacgaagtgatcgcccgggtgcgaatgtgggtgaacctgaacctgtggcagaagctgaagctaagcagagatgatgccaagcctctgctgagactgaagggattcccttcctttcctctggtcgagagacaggccaacgaagtggactggtgggacatggtgtgtaacgtgaagaagctgatcaacgagaaaaaggaggatggcaaggtgttttggcagaatctggctggctacaagagacaggaagccctgagaccatacctgagcagcgaggaagatcggaagaagggaaagaaattcgctcggtaccagctgggcgacctgctgctgcacctggaaaagaagcacggcgaggactggggaaaggtgtacgacgaggcctgggagcggattgacaagaaagtggaaggcctgagcaagcacatcaagctggaagaggaacggagaagcgaggacgcccagagcaaggccgccctgaccgactggctgcgggctaaggccagcttcgtgatcgagggcctgaaggaggccgacaaggacgagttctgcagatgcgagctgaagctgcagaagtggtacggggacctgcggggaaagcccttcgccatcgaagccgagaacagcatcctggacatcagcggcttcagcaagcagtacaactgtgccttcatctggcagaaggacggcgtgaagaagctgaacctgtacctgatcatcaactacttcaagggcggcaagctgcggttcaagaagatcaaacctgaagccttcgaagccaacagattctacaccgtgatcaacaaaaagagcggcgagatcgtgcccatggaggtgaacttcaacttcgacgaccccaacctgatcatcctgcctctggcctttggcaagagacagggcagagaattcatctggaacgacctgctgtccctggaaaccggcagcctgaagctggccaacggaagagtgatcgagaagacactgtacaacagaagaacccggcaggatgagcctgccctgttcgtggccctgaccttcgagcggcgggaggtcctggactcctccaatatcaaaccaatgaacctgatcggcgtggcaagaggcgaaaacatccccgccgtgatcgccctgaccgaccccgagggctgcccactgagccggtttaaggatagcctgggaaacccaacccacatcctgagaatcggcgagagctataaggagaagcagcggaccatccaggccaagaaggaggtggagcagcggagagccggcggctacagccggaagtacgccagcaaagccaagaatctggcagacgatatggtgagaaacaccgctagagatctgctgtactacgccgtgacccaggatgccatgctgatcttcgccaacctgagccggggcttcggccggcagggcaagcggaccttcatggccgagagacagtacacacggatggaggactggctgaccgccaagctggcctacgagggcctgagcaagacctacctgtccaagacactggcccagtacacctccaagacatgcagcaactgtgggtttaccatcaccagcgccgactacgacagggtgctggagaagctgaagaagacagcaacaggctggatgaccacaattaacggcaaggagctgaaggtggagggccagattacctactacaacagatacaagagacagaacgtagtcaaggacctgtccgtcgagctggatagactgagcgaagaatctgtgaacaacgacatctcctcctggacaaagggcagaagcggagaagctctgagcctcctgaagaaaagattctcccatagacccgtgcaggagaagttcgtgtgcctgaactgcggcttcgagacacacgcagccgagcaagccgccctgaacatcgccagatcctggctgttcctgcggagccaggagtacaagaaataccagacaaacaagacaaccggcaacaccgataagagagccttcgtcgagacctggcagtccttttaccggaagaagcttaaggaggtgtggaaacctgccgtgcggtctggcggatctggcggaggctccacaagcaagctgaagcccgtgaagttccaggacgtggccgtgtacttcagcgaggaggagtggcagctgctggagaaccagcagaaggagctgtacaggagcgtgatgaaggagaactacgagaacctgaccagcctgggcttcaccaccaccaagcccaacatcctgaagaggatggagcagggcaggcccctgtgggtgagcaccaggaggaaggtgatcaagcacagcttcagggagggcgagcccaccagccccaagaaaaagagaaaagtctaagctgccttctgcggggcttgccttctggccatgcccttcttctctcccttgcacctgtacctcttggtctttgaataaagcctgagtaggaaggctagcaaaaaaaaaaaaaaaaaaaaaaaaaaaaaaaaaaaaaaaaaaaaaaaaaaaaaaaaaaaaaaaaaaaaaaaaaaaaaaaa

SEQ ID NO: 6208 - RNA, 5797 nt, synthetic construct
  source 1..5797: mol_type = other RNA
aggaaataagagagaaaagaagagtaagaagaaatataagagccaccatggcccctaagaagaagcgtaaagtgagccggatggaacgcctcgtctacgaggtgcggcagaagtgcagaaacatcgaggacatctgcatctcctgcggatctctgaacgtgaccctggagcacccactgttcatcggcggcatgtgccagaactgtaaaaactgttttctggagtgtgcctatcaatacgacgatgacggctaccagagctactgcaccatctgttgcggcggaagagaggtgctgatgtgtggaaataacaactgctgccggtgcttctgcgtggaatgcgtggacctgctggtgggccccggcgccgcccaggccgctattaaggaagatccttggaactgctacatgtgcggccacaagggcacatacggcctgctgagacggagagaggactggcctagcagactgcagatgttcttcgccaataaccacgaccaggagttcgacccccctaaggtgtaccctcccgtccccgccgagaagagaaagcccatccgggtcctgagcctgttcgatggcatcgccaccggtctgctggtgctgaaggacctgggcatccaggtggataggtacattgcctccgaggtgtgcgaggactccatcaccgtgggaatggtgcgtcatcagggcaagatcatgtacgtgggcgacgtgcggagcgtgacacagaagcatatccaggagtggggccctttcgacctggtgatcggcggcagcccttgcaatgacctgagcatcgtgaacccagcccggaagggcctgtacgagggaaccggcagactgttcttcgagttttacagactgctgcacgacgcccggcctaaggaaggcgacgaccggcccttcttttggctgttcgagaatgtggtggccatgggagtcagcgacaagcgggatattagccggttcctggagagcaaccccgtgatgatcgatgccaaggaagtgagcgccgcccaccgggccagatacttctggggcaatctgcctggcatgaacagacccctggccagcaccgtgaacgacaagctggagctgcaggagtgcctggagcacggccggatcgccaagttcagcaaggtgagaaccatcaccacccgaagcaacagcatcaaacaaggcaaggaccagcactttcctgtgttcatgaacgagaaggaggacatcctgtggtgtaccgagatggagagagtgttcgggttcccagtccactacacagatgtcagcaacatgtctagactggccagacagagactgctgggaagaagctggtccgtccctgtgatcagacacctgttcgcccctctgaaggagtacttcgcctgcgtgagcagcggcaacagcaacgccaacagccggggccccagcttctctagcggcctggtgccactgtccctgagagggagccacatgggccccatggagatctacaaaaccgtgagcgcctggaagcggcagcctgtgcgcgtgctgagcctgtttcggaatatcgataaagtcctgaaaagcctgggattcctggagagcggctctggctccggcggtggcaccctgaagtacgtggaggatgtgacaaacgtggtcagacgggatgtggagaagtggggccccttcgatctggtgtacggcagcacccaacccctgggcagctcttgtgaccggtgccctggctggtacatgtttcagttccaccggatcctgcagtacgccctgccgagacaggagtcccagcggccattcttttggattttcatggacaacttgctgctgaccgaggatgaccaggaaactaccactcggttcctgcagaccgaagccgtgaccctgcaggacgtgagaggccgggactaccagaacgccatgcgggtgtggtccaacatccctggactgaaaagcaagcacgcacctctgacccctaaagaagaggagtacctgcaggcccaggtgcggagcagaagcaagctggacgcccctaaggtggatctgctggtgaagaattgcctcctgcccctgagagagtacttcaagtatttcagccagaatagtctgcccctgggcggcccaagcagcggcgcccctcctcccagcggcggcagcccagccggctccccaacctctaccgaggagggcacctctgagtccgccacccccgagagcggccctggcacctccaccgagcccagcgagggcagcgcacccggcagccctgccggcagccccacctccacagaggagggaaccagcaccgagcccagcgaaggcagcgccccaggcaccagcaccgagcctagtgagggcggctctggcggcggcagcgcccaggagattaaacggatcaacaagatcagaagaagacttgtgaaagacagcaacaccaagaaggccggcaagacaggccccatgaaaaccctgctggttagagtgatgacacccgatctgagagagcggctggaaaacctgagaaagaagcctgaaaatatcccccagcccatcagcaatacatctagagccaacctgaataagctgctgaccgattacaccgaaatgaagaaggcgatcctgcatgtgtactgggaagagttccagaaggaccctgtgggcctgatgagccgggtggcccagcctgccagcaagaagatcgatcagaacaagctgaaacctgagatggacgagaagggcaacctgaccaccgccggctttgcctgctctcagtgtggccagcccctgttcgtgtacaagctggagcaggtgtctgagaagggcaaggcttacaccaactacttcggacggtgcaatgtggccgagcacgaaaagctgatcctgctggcccagctgaagcccgagaaggatagcgacgaagccgtgacatatagcctgggaaagtttgggcagagggccctggatttctacagcattcatgtgaccaaggagtccacccaccccgtgaagcccctggcccagatcgccggaaacagatacgcctccggacctgtgggaaaggccctgagcgacgcatgtatgggcacaatcgcctccttcctgtctaagtaccaggacatcatcatcgaacaccagaaggtggtgaagggcaaccagaagagactggagagcctgcgggagctggccggcaaggaaaacctggaataccctagcgtgaccctgccacctcagcctcacaccaaggagggcgttgatgcctacaacgaagtgatcgcccgggtgcgaatgtgggtgaacctgaacctgtggcagaagctgaagctaagcagagatgatgccaagcctctgctgagactgaagggattcccttcctttcctctggtcgagagacaggccaacgaagtggactggtgggacatggtgtgtaacgtgaagaagctgatcaacgagaaaaaggaggatggcaaggtgttttggcagaatctggctggctacaagagacaggaagccctgagaccatacctgagcagcgaggaagatcggaagaagggaaagaaattcgctcggtaccagctgggcgacctgctgctgcacctggaaaagaagcacggcgaggactggggaaaggtgtacgacgaggcctgggagcggattgacaagaaagtggaaggcctgagcaagcacatcaagctggaagaggaacggagaagcgaggacgcccagagcaaggccgccctgaccgactggctgcgggctaaggccagcttcgtgatcgagggcctgaaggaggccgacaaggacgagttctgcagatgcgagctgaagctgcagaagtggtacggggacctgcggggaaagcccttcgccatcgaagccgagaacagcatcctggacatcagcggcttcagcaagcagtacaactgtgccttcatctggcagaaggacggcgtgaagaagctgaacctgtacctgatcatcaactacttcaagggcggcaagctgcggttcaagaagatcaaacctgaagccttcgaagccaacagattctacaccgtgatcaacaaaaagagcggcgagatcgtgcccatggaggtgaacttcaacttcgacgaccccaacctgatcatcctgcctctggcctttggcaagagacagggcagagaattcatctggaacgacctgctgtccctggaaaccggcagcctgaagctggccaacggaagagtgatcgagaagacactgtacaacagaagaacccggcaggatgagcctgccctgttcgtggccctgaccttcgagcggcgggaggtcctggactcctccaatatcaaaccaatgaacctgatcggcgtggcaagaggcgaaaacatccccgccgtgatcgccctgaccgaccccgagggctgcccactgagccggtttaaggatagcctgggaaacccaacccacatcctgagaatcggcgagagctataaggagaagcagcggaccatccaggccaagaaggaggtggagcagcggagagccggcggctacagccggaagtacgccagcaaagccaagaatctggcagacgatatggtgagaaacaccgctagagatctgctgtactacgccgtgacccaggatgccatgctgatcttcgccaacctgagccggggcttcggccggcagggcaagcggaccttcatggccgagagacagtacacacggatggaggactggctgaccgccaagctggcctacgagggcctgagcaagacctacctgtccaagacactggcccagtacacctccaagacatgcagcaactgtgggtttaccatcaccagcgccgactacgacagggtgctggagaagctgaagaagacagcaacaggctggatgaccacaattaacggcaaggagctgaaggtggagggccagattacctactacaacagatacaagagacagaacgtagtcaaggacctgtccgtcgagctggatagactgagcgaagaatctgtgaacaacgacatctcctcctggacaaagggcagaagcggagaagctctgagcctcctgaagaaaagattctcccatagacccgtgcaggagaagttcgtgtgcctgaactgcggcttcgagacacacgcagccgagcaagccgccctgaacatcgccagatcctggctgttcctgcggagccaggagtacaagaaataccagacaaacaagacaaccggcaacaccgataagagagccttcgtcgagacctggcagtccttttaccggaagaagcttaaggaggtgtggaaacctgccgtgcggtctggcggatctggcggaggctccacaagcgaggaggtgcccgtggtgttcgaggacgtggccgtgtacttcaccagggaggagtgggccgccctggacaagaggcagaaggagctgtacagggacgtgatgaggaccaactacgagctgctggccagcctgggccccgccgccgccaagcccgacctgatcagcaagctggagaggagggccgccccctggatcagggaccccgacggccccgagtggggcaagggcaggccccccggcaagaccagccccaagaaaaagagaaaagtctaagctgccttctgcggggcttgccttctggccatgcccttcttctctcccttgcacctgtacctcttggtctttgaataaagcctgagtaggaaggctagcaaaaaaaaaaaaaaaaaaaaaaaaaaaaaaaaaaaaaaaaaaaaaaaaaaaaaaaaaaaaaaaaaaaaaaaaaaaaaaaa

SEQ ID NO: 6209 - RNA, 5797 nt, synthetic construct
  source 1..5797: mol_type = other RNA
aggaaataagagagaaaagaagagtaagaagaaatataagagccaccatggcccctaagaagaagcgtaaagtgagccggatggaacgcctcgtctacgaggtgcggcagaagtgcagaaacatcgaggacatctgcatctcctgcggatctctgaacgtgaccctggagcacccactgttcatcggcggcatgtgccagaactgtaaaaactgttttctggagtgtgcctatcaatacgacgatgacggctaccagagctactgcaccatctgttgcggcggaagagaggtgctgatgtgtggaaataacaactgctgccggtgcttctgcgtggaatgcgtggacctgctggtgggccccggcgccgcccaggccgctattaaggaagatccttggaactgctacatgtgcggccacaagggcacatacggcctgctgagacggagagaggactggcctagcagactgcagatgttcttcgccaataaccacgaccaggagttcgacccccctaaggtgtaccctcccgtccccgccgagaagagaaagcccatccgggtcctgagcctgttcgatggcatcgccaccggtctgctggtgctgaaggacctgggcatccaggtggataggtacattgcctccgaggtgtgcgaggactccatcaccgtgggaatggtgcgtcatcagggcaagatcatgtacgtgggcgacgtgcggagcgtgacacagaagcatatccaggagtggggccctttcgacctggtgatcggcggcagcccttgcaatgacctgagcatcgtgaacccagcccggaagggcctgtacgagggaaccggcagactgttcttcgagttttacagactgctgcacgacgcccggcctaaggaaggcgacgaccggcccttcttttggctgttcgagaatgtggtggccatgggagtcagcgacaagcgggatattagccggttcctggagagcaaccccgtgatgatcgatgccaaggaagtgagcgccgcccaccgggccagatacttctggggcaatctgcctggcatgaacagacccctggccagcaccgtgaacgacaagctggagctgcaggagtgcctggagcacggccggatcgccaagttcagcaaggtgagaaccatcaccacccgaagcaacagcatcaaacaaggcaaggaccagcactttcctgtgttcatgaacgagaaggaggacatcctgtggtgtaccgagatggagagagtgttcgggttcccagtccactacacagatgtcagcaacatgtctagactggccagacagagactgctgggaagaagctggtccgtccctgtgatcagacacctgttcgcccctctgaaggagtacttcgcctgcgtgagcagcggcaacagcaacgccaacagccggggccccagcttctctagcggcctggtgccactgtccctgagagggagccacatgggccccatggagatctacaaaaccgtgagcgcctggaagcggcagcctgtgcgcgtgctgagcctgtttcggaatatcgataaagtcctgaaaagcctgggattcctggagagcggctctggctccggcggtggcaccctgaagtacgtggaggatgtgacaaacgtggtcagacgggatgtggagaagtggggccccttcgatctggtgtacggcagcacccaacccctgggcagctcttgtgaccggtgccctggctggtacatgtttcagttccaccggatcctgcagtacgccctgccgagacaggagtcccagcggccattcttttggattttcatggacaacttgctgctgaccgaggatgaccaggaaactaccactcggttcctgcagaccgaagccgtgaccctgcaggacgtgagaggccgggactaccagaacgccatgcgggtgtggtccaacatccctggactgaaaagcaagcacgcacctctgacccctaaagaagaggagtacctgcaggcccaggtgcggagcagaagcaagctggacgcccctaaggtggatctgctggtgaagaattgcctcctgcccctgagagagtacttcaagtatttcagccagaatagtctgcccctgggcggcccaagcagcggcgcccctcctcccagcggcggcagcccagccggctccccaacctctaccgaggagggcacctctgagtccgccacccccgagagcggccctggcacctccaccgagcccagcgagggcagcgcacccggcagccctgccggcagccccacctccacagaggagggaaccagcaccgagcccagcgaaggcagcgccccaggcaccagcaccgagcctagtgagggcggctctggcggcggcagcgcccaggagattaaacggatcaacaagatcagaagaagacttgtgaaagacagcaacaccaagaaggccggcaagacaggccccatgaaaaccctgctggttagagtgatgacacccgatctgagagagcggctggaaaacctgagaaagaagcctgaaaatatcccccagcccatcagcaatacatctagagccaacctgaataagctgctgaccgattacaccgaaatgaagaaggcgatcctgcatgtgtactgggaagagttccagaaggaccctgtgggcctgatgagccgggtggcccagcctgccagcaagaagatcgatcagaacaagctgaaacctgagatggacgagaagggcaacctgaccaccgccggctttgcctgctctcagtgtggccagcccctgttcgtgtacaagctggagcaggtgtctgagaagggcaaggcttacaccaactacttcggacggtgcaatgtggccgagcacgaaaagctgatcctgctggcccagctgaagcccgagaaggatagcgacgaagccgtgacatatagcctgggaaagtttgggcagagggccctggatttctacagcattcatgtgaccaaggagtccacccaccccgtgaagcccctggcccagatcgccggaaacagatacgcctccggacctgtgggaaaggccctgagcgacgcatgtatgggcacaatcgcctccttcctgtctaagtaccaggacatcatcatcgaacaccagaaggtggtgaagggcaaccagaagagactggagagcctgcgggagctggccggcaaggaaaacctggaataccctagcgtgaccctgccacctcagcctcacaccaaggagggcgttgatgcctacaacgaagtgatcgcccgggtgcgaatgtgggtgaacctgaacctgtggcagaagctgaagctaagcagagatgatgccaagcctctgctgagactgaagggattcccttcctttcctctggtcgagagacaggccaacgaagtggactggtgggacatggtgtgtaacgtgaagaagctgatcaacgagaaaaaggaggatggcaaggtgttttggcagaatctggctggctacaagagacaggaagccctgagaccatacctgagcagcgaggaagatcggaagaagggaaagaaattcgctcggtaccagctgggcgacctgctgctgcacctggaaaagaagcacggcgaggactggggaaaggtgtacgacgaggcctgggagcggattgacaagaaagtggaaggcctgagcaagcacatcaagctggaagaggaacggagaagcgaggacgcccagagcaaggccgccctgaccgactggctgcgggctaaggccagcttcgtgatcgagggcctgaaggaggccgacaaggacgagttctgcagatgcgagctgaagctgcagaagtggtacggggacctgcggggaaagcccttcgccatcgaagccgagaacagcatcctggacatcagcggcttcagcaagcagtacaactgtgccttcatctggcagaaggacggcgtgaagaagctgaacctgtacctgatcatcaactacttcaagggcggcaagctgcggttcaagaagatcaaacctgaagccttcgaagccaacagattctacaccgtgatcaacaaaaagagcggcgagatcgtgcccatggaggtgaacttcaacttcgacgaccccaacctgatcatcctgcctctggcctttggcaagagacagggcagagaattcatctggaacgacctgctgtccctggaaaccggcagcctgaagctggccaacggaagagtgatcgagaagacactgtacaacagaagaacccggcaggatgagcctgccctgttcgtggccctgaccttcgagcggcgggaggtcctggactcctccaatatcaaaccaatgaacctgatcggcgtggcaagaggcgaaaacatccccgccgtgatcgccctgaccgaccccgagggctgcccactgagccggtttaaggatagcctgggaaacccaacccacatcctgagaatcggcgagagctataaggagaagcagcggaccatccaggccaagaaggaggtggagcagcggagagccggcggctacagccggaagtacgccagcaaagccaagaatctggcagacgatatggtgagaaacaccgctagagatctgctgtactacgccgtgacccaggatgccatgctgatcttcgccaacctgagccggggcttcggccggcagggcaagcggaccttcatggccgagagacagtacacacggatggaggactggctgaccgccaagctggcctacgagggcctgagcaagacctacctgtccaagacactggcccagtacacctccaagacatgcagcaactgtgggtttaccatcaccagcgccgactacgacagggtgctggagaagctgaagaagacagcaacaggctggatgaccacaattaacggcaaggagctgaaggtggagggccagattacctactacaacagatacaagagacagaacgtagtcaaggacctgtccgtcgagctggatagactgagcgaagaatctgtgaacaacgacatctcctcctggacaaagggcagaagcggagaagctctgagcctcctgaagaaaagattctcccatagacccgtgcaggagaagttcgtgtgcctgaactgcggcttcgagacacacgcagccgagcaagccgccctgaacatcgccagatcctggctgttcctgcggagccaggagtacaagaaataccagacaaacaagacaaccggcaacaccgataagagagccttcgtcgagacctggcagtccttttaccggaagaagcttaaggaggtgtggaaacctgccgtgcggtctggcggatctggcggaggctccacaagcagccagagcctggtgaccttcggcgacgtggccgtggacttcagccaggaggagtgggagtggctgaacagcgcccagaggaacctgtacaggagcgtgatgctggagaactacaggaacctggtgagcctgggcctgtgcgtgagcaagcccgacgtgatcagcagcctggagcagaggaaggagccctggatggtgaagaggaagctgaccaggggcaggtgccccgacctgaagaccgtgaccagccccaagaaaaagagaaaagtctaagctgccttctgcggggcttgccttctggccatgcccttcttctctcccttgcacctgtacctcttggtctttgaataaagcctgagtaggaaggctagcaaaaaaaaaaaaaaaaaaaaaaaaaaaaaaaaaaaaaaaaaaaaaaaaaaaaaaaaaaaaaaaaaaaaaaaaaaaaaaaa

SEQ ID NO: 6210 - RNA, 5797 nt, synthetic construct
  source 1..5797: mol_type = other RNA
aggaaataagagagaaaagaagagtaagaagaaatataagagccaccatggcccctaagaagaagcgtaaagtgagccggatggaacgcctcgtctacgaggtgcggcagaagtgcagaaacatcgaggacatctgcatctcctgcggatctctgaacgtgaccctggagcacccactgttcatcggcggcatgtgccagaactgtaaaaactgttttctggagtgtgcctatcaatacgacgatgacggctaccagagctactgcaccatctgttgcggcggaagagaggtgctgatgtgtggaaataacaactgctgccggtgcttctgcgtggaatgcgtggacctgctggtgggccccggcgccgcccaggccgctattaaggaagatccttggaactgctacatgtgcggccacaagggcacatacggcctgctgagacggagagaggactggcctagcagactgcagatgttcttcgccaataaccacgaccaggagttcgacccccctaaggtgtaccctcccgtccccgccgagaagagaaagcccatccgggtcctgagcctgttcgatggcatcgccaccggtctgctggtgctgaaggacctgggcatccaggtggataggtacattgcctccgaggtgtgcgaggactccatcaccgtgggaatggtgcgtcatcagggcaagatcatgtacgtgggcgacgtgcggagcgtgacacagaagcatatccaggagtggggccctttcgacctggtgatcggcggcagcccttgcaatgacctgagcatcgtgaacccagcccggaagggcctgtacgagggaaccggcagactgttcttcgagttttacagactgctgcacgacgcccggcctaaggaaggcgacgaccggcccttcttttggctgttcgagaatgtggtggccatgggagtcagcgacaagcgggatattagccggttcctggagagcaaccccgtgatgatcgatgccaaggaagtgagcgccgcccaccgggccagatacttctggggcaatctgcctggcatgaacagacccctggccagcaccgtgaacgacaagctggagctgcaggagtgcctggagcacggccggatcgccaagttcagcaaggtgagaaccatcaccacccgaagcaacagcatcaaacaaggcaaggaccagcactttcctgtgttcatgaacgagaaggaggacatcctgtggtgtaccgagatggagagagtgttcgggttcccagtccactacacagatgtcagcaacatgtctagactggccagacagagactgctgggaagaagctggtccgtccctgtgatcagacacctgttcgcccctctgaaggagtacttcgcctgcgtgagcagcggcaacagcaacgccaacagccggggccccagcttctctagcggcctggtgccactgtccctgagagggagccacatgggccccatggagatctacaaaaccgtgagcgcctggaagcggcagcctgtgcgcgtgctgagcctgtttcggaatatcgataaagtcctgaaaagcctgggattcctggagagcggctctggctccggcggtggcaccctgaagtacgtggaggatgtgacaaacgtggtcagacgggatgtggagaagtggggccccttcgatctggtgtacggcagcacccaacccctgggcagctcttgtgaccggtgccctggctggtacatgtttcagttccaccggatcctgcagtacgccctgccgagacaggagtcccagcggccattcttttggattttcatggacaacttgctgctgaccgaggatgaccaggaaactaccactcggttcctgcagaccgaagccgtgaccctgcaggacgtgagaggccgggactaccagaacgccatgcgggtgtggtccaacatccctggactgaaaagcaagcacgcacctctgacccctaaagaagaggagtacctgcaggcccaggtgcggagcagaagcaagctggacgcccctaaggtggatctgctggtgaagaattgcctcctgcccctgagagagtacttcaagtatttcagccagaatagtctgcccctgggcggcccaagcagcggcgcccctcctcccagcggcggcagcccagccggctccccaacctctaccgaggagggcacctctgagtccgccacccccgagagcggccctggcacctccaccgagcccagcgagggcagcgcacccggcagccctgccggcagccccacctccacagaggagggaaccagcaccgagcccagcgaaggcagcgccccaggcaccagcaccgagcctagtgagggcggctctggcggcggcagcgcccaggagattaaacggatcaacaagatcagaagaagacttgtgaaagacagcaacaccaagaaggccggcaagacaggccccatgaaaaccctgctggttagagtgatgacacccgatctgagagagcggctggaaaacctgagaaagaagcctgaaaatatcccccagcccatcagcaatacatctagagccaacctgaataagctgctgaccgattacaccgaaatgaagaaggcgatcctgcatgtgtactgggaagagttccagaaggaccctgtgggcctgatgagccgggtggcccagcctgccagcaagaagatcgatcagaacaagctgaaacctgagatggacgagaagggcaacctgaccaccgccggctttgcctgctctcagtgtggccagcccctgttcgtgtacaagctggagcaggtgtctgagaagggcaaggcttacaccaactacttcggacggtgcaatgtggccgagcacgaaaagctgatcctgctggcccagctgaagcccgagaaggatagcgacgaagccgtgacatatagcctgggaaagtttgggcagagggccctggatttctacagcattcatgtgaccaaggagtccacccaccccgtgaagcccctggcccagatcgccggaaacagatacgcctccggacctgtgggaaaggccctgagcgacgcatgtatgggcacaatcgcctccttcctgtctaagtaccaggacatcatcatcgaacaccagaaggtggtgaagggcaaccagaagagactggagagcctgcgggagctggccggcaaggaaaacctggaataccctagcgtgaccctgccacctcagcctcacaccaaggagggcgttgatgcctacaacgaagtgatcgcccgggtgcgaatgtgggtgaacctgaacctgtggcagaagctgaagctaagcagagatgatgccaagcctctgctgagactgaagggattcccttcctttcctctggtcgagagacaggccaacgaagtggactggtgggacatggtgtgtaacgtgaagaagctgatcaacgagaaaaaggaggatggcaaggtgttttggcagaatctggctggctacaagagacaggaagccctgagaccatacctgagcagcgaggaagatcggaagaagggaaagaaattcgctcggtaccagctgggcgacctgctgctgcacctggaaaagaagcacggcgaggactggggaaaggtgtacgacgaggcctgggagcggattgacaagaaagtggaaggcctgagcaagcacatcaagctggaagaggaacggagaagcgaggacgcccagagcaaggccgccctgaccgactggctgcgggctaaggccagcttcgtgatcgagggcctgaaggaggccgacaaggacgagttctgcagatgcgagctgaagctgcagaagtggtacggggacctgcggggaaagcccttcgccatcgaagccgagaacagcatcctggacatcagcggcttcagcaagcagtacaactgtgccttcatctggcagaaggacggcgtgaagaagctgaacctgtacctgatcatcaactacttcaagggcggcaagctgcggttcaagaagatcaaacctgaagccttcgaagccaacagattctacaccgtgatcaacaaaaagagcggcgagatcgtgcccatggaggtgaacttcaacttcgacgaccccaacctgatcatcctgcctctggcctttggcaagagacagggcagagaattcatctggaacgacctgctgtccctggaaaccggcagcctgaagctggccaacggaagagtgatcgagaagacactgtacaacagaagaacccggcaggatgagcctgccctgttcgtggccctgaccttcgagcggcgggaggtcctggactcctccaatatcaaaccaatgaacctgatcggcgtggcaagaggcgaaaacatccccgccgtgatcgccctgaccgaccccgagggctgcccactgagccggtttaaggatagcctgggaaacccaacccacatcctgagaatcggcgagagctataaggagaagcagcggaccatccaggccaagaaggaggtggagcagcggagagccggcggctacagccggaagtacgccagcaaagccaagaatctggcagacgatatggtgagaaacaccgctagagatctgctgtactacgccgtgacccaggatgccatgctgatcttcgccaacctgagccggggcttcggccggcagggcaagcggaccttcatggccgagagacagtacacacggatggaggactggctgaccgccaagctggcctacgagggcctgagcaagacctacctgtccaagacactggcccagtacacctccaagacatgcagcaactgtgggtttaccatcaccagcgccgactacgacagggtgctggagaagctgaagaagacagcaacaggctggatgaccacaattaacggcaaggagctgaaggtggagggccagattacctactacaacagatacaagagacagaacgtagtcaaggacctgtccgtcgagctggatagactgagcgaagaatctgtgaacaacgacatctcctcctggacaaagggcagaagcggagaagctctgagcctcctgaagaaaagattctcccatagacccgtgcaggagaagttcgtgtgcctgaactgcggcttcgagacacacgcagccgagcaagccgccctgaacatcgccagatcctggctgttcctgcggagccaggagtacaagaaataccagacaaacaagacaaccggcaacaccgataagagagccttcgtcgagacctggcagtccttttaccggaagaagcttaaggaggtgtggaaacctgccgtgcggtctggcggatctggcggaggctccacaagcgcccaggagagcgtgatgttcagcgacgtgagcatcgacttcagccaggaggagtgggagtgcctgaacgacgaccagagggccctgtacagggacgtgatgctggagaactacagcaacctggtgagcatggccggccacagcatcagcaagcccgacgtgatcagcttcctggagcagggcaaggagccctggctggtggacagggagctgaccaggggccagtggcccgtgctggagagcaccagccccaagaaaaagagaaaagtctaagctgccttctgcggggcttgccttctggccatgcccttcttctctcccttgcacctgtacctcttggtctttgaataaagcctgagtaggaaggctagcaaaaaaaaaaaaaaaaaaaaaaaaaaaaaaaaaaaaaaaaaaaaaaaaaaaaaaaaaaaaaaaaaaaaaaaaaaaaaaaa

SEQ ID NO: 6211 - RNA, 5797 nt, synthetic construct
  source 1..5797: mol_type = other RNA
aggaaataagagagaaaagaagagtaagaagaaatataagagccaccatggcccctaagaagaagcgtaaagtgagccggatggaacgcctcgtctacgaggtgcggcagaagtgcagaaacatcgaggacatctgcatctcctgcggatctctgaacgtgaccctggagcacccactgttcatcggcggcatgtgccagaactgtaaaaactgttttctggagtgtgcctatcaatacgacgatgacggctaccagagctactgcaccatctgttgcggcggaagagaggtgctgatgtgtggaaataacaactgctgccggtgcttctgcgtggaatgcgtggacctgctggtgggccccggcgccgcccaggccgctattaaggaagatccttggaactgctacatgtgcggccacaagggcacatacggcctgctgagacggagagaggactggcctagcagactgcagatgttcttcgccaataaccacgaccaggagttcgacccccctaaggtgtaccctcccgtccccgccgagaagagaaagcccatccgggtcctgagcctgttcgatggcatcgccaccggtctgctggtgctgaaggacctgggcatccaggtggataggtacattgcctccgaggtgtgcgaggactccatcaccgtgggaatggtgcgtcatcagggcaagatcatgtacgtgggcgacgtgcggagcgtgacacagaagcatatccaggagtggggccctttcgacctggtgatcggcggcagcccttgcaatgacctgagcatcgtgaacccagcccggaagggcctgtacgagggaaccggcagactgttcttcgagttttacagactgctgcacgacgcccggcctaaggaaggcgacgaccggcccttcttttggctgttcgagaatgtggtggccatgggagtcagcgacaagcgggatattagccggttcctggagagcaaccccgtgatgatcgatgccaaggaagtgagcgccgcccaccgggccagatacttctggggcaatctgcctggcatgaacagacccctggccagcaccgtgaacgacaagctggagctgcaggagtgcctggagcacggccggatcgccaagttcagcaaggtgagaaccatcaccacccgaagcaacagcatcaaacaaggcaaggaccagcactttcctgtgttcatgaacgagaaggaggacatcctgtggtgtaccgagatggagagagtgttcgggttcccagtccactacacagatgtcagcaacatgtctagactggccagacagagactgctgggaagaagctggtccgtccctgtgatcagacacctgttcgcccctctgaaggagtacttcgcctgcgtgagcagcggcaacagcaacgccaacagccggggccccagcttctctagcggcctggtgccactgtccctgagagggagccacatgggccccatggagatctacaaaaccgtgagcgcctggaagcggcagcctgtgcgcgtgctgagcctgtttcggaatatcgataaagtcctgaaaagcctgggattcctggagagcggctctggctccggcggtggcaccctgaagtacgtggaggatgtgacaaacgtggtcagacgggatgtggagaagtggggccccttcgatctggtgtacggcagcacccaacccctgggcagctcttgtgaccggtgccctggctggtacatgtttcagttccaccggatcctgcagtacgccctgccgagacaggagtcccagcggccattcttttggattttcatggacaacttgctgctgaccgaggatgaccaggaaactaccactcggttcctgcagaccgaagccgtgaccctgcaggacgtgagaggccgggactaccagaacgccatgcgggtgtggtccaacatccctggactgaaaagcaagcacgcacctctgacccctaaagaagaggagtacctgcaggcccaggtgcggagcagaagcaagctggacgcccctaaggtggatctgctggtgaagaattgcctcctgcccctgagagagtacttcaagtatttcagccagaatagtctgcccctgggcggcccaagcagcggcgcccctcctcccagcggcggcagcccagccggctccccaacctctaccgaggagggcacctctgagtccgccacccccgagagcggccctggcacctccaccgagcccagcgagggcagcgcacccggcagccctgccggcagccccacctccacagaggagggaaccagcaccgagcccagcgaaggcagcgccccaggcaccagcaccgagcctagtgagggcggctctggcggcggcagcgcccaggagattaaacggatcaacaagatcagaagaagacttgtgaaagacagcaacaccaagaaggccggcaagacaggccccatgaaaaccctgctggttagagtgatgacacccgatctgagagagcggctggaaaacctgagaaagaagcctgaaaatatcccccagcccatcagcaatacatctagagccaacctgaataagctgctgaccgattacaccgaaatgaagaaggcgatcctgcatgtgtactgggaagagttccagaaggaccctgtgggcctgatgagccgggtggcccagcctgccagcaagaagatcgatcagaacaagctgaaacctgagatggacgagaagggcaacctgaccaccgccggctttgcctgctctcagtgtggccagcccctgttcgtgtacaagctggagcaggtgtctgagaagggcaaggcttacaccaactacttcggacggtgcaatgtggccgagcacgaaaagctgatcctgctggcccagctgaagcccgagaaggatagcgacgaagccgtgacatatagcctgggaaagtttgggcagagggccctggatttctacagcattcatgtgaccaaggagtccacccaccccgtgaagcccctggcccagatcgccggaaacagatacgcctccggacctgtgggaaaggccctgagcgacgcatgtatgggcacaatcgcctccttcctgtctaagtaccaggacatcatcatcgaacaccagaaggtggtgaagggcaaccagaagagactggagagcctgcgggagctggccggcaaggaaaacctggaataccctagcgtgaccctgccacctcagcctcacaccaaggagggcgttgatgcctacaacgaagtgatcgcccgggtgcgaatgtgggtgaacctgaacctgtggcagaagctgaagctaagcagagatgatgccaagcctctgctgagactgaagggattcccttcctttcctctggtcgagagacaggccaacgaagtggactggtgggacatggtgtgtaacgtgaagaagctgatcaacgagaaaaaggaggatggcaaggtgttttggcagaatctggctggctacaagagacaggaagccctgagaccatacctgagcagcgaggaagatcggaagaagggaaagaaattcgctcggtaccagctgggcgacctgctgctgcacctggaaaagaagcacggcgaggactggggaaaggtgtacgacgaggcctgggagcggattgacaagaaagtggaaggcctgagcaagcacatcaagctggaagaggaacggagaagcgaggacgcccagagcaaggccgccctgaccgactggctgcgggctaaggccagcttcgtgatcgagggcctgaaggaggccgacaaggacgagttctgcagatgcgagctgaagctgcagaagtggtacggggacctgcggggaaagcccttcgccatcgaagccgagaacagcatcctggacatcagcggcttcagcaagcagtacaactgtgccttcatctggcagaaggacggcgtgaagaagctgaacctgtacctgatcatcaactacttcaagggcggcaagctgcggttcaagaagatcaaacctgaagccttcgaagccaacagattctacaccgtgatcaacaaaaagagcggcgagatcgtgcccatggaggtgaacttcaacttcgacgaccccaacctgatcatcctgcctctggcctttggcaagagacagggcagagaattcatctggaacgacctgctgtccctggaaaccggcagcctgaagctggccaacggaagagtgatcgagaagacactgtacaacagaagaacccggcaggatgagcctgccctgttcgtggccctgaccttcgagcggcgggaggtcctggactcctccaatatcaaaccaatgaacctgatcggcgtggcaagaggcgaaaacatccccgccgtgatcgccctgaccgaccccgagggctgcccactgagccggtttaaggatagcctgggaaacccaacccacatcctgagaatcggcgagagctataaggagaagcagcggaccatccaggccaagaaggaggtggagcagcggagagccggcggctacagccggaagtacgccagcaaagccaagaatctggcagacgatatggtgagaaacaccgctagagatctgctgtactacgccgtgacccaggatgccatgctgatcttcgccaacctgagccggggcttcggccggcagggcaagcggaccttcatggccgagagacagtacacacggatggaggactggctgaccgccaagctggcctacgagggcctgagcaagacctacctgtccaagacactggcccagtacacctccaagacatgcagcaactgtgggtttaccatcaccagcgccgactacgacagggtgctggagaagctgaagaagacagcaacaggctggatgaccacaattaacggcaaggagctgaaggtggagggccagattacctactacaacagatacaagagacagaacgtagtcaaggacctgtccgtcgagctggatagactgagcgaagaatctgtgaacaacgacatctcctcctggacaaagggcagaagcggagaagctctgagcctcctgaagaaaagattctcccatagacccgtgcaggagaagttcgtgtgcctgaactgcggcttcgagacacacgcagccgagcaagccgccctgaacatcgccagatcctggctgttcctgcggagccaggagtacaagaaataccagacaaacaagacaaccggcaacaccgataagagagccttcgtcgagacctggcagtccttttaccggaagaagcttaaggaggtgtggaaacctgccgtgcggtctggcggatctggcggaggctccacaagcgcccaccacctggtgatgttcagggacgtggccgtggacttcagccaggacgagtgggagtgcctgaacagctaccagaggaacctgtacagggacgtgatcctggagaactacagcaacctggtgagcgtggccggctgcagcatcagcaagcccgacgtgatcaccctgctggagcagggcagggagccctggatggtggtgagggacgagaggaggaggaggaccctggacctggagagcaccagccccaagaaaaagagaaaagtctaagctgccttctgcggggcttgccttctggccatgcccttcttctctcccttgcacctgtacctcttggtctttgaataaagcctgagtaggaaggctagcaaaaaaaaaaaaaaaaaaaaaaaaaaaaaaaaaaaaaaaaaaaaaaaaaaaaaaaaaaaaaaaaaaaaaaaaaaaaaaaa

SEQ ID NO: 6212 - RNA, 5797 nt, synthetic construct
  source 1..5797: mol_type = other RNA
aggaaataagagagaaaagaagagtaagaagaaatataagagccaccatggcccctaagaagaagcgtaaagtgagccggatggaacgcctcgtctacgaggtgcggcagaagtgcagaaacatcgaggacatctgcatctcctgcggatctctgaacgtgaccctggagcacccactgttcatcggcggcatgtgccagaactgtaaaaactgttttctggagtgtgcctatcaatacgacgatgacggctaccagagctactgcaccatctgttgcggcggaagagaggtgctgatgtgtggaaataacaactgctgccggtgcttctgcgtggaatgcgtggacctgctggtgggccccggcgccgcccaggccgctattaaggaagatccttggaactgctacatgtgcggccacaagggcacatacggcctgctgagacggagagaggactggcctagcagactgcagatgttcttcgccaataaccacgaccaggagttcgacccccctaaggtgtaccctcccgtccccgccgagaagagaaagcccatccgggtcctgagcctgttcgatggcatcgccaccggtctgctggtgctgaaggacctgggcatccaggtggataggtacattgcctccgaggtgtgcgaggactccatcaccgtgggaatggtgcgtcatcagggcaagatcatgtacgtgggcgacgtgcggagcgtgacacagaagcatatccaggagtggggccctttcgacctggtgatcggcggcagcccttgcaatgacctgagcatcgtgaacccagcccggaagggcctgtacgagggaaccggcagactgttcttcgagttttacagactgctgcacgacgcccggcctaaggaaggcgacgaccggcccttcttttggctgttcgagaatgtggtggccatgggagtcagcgacaagcgggatattagccggttcctggagagcaaccccgtgatgatcgatgccaaggaagtgagcgccgcccaccgggccagatacttctggggcaatctgcctggcatgaacagacccctggccagcaccgtgaacgacaagctggagctgcaggagtgcctggagcacggccggatcgccaagttcagcaaggtgagaaccatcaccacccgaagcaacagcatcaaacaaggcaaggaccagcactttcctgtgttcatgaacgagaaggaggacatcctgtggtgtaccgagatggagagagtgttcgggttcccagtccactacacagatgtcagcaacatgtctagactggccagacagagactgctgggaagaagctggtccgtccctgtgatcagacacctgttcgcccctctgaaggagtacttcgcctgcgtgagcagcggcaacagcaacgccaacagccggggccccagcttctctagcggcctggtgccactgtccctgagagggagccacatgggccccatggagatctacaaaaccgtgagcgcctggaagcggcagcctgtgcgcgtgctgagcctgtttcggaatatcgataaagtcctgaaaagcctgggattcctggagagcggctctggctccggcggtggcaccctgaagtacgtggaggatgtgacaaacgtggtcagacgggatgtggagaagtggggccccttcgatctggtgtacggcagcacccaacccctgggcagctcttgtgaccggtgccctggctggtacatgtttcagttccaccggatcctgcagtacgccctgccgagacaggagtcccagcggccattcttttggattttcatggacaacttgctgctgaccgaggatgaccaggaaactaccactcggttcctgcagaccgaagccgtgaccctgcaggacgtgagaggccgggactaccagaacgccatgcgggtgtggtccaacatccctggactgaaaagcaagcacgcacctctgacccctaaagaagaggagtacctgcaggcccaggtgcggagcagaagcaagctggacgcccctaaggtggatctgctggtgaagaattgcctcctgcccctgagagagtacttcaagtatttcagccagaatagtctgcccctgggcggcccaagcagcggcgcccctcctcccagcggcggcagcccagccggctccccaacctctaccgaggagggcacctctgagtccgccacccccgagagcggccctggcacctccaccgagcccagcgagggcagcgcacccggcagccctgccggcagccccacctccacagaggagggaaccagcaccgagcccagcgaaggcagcgccccaggcaccagcaccgagcctagtgagggcggctctggcggcggcagcgcccaggagattaaacggatcaacaagatcagaagaagacttgtgaaagacagcaacaccaagaaggccggcaagacaggccccatgaaaaccctgctggttagagtgatgacacccgatctgagagagcggctggaaaacctgagaaagaagcctgaaaatatcccccagcccatcagcaatacatctagagccaacctgaataagctgctgaccgattacaccgaaatgaagaaggcgatcctgcatgtgtactgggaagagttccagaaggaccctgtgggcctgatgagccgggtggcccagcctgccagcaagaagatcgatcagaacaagctgaaacctgagatggacgagaagggcaacctgaccaccgccggctttgcctgctctcagtgtggccagcccctgttcgtgtacaagctggagcaggtgtctgagaagggcaaggcttacaccaactacttcggacggtgcaatgtggccgagcacgaaaagctgatcctgctggcccagctgaagcccgagaaggatagcgacgaagccgtgacatatagcctgggaaagtttgggcagagggccctggatttctacagcattcatgtgaccaaggagtccacccaccccgtgaagcccctggcccagatcgccggaaacagatacgcctccggacctgtgggaaaggccctgagcgacgcatgtatgggcacaatcgcctccttcctgtctaagtaccaggacatcatcatcgaacaccagaaggtggtgaagggcaaccagaagagactggagagcctgcgggagctggccggcaaggaaaacctggaataccctagcgtgaccctgccacctcagcctcacaccaaggagggcgttgatgcctacaacgaagtgatcgcccgggtgcgaatgtgggtgaacctgaacctgtggcagaagctgaagctaagcagagatgatgccaagcctctgctgagactgaagggattcccttcctttcctctggtcgagagacaggccaacgaagtggactggtgggacatggtgtgtaacgtgaagaagctgatcaacgagaaaaaggaggatggcaaggtgttttggcagaatctggctggctacaagagacaggaagccctgagaccatacctgagcagcgaggaagatcggaagaagggaaagaaattcgctcggtaccagctgggcgacctgctgctgcacctggaaaagaagcacggcgaggactggggaaaggtgtacgacgaggcctgggagcggattgacaagaaagtggaaggcctgagcaagcacatcaagctggaagaggaacggagaagcgaggacgcccagagcaaggccgccctgaccgactggctgcgggctaaggccagcttcgtgatcgagggcctgaaggaggccgacaaggacgagttctgcagatgcgagctgaagctgcagaagtggtacggggacctgcggggaaagcccttcgccatcgaagccgagaacagcatcctggacatcagcggcttcagcaagcagtacaactgtgccttcatctggcagaaggacggcgtgaagaagctgaacctgtacctgatcatcaactacttcaagggcggcaagctgcggttcaagaagatcaaacctgaagccttcgaagccaacagattctacaccgtgatcaacaaaaagagcggcgagatcgtgcccatggaggtgaacttcaacttcgacgaccccaacctgatcatcctgcctctggcctttggcaagagacagggcagagaattcatctggaacgacctgctgtccctggaaaccggcagcctgaagctggccaacggaagagtgatcgagaagacactgtacaacagaagaacccggcaggatgagcctgccctgttcgtggccctgaccttcgagcggcgggaggtcctggactcctccaatatcaaaccaatgaacctgatcggcgtggcaagaggcgaaaacatccccgccgtgatcgccctgaccgaccccgagggctgcccactgagccggtttaaggatagcctgggaaacccaacccacatcctgagaatcggcgagagctataaggagaagcagcggaccatccaggccaagaaggaggtggagcagcggagagccggcggctacagccggaagtacgccagcaaagccaagaatctggcagacgatatggtgagaaacaccgctagagatctgctgtactacgccgtgacccaggatgccatgctgatcttcgccaacctgagccggggcttcggccggcagggcaagcggaccttcatggccgagagacagtacacacggatggaggactggctgaccgccaagctggcctacgagggcctgagcaagacctacctgtccaagacactggcccagtacacctccaagacatgcagcaactgtgggtttaccatcaccagcgccgactacgacagggtgctggagaagctgaagaagacagcaacaggctggatgaccacaattaacggcaaggagctgaaggtggagggccagattacctactacaacagatacaagagacagaacgtagtcaaggacctgtccgtcgagctggatagactgagcgaagaatctgtgaacaacgacatctcctcctggacaaagggcagaagcggagaagctctgagcctcctgaagaaaagattctcccatagacccgtgcaggagaagttcgtgtgcctgaactgcggcttcgagacacacgcagccgagcaagccgccctgaacatcgccagatcctggctgttcctgcggagccaggagtacaagaaataccagacaaacaagacaaccggcaacaccgataagagagccttcgtcgagacctggcagtccttttaccggaagaagcttaaggaggtgtggaaacctgccgtgcggtctggcggatctggcggaggctccacaagcgagcccgtgagcttcgaggaggtggccgtgtacttcagcagggaggagtgggccctgctggaccccgcccagagggccctgtacagggacgtgatgctggagacctacgagtgcgtggccagcctggcccccctgcccggccccaagcccatggtgatcagcctgctggaggagggcgaggagccctggatccccgacgtgggcagccccgaggccgtggccggcgacgtgagccccggcgagaccagccccaagaaaaagagaaaagtctaagctgccttctgcggggcttgccttctggccatgcccttcttctctcccttgcacctgtacctcttggtctttgaataaagcctgagtaggaaggctagcaaaaaaaaaaaaaaaaaaaaaaaaaaaaaaaaaaaaaaaaaaaaaaaaaaaaaaaaaaaaaaaaaaaaaaaaaaaaaaaa

SEQ ID NO: 6213 - RNA, 5797 nt, synthetic construct
  source 1..5797: mol_type = other RNA
aggaaataagagagaaaagaagagtaagaagaaatataagagccaccatggcccctaagaagaagcgtaaagtgagccggatggaacgcctcgtctacgaggtgcggcagaagtgcagaaacatcgaggacatctgcatctcctgcggatctctgaacgtgaccctggagcacccactgttcatcggcggcatgtgccagaactgtaaaaactgttttctggagtgtgcctatcaatacgacgatgacggctaccagagctactgcaccatctgttgcggcggaagagaggtgctgatgtgtggaaataacaactgctgccggtgcttctgcgtggaatgcgtggacctgctggtgggccccggcgccgcccaggccgctattaaggaagatccttggaactgctacatgtgcggccacaagggcacatacggcctgctgagacggagagaggactggcctagcagactgcagatgttcttcgccaataaccacgaccaggagttcgacccccctaaggtgtaccctcccgtccccgccgagaagagaaagcccatccgggtcctgagcctgttcgatggcatcgccaccggtctgctggtgctgaaggacctgggcatccaggtggataggtacattgcctccgaggtgtgcgaggactccatcaccgtgggaatggtgcgtcatcagggcaagatcatgtacgtgggcgacgtgcggagcgtgacacagaagcatatccaggagtggggccctttcgacctggtgatcggcggcagcccttgcaatgacctgagcatcgtgaacccagcccggaagggcctgtacgagggaaccggcagactgttcttcgagttttacagactgctgcacgacgcccggcctaaggaaggcgacgaccggcccttcttttggctgttcgagaatgtggtggccatgggagtcagcgacaagcgggatattagccggttcctggagagcaaccccgtgatgatcgatgccaaggaagtgagcgccgcccaccgggccagatacttctggggcaatctgcctggcatgaacagacccctggccagcaccgtgaacgacaagctggagctgcaggagtgcctggagcacggccggatcgccaagttcagcaaggtgagaaccatcaccacccgaagcaacagcatcaaacaaggcaaggaccagcactttcctgtgttcatgaacgagaaggaggacatcctgtggtgtaccgagatggagagagtgttcgggttcccagtccactacacagatgtcagcaacatgtctagactggccagacagagactgctgggaagaagctggtccgtccctgtgatcagacacctgttcgcccctctgaaggagtacttcgcctgcgtgagcagcggcaacagcaacgccaacagccggggccccagcttctctagcggcctggtgccactgtccctgagagggagccacatgggccccatggagatctacaaaaccgtgagcgcctggaagcggcagcctgtgcgcgtgctgagcctgtttcggaatatcgataaagtcctgaaaagcctgggattcctggagagcggctctggctccggcggtggcaccctgaagtacgtggaggatgtgacaaacgtggtcagacgggatgtggagaagtggggccccttcgatctggtgtacggcagcacccaacccctgggcagctcttgtgaccggtgccctggctggtacatgtttcagttccaccggatcctgcagtacgccctgccgagacaggagtcccagcggccattcttttggattttcatggacaacttgctgctgaccgaggatgaccaggaaactaccactcggttcctgcagaccgaagccgtgaccctgcaggacgtgagaggccgggactaccagaacgccatgcgggtgtggtccaacatccctggactgaaaagcaagcacgcacctctgacccctaaagaagaggagtacctgcaggcccaggtgcggagcagaagcaagctggacgcccctaaggtggatctgctggtgaagaattgcctcctgcccctgagagagtacttcaagtatttcagccagaatagtctgcccctgggcggcccaagcagcggcgcccctcctcccagcggcggcagcccagccggctccccaacctctaccgaggagggcacctctgagtccgccacccccgagagcggccctggcacctccaccgagcccagcgagggcagcgcacccggcagccctgccggcagccccacctccacagaggagggaaccagcaccgagcccagcgaaggcagcgccccaggcaccagcaccgagcctagtgagggcggctctggcggcggcagcgcccaggagattaaacggatcaacaagatcagaagaagacttgtgaaagacagcaacaccaagaaggccggcaagacaggccccatgaaaaccctgctggttagagtgatgacacccgatctgagagagcggctggaaaacctgagaaagaagcctgaaaatatcccccagcccatcagcaatacatctagagccaacctgaataagctgctgaccgattacaccgaaatgaagaaggcgatcctgcatgtgtactgggaagagttccagaaggaccctgtgggcctgatgagccgggtggcccagcctgccagcaagaagatcgatcagaacaagctgaaacctgagatggacgagaagggcaacctgaccaccgccggctttgcctgctctcagtgtggccagcccctgttcgtgtacaagctggagcaggtgtctgagaagggcaaggcttacaccaactacttcggacggtgcaatgtggccgagcacgaaaagctgatcctgctggcccagctgaagcccgagaaggatagcgacgaagccgtgacatatagcctgggaaagtttgggcagagggccctggatttctacagcattcatgtgaccaaggagtccacccaccccgtgaagcccctggcccagatcgccggaaacagatacgcctccggacctgtgggaaaggccctgagcgacgcatgtatgggcacaatcgcctccttcctgtctaagtaccaggacatcatcatcgaacaccagaaggtggtgaagggcaaccagaagagactggagagcctgcgggagctggccggcaaggaaaacctggaataccctagcgtgaccctgccacctcagcctcacaccaaggagggcgttgatgcctacaacgaagtgatcgcccgggtgcgaatgtgggtgaacctgaacctgtggcagaagctgaagctaagcagagatgatgccaagcctctgctgagactgaagggattcccttcctttcctctggtcgagagacaggccaacgaagtggactggtgggacatggtgtgtaacgtgaagaagctgatcaacgagaaaaaggaggatggcaaggtgttttggcagaatctggctggctacaagagacaggaagccctgagaccatacctgagcagcgaggaagatcggaagaagggaaagaaattcgctcggtaccagctgggcgacctgctgctgcacctggaaaagaagcacggcgaggactggggaaaggtgtacgacgaggcctgggagcggattgacaagaaagtggaaggcctgagcaagcacatcaagctggaagaggaacggagaagcgaggacgcccagagcaaggccgccctgaccgactggctgcgggctaaggccagcttcgtgatcgagggcctgaaggaggccgacaaggacgagttctgcagatgcgagctgaagctgcagaagtggtacggggacctgcggggaaagcccttcgccatcgaagccgagaacagcatcctggacatcagcggcttcagcaagcagtacaactgtgccttcatctggcagaaggacggcgtgaagaagctgaacctgtacctgatcatcaactacttcaagggcggcaagctgcggttcaagaagatcaaacctgaagccttcgaagccaacagattctacaccgtgatcaacaaaaagagcggcgagatcgtgcccatggaggtgaacttcaacttcgacgaccccaacctgatcatcctgcctctggcctttggcaagagacagggcagagaattcatctggaacgacctgctgtccctggaaaccggcagcctgaagctggccaacggaagagtgatcgagaagacactgtacaacagaagaacccggcaggatgagcctgccctgttcgtggccctgaccttcgagcggcgggaggtcctggactcctccaatatcaaaccaatgaacctgatcggcgtggcaagaggcgaaaacatccccgccgtgatcgccctgaccgaccccgagggctgcccactgagccggtttaaggatagcctgggaaacccaacccacatcctgagaatcggcgagagctataaggagaagcagcggaccatccaggccaagaaggaggtggagcagcggagagccggcggctacagccggaagtacgccagcaaagccaagaatctggcagacgatatggtgagaaacaccgctagagatctgctgtactacgccgtgacccaggatgccatgctgatcttcgccaacctgagccggggcttcggccggcagggcaagcggaccttcatggccgagagacagtacacacggatggaggactggctgaccgccaagctggcctacgagggcctgagcaagacctacctgtccaagacactggcccagtacacctccaagacatgcagcaactgtgggtttaccatcaccagcgccgactacgacagggtgctggagaagctgaagaagacagcaacaggctggatgaccacaattaacggcaaggagctgaaggtggagggccagattacctactacaacagatacaagagacagaacgtagtcaaggacctgtccgtcgagctggatagactgagcgaagaatctgtgaacaacgacatctcctcctggacaaagggcagaagcggagaagctctgagcctcctgaagaaaagattctcccatagacccgtgcaggagaagttcgtgtgcctgaactgcggcttcgagacacacgcagccgagcaagccgccctgaacatcgccagatcctggctgttcctgcggagccaggagtacaagaaataccagacaaacaagacaaccggcaacaccgataagagagccttcgtcgagacctggcagtccttttaccggaagaagcttaaggaggtgtggaaacctgccgtgcggtctggcggatctggcggaggctccacaagcaaggaggccttcgtggccttcggcgacgtggccgtggacttcacccaggaggagtggaggctgctgagccccgcccagaggaccctgcacagggaggtgatgctggagacctacaaccacctggtgagcctggagatccccttcagcaagcccaagctgatcagccagctggagaggggcgaggagccctggatcgaggagaggcagaggcccctgggcctgtgccccgccagcaggcccaccaccagccccaagaaaaagagaaaagtctaagctgccttctgcggggcttgccttctggccatgcccttcttctctcccttgcacctgtacctcttggtctttgaataaagcctgagtaggaaggctagcaaaaaaaaaaaaaaaaaaaaaaaaaaaaaaaaaaaaaaaaaaaaaaaaaaaaaaaaaaaaaaaaaaaaaaaaaaaaaaaa

SEQ ID NO: 6214 - RNA, 5797 nt, synthetic construct
  source 1..5797: mol_type = other RNA
aggaaataagagagaaaagaagagtaagaagaaatataagagccaccatggcccctaagaagaagcgtaaagtgagccggatggaacgcctcgtctacgaggtgcggcagaagtgcagaaacatcgaggacatctgcatctcctgcggatctctgaacgtgaccctggagcacccactgttcatcggcggcatgtgccagaactgtaaaaactgttttctggagtgtgcctatcaatacgacgatgacggctaccagagctactgcaccatctgttgcggcggaagagaggtgctgatgtgtggaaataacaactgctgccggtgcttctgcgtggaatgcgtggacctgctggtgggccccggcgccgcccaggccgctattaaggaagatccttggaactgctacatgtgcggccacaagggcacatacggcctgctgagacggagagaggactggcctagcagactgcagatgttcttcgccaataaccacgaccaggagttcgacccccctaaggtgtaccctcccgtccccgccgagaagagaaagcccatccgggtcctgagcctgttcgatggcatcgccaccggtctgctggtgctgaaggacctgggcatccaggtggataggtacattgcctccgaggtgtgcgaggactccatcaccgtgggaatggtgcgtcatcagggcaagatcatgtacgtgggcgacgtgcggagcgtgacacagaagcatatccaggagtggggccctttcgacctggtgatcggcggcagcccttgcaatgacctgagcatcgtgaacccagcccggaagggcctgtacgagggaaccggcagactgttcttcgagttttacagactgctgcacgacgcccggcctaaggaaggcgacgaccggcccttcttttggctgttcgagaatgtggtggccatgggagtcagcgacaagcgggatattagccggttcctggagagcaaccccgtgatgatcgatgccaaggaagtgagcgccgcccaccgggccagatacttctggggcaatctgcctggcatgaacagacccctggccagcaccgtgaacgacaagctggagctgcaggagtgcctggagcacggccggatcgccaagttcagcaaggtgagaaccatcaccacccgaagcaacagcatcaaacaaggcaaggaccagcactttcctgtgttcatgaacgagaaggaggacatcctgtggtgtaccgagatggagagagtgttcgggttcccagtccactacacagatgtcagcaacatgtctagactggccagacagagactgctgggaagaagctggtccgtccctgtgatcagacacctgttcgcccctctgaaggagtacttcgcctgcgtgagcagcggcaacagcaacgccaacagccggggccccagcttctctagcggcctggtgccactgtccctgagagggagccacatgggccccatggagatctacaaaaccgtgagcgcctggaagcggcagcctgtgcgcgtgctgagcctgtttcggaatatcgataaagtcctgaaaagcctgggattcctggagagcggctctggctccggcggtggcaccctgaagtacgtggaggatgtgacaaacgtggtcagacgggatgtggagaagtggggccccttcgatctggtgtacggcagcacccaacccctgggcagctcttgtgaccggtgccctggctggtacatgtttcagttccaccggatcctgcagtacgccctgccgagacaggagtcccagcggccattcttttggattttcatggacaacttgctgctgaccgaggatgaccaggaaactaccactcggttcctgcagaccgaagccgtgaccctgcaggacgtgagaggccgggactaccagaacgccatgcgggtgtggtccaacatccctggactgaaaagcaagcacgcacctctgacccctaaagaagaggagtacctgcaggcccaggtgcggagcagaagcaagctggacgcccctaaggtggatctgctggtgaagaattgcctcctgcccctgagagagtacttcaagtatttcagccagaatagtctgcccctgggcggcccaagcagcggcgcccctcctcccagcggcggcagcccagccggctccccaacctctaccgaggagggcacctctgagtccgccacccccgagagcggccctggcacctccaccgagcccagcgagggcagcgcacccggcagccctgccggcagccccacctccacagaggagggaaccagcaccgagcccagcgaaggcagcgccccaggcaccagcaccgagcctagtgagggcggctctggcggcggcagcgcccaggagattaaacggatcaacaagatcagaagaagacttgtgaaagacagcaacaccaagaaggccggcaagacaggccccatgaaaaccctgctggttagagtgatgacacccgatctgagagagcggctggaaaacctgagaaagaagcctgaaaatatcccccagcccatcagcaatacatctagagccaacctgaataagctgctgaccgattacaccgaaatgaagaaggcgatcctgcatgtgtactgggaagagttccagaaggaccctgtgggcctgatgagccgggtggcccagcctgccagcaagaagatcgatcagaacaagctgaaacctgagatggacgagaagggcaacctgaccaccgccggctttgcctgctctcagtgtggccagcccctgttcgtgtacaagctggagcaggtgtctgagaagggcaaggcttacaccaactacttcggacggtgcaatgtggccgagcacgaaaagctgatcctgctggcccagctgaagcccgagaaggatagcgacgaagccgtgacatatagcctgggaaagtttgggcagagggccctggatttctacagcattcatgtgaccaaggagtccacccaccccgtgaagcccctggcccagatcgccggaaacagatacgcctccggacctgtgggaaaggccctgagcgacgcatgtatgggcacaatcgcctccttcctgtctaagtaccaggacatcatcatcgaacaccagaaggtggtgaagggcaaccagaagagactggagagcctgcgggagctggccggcaaggaaaacctggaataccctagcgtgaccctgccacctcagcctcacaccaaggagggcgttgatgcctacaacgaagtgatcgcccgggtgcgaatgtgggtgaacctgaacctgtggcagaagctgaagctaagcagagatgatgccaagcctctgctgagactgaagggattcccttcctttcctctggtcgagagacaggccaacgaagtggactggtgggacatggtgtgtaacgtgaagaagctgatcaacgagaaaaaggaggatggcaaggtgttttggcagaatctggctggctacaagagacaggaagccctgagaccatacctgagcagcgaggaagatcggaagaagggaaagaaattcgctcggtaccagctgggcgacctgctgctgcacctggaaaagaagcacggcgaggactggggaaaggtgtacgacgaggcctgggagcggattgacaagaaagtggaaggcctgagcaagcacatcaagctggaagaggaacggagaagcgaggacgcccagagcaaggccgccctgaccgactggctgcgggctaaggccagcttcgtgatcgagggcctgaaggaggccgacaaggacgagttctgcagatgcgagctgaagctgcagaagtggtacggggacctgcggggaaagcccttcgccatcgaagccgagaacagcatcctggacatcagcggcttcagcaagcagtacaactgtgccttcatctggcagaaggacggcgtgaagaagctgaacctgtacctgatcatcaactacttcaagggcggcaagctgcggttcaagaagatcaaacctgaagccttcgaagccaacagattctacaccgtgatcaacaaaaagagcggcgagatcgtgcccatggaggtgaacttcaacttcgacgaccccaacctgatcatcctgcctctggcctttggcaagagacagggcagagaattcatctggaacgacctgctgtccctggaaaccggcagcctgaagctggccaacggaagagtgatcgagaagacactgtacaacagaagaacccggcaggatgagcctgccctgttcgtggccctgaccttcgagcggcgggaggtcctggactcctccaatatcaaaccaatgaacctgatcggcgtggcaagaggcgaaaacatccccgccgtgatcgccctgaccgaccccgagggctgcccactgagccggtttaaggatagcctgggaaacccaacccacatcctgagaatcggcgagagctataaggagaagcagcggaccatccaggccaagaaggaggtggagcagcggagagccggcggctacagccggaagtacgccagcaaagccaagaatctggcagacgatatggtgagaaacaccgctagagatctgctgtactacgccgtgacccaggatgccatgctgatcttcgccaacctgagccggggcttcggccggcagggcaagcggaccttcatggccgagagacagtacacacggatggaggactggctgaccgccaagctggcctacgagggcctgagcaagacctacctgtccaagacactggcccagtacacctccaagacatgcagcaactgtgggtttaccatcaccagcgccgactacgacagggtgctggagaagctgaagaagacagcaacaggctggatgaccacaattaacggcaaggagctgaaggtggagggccagattacctactacaacagatacaagagacagaacgtagtcaaggacctgtccgtcgagctggatagactgagcgaagaatctgtgaacaacgacatctcctcctggacaaagggcagaagcggagaagctctgagcctcctgaagaaaagattctcccatagacccgtgcaggagaagttcgtgtgcctgaactgcggcttcgagacacacgcagccgagcaagccgccctgaacatcgccagatcctggctgttcctgcggagccaggagtacaagaaataccagacaaacaagacaaccggcaacaccgataagagagccttcgtcgagacctggcagtccttttaccggaagaagcttaaggaggtgtggaaacctgccgtgcggtctggcggatctggcggaggctccacaagcccccaggagagcgtgaccttcaaggacatcgccgtggacttcacccaggaggagtgggccctgctggacaccagccagaggaagctgtacagggacgtgatgctggagaacatcagccacctggtgagcgtgggctaccacctgtgcaagagcgacgtggtgagccagctggagcagggcgtggagctgtggagggagggcaggggcttcccccagggccccaaccccgacaggaagagcggcaccagccccaagaaaaagagaaaagtctaagctgccttctgcggggcttgccttctggccatgcccttcttctctcccttgcacctgtacctcttggtctttgaataaagcctgagtaggaaggctagcaaaaaaaaaaaaaaaaaaaaaaaaaaaaaaaaaaaaaaaaaaaaaaaaaaaaaaaaaaaaaaaaaaaaaaaaaaaaaaaa

SEQ ID NO: 6215 - RNA, 5797 nt, synthetic construct
  source 1..5797: mol_type = other RNA
aggaaataagagagaaaagaagagtaagaagaaatataagagccaccatggcccctaagaagaagcgtaaagtgagccggatggaacgcctcgtctacgaggtgcggcagaagtgcagaaacatcgaggacatctgcatctcctgcggatctctgaacgtgaccctggagcacccactgttcatcggcggcatgtgccagaactgtaaaaactgttttctggagtgtgcctatcaatacgacgatgacggctaccagagctactgcaccatctgttgcggcggaagagaggtgctgatgtgtggaaataacaactgctgccggtgcttctgcgtggaatgcgtggacctgctggtgggccccggcgccgcccaggccgctattaaggaagatccttggaactgctacatgtgcggccacaagggcacatacggcctgctgagacggagagaggactggcctagcagactgcagatgttcttcgccaataaccacgaccaggagttcgacccccctaaggtgtaccctcccgtccccgccgagaagagaaagcccatccgggtcctgagcctgttcgatggcatcgccaccggtctgctggtgctgaaggacctgggcatccaggtggataggtacattgcctccgaggtgtgcgaggactccatcaccgtgggaatggtgcgtcatcagggcaagatcatgtacgtgggcgacgtgcggagcgtgacacagaagcatatccaggagtggggccctttcgacctggtgatcggcggcagcccttgcaatgacctgagcatcgtgaacccagcccggaagggcctgtacgagggaaccggcagactgttcttcgagttttacagactgctgcacgacgcccggcctaaggaaggcgacgaccggcccttcttttggctgttcgagaatgtggtggccatgggagtcagcgacaagcgggatattagccggttcctggagagcaaccccgtgatgatcgatgccaaggaagtgagcgccgcccaccgggccagatacttctggggcaatctgcctggcatgaacagacccctggccagcaccgtgaacgacaagctggagctgcaggagtgcctggagcacggccggatcgccaagttcagcaaggtgagaaccatcaccacccgaagcaacagcatcaaacaaggcaaggaccagcactttcctgtgttcatgaacgagaaggaggacatcctgtggtgtaccgagatggagagagtgttcgggttcccagtccactacacagatgtcagcaacatgtctagactggccagacagagactgctgggaagaagctggtccgtccctgtgatcagacacctgttcgcccctctgaaggagtacttcgcctgcgtgagcagcggcaacagcaacgccaacagccggggccccagcttctctagcggcctggtgccactgtccctgagagggagccacatgggccccatggagatctacaaaaccgtgagcgcctggaagcggcagcctgtgcgcgtgctgagcctgtttcggaatatcgataaagtcctgaaaagcctgggattcctggagagcggctctggctccggcggtggcaccctgaagtacgtggaggatgtgacaaacgtggtcagacgggatgtggagaagtggggccccttcgatctggtgtacggcagcacccaacccctgggcagctcttgtgaccggtgccctggctggtacatgtttcagttccaccggatcctgcagtacgccctgccgagacaggagtcccagcggccattcttttggattttcatggacaacttgctgctgaccgaggatgaccaggaaactaccactcggttcctgcagaccgaagccgtgaccctgcaggacgtgagaggccgggactaccagaacgccatgcgggtgtggtccaacatccctggactgaaaagcaagcacgcacctctgacccctaaagaagaggagtacctgcaggcccaggtgcggagcagaagcaagctggacgcccctaaggtggatctgctggtgaagaattgcctcctgcccctgagagagtacttcaagtatttcagccagaatagtctgcccctgggcggcccaagcagcggcgcccctcctcccagcggcggcagcccagccggctccccaacctctaccgaggagggcacctctgagtccgccacccccgagagcggccctggcacctccaccgagcccagcgagggcagcgcacccggcagccctgccggcagccccacctccacagaggagggaaccagcaccgagcccagcgaaggcagcgccccaggcaccagcaccgagcctagtgagggcggctctggcggcggcagcgcccaggagattaaacggatcaacaagatcagaagaagacttgtgaaagacagcaacaccaagaaggccggcaagacaggccccatgaaaaccctgctggttagagtgatgacacccgatctgagagagcggctggaaaacctgagaaagaagcctgaaaatatcccccagcccatcagcaatacatctagagccaacctgaataagctgctgaccgattacaccgaaatgaagaaggcgatcctgcatgtgtactgggaagagttccagaaggaccctgtgggcctgatgagccgggtggcccagcctgccagcaagaagatcgatcagaacaagctgaaacctgagatggacgagaagggcaacctgaccaccgccggctttgcctgctctcagtgtggccagcccctgttcgtgtacaagctggagcaggtgtctgagaagggcaaggcttacaccaactacttcggacggtgcaatgtggccgagcacgaaaagctgatcctgctggcccagctgaagcccgagaaggatagcgacgaagccgtgacatatagcctgggaaagtttgggcagagggccctggatttctacagcattcatgtgaccaaggagtccacccaccccgtgaagcccctggcccagatcgccggaaacagatacgcctccggacctgtgggaaaggccctgagcgacgcatgtatgggcacaatcgcctccttcctgtctaagtaccaggacatcatcatcgaacaccagaaggtggtgaagggcaaccagaagagactggagagcctgcgggagctggccggcaaggaaaacctggaataccctagcgtgaccctgccacctcagcctcacaccaaggagggcgttgatgcctacaacgaagtgatcgcccgggtgcgaatgtgggtgaacctgaacctgtggcagaagctgaagctaagcagagatgatgccaagcctctgctgagactgaagggattcccttcctttcctctggtcgagagacaggccaacgaagtggactggtgggacatggtgtgtaacgtgaagaagctgatcaacgagaaaaaggaggatggcaaggtgttttggcagaatctggctggctacaagagacaggaagccctgagaccatacctgagcagcgaggaagatcggaagaagggaaagaaattcgctcggtaccagctgggcgacctgctgctgcacctggaaaagaagcacggcgaggactggggaaaggtgtacgacgaggcctgggagcggattgacaagaaagtggaaggcctgagcaagcacatcaagctggaagaggaacggagaagcgaggacgcccagagcaaggccgccctgaccgactggctgcgggctaaggccagcttcgtgatcgagggcctgaaggaggccgacaaggacgagttctgcagatgcgagctgaagctgcagaagtggtacggggacctgcggggaaagcccttcgccatcgaagccgagaacagcatcctggacatcagcggcttcagcaagcagtacaactgtgccttcatctggcagaaggacggcgtgaagaagctgaacctgtacctgatcatcaactacttcaagggcggcaagctgcggttcaagaagatcaaacctgaagccttcgaagccaacagattctacaccgtgatcaacaaaaagagcggcgagatcgtgcccatggaggtgaacttcaacttcgacgaccccaacctgatcatcctgcctctggcctttggcaagagacagggcagagaattcatctggaacgacctgctgtccctggaaaccggcagcctgaagctggccaacggaagagtgatcgagaagacactgtacaacagaagaacccggcaggatgagcctgccctgttcgtggccctgaccttcgagcggcgggaggtcctggactcctccaatatcaaaccaatgaacctgatcggcgtggcaagaggcgaaaacatccccgccgtgatcgccctgaccgaccccgagggctgcccactgagccggtttaaggatagcctgggaaacccaacccacatcctgagaatcggcgagagctataaggagaagcagcggaccatccaggccaagaaggaggtggagcagcggagagccggcggctacagccggaagtacgccagcaaagccaagaatctggcagacgatatggtgagaaacaccgctagagatctgctgtactacgccgtgacccaggatgccatgctgatcttcgccaacctgagccggggcttcggccggcagggcaagcggaccttcatggccgagagacagtacacacggatggaggactggctgaccgccaagctggcctacgagggcctgagcaagacctacctgtccaagacactggcccagtacacctccaagacatgcagcaactgtgggtttaccatcaccagcgccgactacgacagggtgctggagaagctgaagaagacagcaacaggctggatgaccacaattaacggcaaggagctgaaggtggagggccagattacctactacaacagatacaagagacagaacgtagtcaaggacctgtccgtcgagctggatagactgagcgaagaatctgtgaacaacgacatctcctcctggacaaagggcagaagcggagaagctctgagcctcctgaagaaaagattctcccatagacccgtgcaggagaagttcgtgtgcctgaactgcggcttcgagacacacgcagccgagcaagccgccctgaacatcgccagatcctggctgttcctgcggagccaggagtacaagaaataccagacaaacaagacaaccggcaacaccgataagagagccttcgtcgagacctggcagtccttttaccggaagaagcttaaggaggtgtggaaacctgccgtgcggtctggcggatctggcggaggctccacaagcatggccgagggcctgaagttcaaggacgtggtgatctacttcagccagaaggagtgggagtgcctgcacagcgcccagaaggacctgtacagggacgtgatgctggagaactacggcaacctggtgctgctgggcctgagcgacaccaagcccaacgtgatcagcctgctggagcagaagaaggagccctggatggtgaagaggaaggagaccaaggagtggtgccccgactgggagttcggcaccagccccaagaaaaagagaaaagtctaagctgccttctgcggggcttgccttctggccatgcccttcttctctcccttgcacctgtacctcttggtctttgaataaagcctgagtaggaaggctagcaaaaaaaaaaaaaaaaaaaaaaaaaaaaaaaaaaaaaaaaaaaaaaaaaaaaaaaaaaaaaaaaaaaaaaaaaaaaaaaa

SEQ ID NO: 6216 - RNA, 5797 nt, synthetic construct
  source 1..5797: mol_type = other RNA
aggaaataagagagaaaagaagagtaagaagaaatataagagccaccatggcccctaagaagaagcgtaaagtgagccggatggaacgcctcgtctacgaggtgcggcagaagtgcagaaacatcgaggacatctgcatctcctgcggatctctgaacgtgaccctggagcacccactgttcatcggcggcatgtgccagaactgtaaaaactgttttctggagtgtgcctatcaatacgacgatgacggctaccagagctactgcaccatctgttgcggcggaagagaggtgctgatgtgtggaaataacaactgctgccggtgcttctgcgtggaatgcgtggacctgctggtgggccccggcgccgcccaggccgctattaaggaagatccttggaactgctacatgtgcggccacaagggcacatacggcctgctgagacggagagaggactggcctagcagactgcagatgttcttcgccaataaccacgaccaggagttcgacccccctaaggtgtaccctcccgtccccgccgagaagagaaagcccatccgggtcctgagcctgttcgatggcatcgccaccggtctgctggtgctgaaggacctgggcatccaggtggataggtacattgcctccgaggtgtgcgaggactccatcaccgtgggaatggtgcgtcatcagggcaagatcatgtacgtgggcgacgtgcggagcgtgacacagaagcatatccaggagtggggccctttcgacctggtgatcggcggcagcccttgcaatgacctgagcatcgtgaacccagcccggaagggcctgtacgagggaaccggcagactgttcttcgagttttacagactgctgcacgacgcccggcctaaggaaggcgacgaccggcccttcttttggctgttcgagaatgtggtggccatgggagtcagcgacaagcgggatattagccggttcctggagagcaaccccgtgatgatcgatgccaaggaagtgagcgccgcccaccgggccagatacttctggggcaatctgcctggcatgaacagacccctggccagcaccgtgaacgacaagctggagctgcaggagtgcctggagcacggccggatcgccaagttcagcaaggtgagaaccatcaccacccgaagcaacagcatcaaacaaggcaaggaccagcactttcctgtgttcatgaacgagaaggaggacatcctgtggtgtaccgagatggagagagtgttcgggttcccagtccactacacagatgtcagcaacatgtctagactggccagacagagactgctgggaagaagctggtccgtccctgtgatcagacacctgttcgcccctctgaaggagtacttcgcctgcgtgagcagcggcaacagcaacgccaacagccggggccccagcttctctagcggcctggtgccactgtccctgagagggagccacatgggccccatggagatctacaaaaccgtgagcgcctggaagcggcagcctgtgcgcgtgctgagcctgtttcggaatatcgataaagtcctgaaaagcctgggattcctggagagcggctctggctccggcggtggcaccctgaagtacgtggaggatgtgacaaacgtggtcagacgggatgtggagaagtggggccccttcgatctggtgtacggcagcacccaacccctgggcagctcttgtgaccggtgccctggctggtacatgtttcagttccaccggatcctgcagtacgccctgccgagacaggagtcccagcggccattcttttggattttcatggacaacttgctgctgaccgaggatgaccaggaaactaccactcggttcctgcagaccgaagccgtgaccctgcaggacgtgagaggccgggactaccagaacgccatgcgggtgtggtccaacatccctggactgaaaagcaagcacgcacctctgacccctaaagaagaggagtacctgcaggcccaggtgcggagcagaagcaagctggacgcccctaaggtggatctgctggtgaagaattgcctcctgcccctgagagagtacttcaagtatttcagccagaatagtctgcccctgggcggcccaagcagcggcgcccctcctcccagcggcggcagcccagccggctccccaacctctaccgaggagggcacctctgagtccgccacccccgagagcggccctggcacctccaccgagcccagcgagggcagcgcacccggcagccctgccggcagccccacctccacagaggagggaaccagcaccgagcccagcgaaggcagcgccccaggcaccagcaccgagcctagtgagggcggctctggcggcggcagcgcccaggagattaaacggatcaacaagatcagaagaagacttgtgaaagacagcaacaccaagaaggccggcaagacaggccccatgaaaaccctgctggttagagtgatgacacccgatctgagagagcggctggaaaacctgagaaagaagcctgaaaatatcccccagcccatcagcaatacatctagagccaacctgaataagctgctgaccgattacaccgaaatgaagaaggcgatcctgcatgtgtactgggaagagttccagaaggaccctgtgggcctgatgagccgggtggcccagcctgccagcaagaagatcgatcagaacaagctgaaacctgagatggacgagaagggcaacctgaccaccgccggctttgcctgctctcagtgtggccagcccctgttcgtgtacaagctggagcaggtgtctgagaagggcaaggcttacaccaactacttcggacggtgcaatgtggccgagcacgaaaagctgatcctgctggcccagctgaagcccgagaaggatagcgacgaagccgtgacatatagcctgggaaagtttgggcagagggccctggatttctacagcattcatgtgaccaaggagtccacccaccccgtgaagcccctggcccagatcgccggaaacagatacgcctccggacctgtgggaaaggccctgagcgacgcatgtatgggcacaatcgcctccttcctgtctaagtaccaggacatcatcatcgaacaccagaaggtggtgaagggcaaccagaagagactggagagcctgcgggagctggccggcaaggaaaacctggaataccctagcgtgaccctgccacctcagcctcacaccaaggagggcgttgatgcctacaacgaagtgatcgcccgggtgcgaatgtgggtgaacctgaacctgtggcagaagctgaagctaagcagagatgatgccaagcctctgctgagactgaagggattcccttcctttcctctggtcgagagacaggccaacgaagtggactggtgggacatggtgtgtaacgtgaagaagctgatcaacgagaaaaaggaggatggcaaggtgttttggcagaatctggctggctacaagagacaggaagccctgagaccatacctgagcagcgaggaagatcggaagaagggaaagaaattcgctcggtaccagctgggcgacctgctgctgcacctggaaaagaagcacggcgaggactggggaaaggtgtacgacgaggcctgggagcggattgacaagaaagtggaaggcctgagcaagcacatcaagctggaagaggaacggagaagcgaggacgcccagagcaaggccgccctgaccgactggctgcgggctaaggccagcttcgtgatcgagggcctgaaggaggccgacaaggacgagttctgcagatgcgagctgaagctgcagaagtggtacggggacctgcggggaaagcccttcgccatcgaagccgagaacagcatcctggacatcagcggcttcagcaagcagtacaactgtgccttcatctggcagaaggacggcgtgaagaagctgaacctgtacctgatcatcaactacttcaagggcggcaagctgcggttcaagaagatcaaacctgaagccttcgaagccaacagattctacaccgtgatcaacaaaaagagcggcgagatcgtgcccatggaggtgaacttcaacttcgacgaccccaacctgatcatcctgcctctggcctttggcaagagacagggcagagaattcatctggaacgacctgctgtccctggaaaccggcagcctgaagctggccaacggaagagtgatcgagaagacactgtacaacagaagaacccggcaggatgagcctgccctgttcgtggccctgaccttcgagcggcgggaggtcctggactcctccaatatcaaaccaatgaacctgatcggcgtggcaagaggcgaaaacatccccgccgtgatcgccctgaccgaccccgagggctgcccactgagccggtttaaggatagcctgggaaacccaacccacatcctgagaatcggcgagagctataaggagaagcagcggaccatccaggccaagaaggaggtggagcagcggagagccggcggctacagccggaagtacgccagcaaagccaagaatctggcagacgatatggtgagaaacaccgctagagatctgctgtactacgccgtgacccaggatgccatgctgatcttcgccaacctgagccggggcttcggccggcagggcaagcggaccttcatggccgagagacagtacacacggatggaggactggctgaccgccaagctggcctacgagggcctgagcaagacctacctgtccaagacactggcccagtacacctccaagacatgcagcaactgtgggtttaccatcaccagcgccgactacgacagggtgctggagaagctgaagaagacagcaacaggctggatgaccacaattaacggcaaggagctgaaggtggagggccagattacctactacaacagatacaagagacagaacgtagtcaaggacctgtccgtcgagctggatagactgagcgaagaatctgtgaacaacgacatctcctcctggacaaagggcagaagcggagaagctctgagcctcctgaagaaaagattctcccatagacccgtgcaggagaagttcgtgtgcctgaactgcggcttcgagacacacgcagccgagcaagccgccctgaacatcgccagatcctggctgttcctgcggagccaggagtacaagaaataccagacaaacaagacaaccggcaacaccgataagagagccttcgtcgagacctggcagtccttttaccggaagaagcttaaggaggtgtggaaacctgccgtgcggtctggcggatctggcggaggctccacaagcgagggcgaggcccagaagaggaaggccgaggagagcggcatgcccctgacccagggccacctgaccttcagggacgtggccatcgagttcagccaggaggagtggaagtgcctggaccccgtgcagaaggccctgtacagggacgtgatgctggagaactacaggaacctggtgagcctgggcatctgcctgcccgacctgagcatcttcagcatgatgaagcagaggaccgagagctggaccaccagccccaagaaaaagagaaaagtctaagctgccttctgcggggcttgccttctggccatgcccttcttctctcccttgcacctgtacctcttggtctttgaataaagcctgagtaggaaggctagcaaaaaaaaaaaaaaaaaaaaaaaaaaaaaaaaaaaaaaaaaaaaaaaaaaaaaaaaaaaaaaaaaaaaaaaaaaaaaaaa

SEQ ID NO: 6217 - RNA, 5797 nt, synthetic construct
  source 1..5797: mol_type = other RNA
aggaaataagagagaaaagaagagtaagaagaaatataagagccaccatggcccctaagaagaagcgtaaagtgagccggatggaacgcctcgtctacgaggtgcggcagaagtgcagaaacatcgaggacatctgcatctcctgcggatctctgaacgtgaccctggagcacccactgttcatcggcggcatgtgccagaactgtaaaaactgttttctggagtgtgcctatcaatacgacgatgacggctaccagagctactgcaccatctgttgcggcggaagagaggtgctgatgtgtggaaataacaactgctgccggtgcttctgcgtggaatgcgtggacctgctggtgggccccggcgccgcccaggccgctattaaggaagatccttggaactgctacatgtgcggccacaagggcacatacggcctgctgagacggagagaggactggcctagcagactgcagatgttcttcgccaataaccacgaccaggagttcgacccccctaaggtgtaccctcccgtccccgccgagaagagaaagcccatccgggtcctgagcctgttcgatggcatcgccaccggtctgctggtgctgaaggacctgggcatccaggtggataggtacattgcctccgaggtgtgcgaggactccatcaccgtgggaatggtgcgtcatcagggcaagatcatgtacgtgggcgacgtgcggagcgtgacacagaagcatatccaggagtggggccctttcgacctggtgatcggcggcagcccttgcaatgacctgagcatcgtgaacccagcccggaagggcctgtacgagggaaccggcagactgttcttcgagttttacagactgctgcacgacgcccggcctaaggaaggcgacgaccggcccttcttttggctgttcgagaatgtggtggccatgggagtcagcgacaagcgggatattagccggttcctggagagcaaccccgtgatgatcgatgccaaggaagtgagcgccgcccaccgggccagatacttctggggcaatctgcctggcatgaacagacccctggccagcaccgtgaacgacaagctggagctgcaggagtgcctggagcacggccggatcgccaagttcagcaaggtgagaaccatcaccacccgaagcaacagcatcaaacaaggcaaggaccagcactttcctgtgttcatgaacgagaaggaggacatcctgtggtgtaccgagatggagagagtgttcgggttcccagtccactacacagatgtcagcaacatgtctagactggccagacagagactgctgggaagaagctggtccgtccctgtgatcagacacctgttcgcccctctgaaggagtacttcgcctgcgtgagcagcggcaacagcaacgccaacagccggggccccagcttctctagcggcctggtgccactgtccctgagagggagccacatgggccccatggagatctacaaaaccgtgagcgcctggaagcggcagcctgtgcgcgtgctgagcctgtttcggaatatcgataaagtcctgaaaagcctgggattcctggagagcggctctggctccggcggtggcaccctgaagtacgtggaggatgtgacaaacgtggtcagacgggatgtggagaagtggggccccttcgatctggtgtacggcagcacccaacccctgggcagctcttgtgaccggtgccctggctggtacatgtttcagttccaccggatcctgcagtacgccctgccgagacaggagtcccagcggccattcttttggattttcatggacaacttgctgctgaccgaggatgaccaggaaactaccactcggttcctgcagaccgaagccgtgaccctgcaggacgtgagaggccgggactaccagaacgccatgcgggtgtggtccaacatccctggactgaaaagcaagcacgcacctctgacccctaaagaagaggagtacctgcaggcccaggtgcggagcagaagcaagctggacgcccctaaggtggatctgctggtgaagaattgcctcctgcccctgagagagtacttcaagtatttcagccagaatagtctgcccctgggcggcccaagcagcggcgcccctcctcccagcggcggcagcccagccggctccccaacctctaccgaggagggcacctctgagtccgccacccccgagagcggccctggcacctccaccgagcccagcgagggcagcgcacccggcagccctgccggcagccccacctccacagaggagggaaccagcaccgagcccagcgaaggcagcgccccaggcaccagcaccgagcctagtgagggcggctctggcggcggcagcgcccaggagattaaacggatcaacaagatcagaagaagacttgtgaaagacagcaacaccaagaaggccggcaagacaggccccatgaaaaccctgctggttagagtgatgacacccgatctgagagagcggctggaaaacctgagaaagaagcctgaaaatatcccccagcccatcagcaatacatctagagccaacctgaataagctgctgaccgattacaccgaaatgaagaaggcgatcctgcatgtgtactgggaagagttccagaaggaccctgtgggcctgatgagccgggtggcccagcctgccagcaagaagatcgatcagaacaagctgaaacctgagatggacgagaagggcaacctgaccaccgccggctttgcctgctctcagtgtggccagcccctgttcgtgtacaagctggagcaggtgtctgagaagggcaaggcttacaccaactacttcggacggtgcaatgtggccgagcacgaaaagctgatcctgctggcccagctgaagcccgagaaggatagcgacgaagccgtgacatatagcctgggaaagtttgggcagagggccctggatttctacagcattcatgtgaccaaggagtccacccaccccgtgaagcccctggcccagatcgccggaaacagatacgcctccggacctgtgggaaaggccctgagcgacgcatgtatgggcacaatcgcctccttcctgtctaagtaccaggacatcatcatcgaacaccagaaggtggtgaagggcaaccagaagagactggagagcctgcgggagctggccggcaaggaaaacctggaataccctagcgtgaccctgccacctcagcctcacaccaaggagggcgttgatgcctacaacgaagtgatcgcccgggtgcgaatgtgggtgaacctgaacctgtggcagaagctgaagctaagcagagatgatgccaagcctctgctgagactgaagggattcccttcctttcctctggtcgagagacaggccaacgaagtggactggtgggacatggtgtgtaacgtgaagaagctgatcaacgagaaaaaggaggatggcaaggtgttttggcagaatctggctggctacaagagacaggaagccctgagaccatacctgagcagcgaggaagatcggaagaagggaaagaaattcgctcggtaccagctgggcgacctgctgctgcacctggaaaagaagcacggcgaggactggggaaaggtgtacgacgaggcctgggagcggattgacaagaaagtggaaggcctgagcaagcacatcaagctggaagaggaacggagaagcgaggacgcccagagcaaggccgccctgaccgactggctgcgggctaaggccagcttcgtgatcgagggcctgaaggaggccgacaaggacgagttctgcagatgcgagctgaagctgcagaagtggtacggggacctgcggggaaagcccttcgccatcgaagccgagaacagcatcctggacatcagcggcttcagcaagcagtacaactgtgccttcatctggcagaaggacggcgtgaagaagctgaacctgtacctgatcatcaactacttcaagggcggcaagctgcggttcaagaagatcaaacctgaagccttcgaagccaacagattctacaccgtgatcaacaaaaagagcggcgagatcgtgcccatggaggtgaacttcaacttcgacgaccccaacctgatcatcctgcctctggcctttggcaagagacagggcagagaattcatctggaacgacctgctgtccctggaaaccggcagcctgaagctggccaacggaagagtgatcgagaagacactgtacaacagaagaacccggcaggatgagcctgccctgttcgtggccctgaccttcgagcggcgggaggtcctggactcctccaatatcaaaccaatgaacctgatcggcgtggcaagaggcgaaaacatccccgccgtgatcgccctgaccgaccccgagggctgcccactgagccggtttaaggatagcctgggaaacccaacccacatcctgagaatcggcgagagctataaggagaagcagcggaccatccaggccaagaaggaggtggagcagcggagagccggcggctacagccggaagtacgccagcaaagccaagaatctggcagacgatatggtgagaaacaccgctagagatctgctgtactacgccgtgacccaggatgccatgctgatcttcgccaacctgagccggggcttcggccggcagggcaagcggaccttcatggccgagagacagtacacacggatggaggactggctgaccgccaagctggcctacgagggcctgagcaagacctacctgtccaagacactggcccagtacacctccaagacatgcagcaactgtgggtttaccatcaccagcgccgactacgacagggtgctggagaagctgaagaagacagcaacaggctggatgaccacaattaacggcaaggagctgaaggtggagggccagattacctactacaacagatacaagagacagaacgtagtcaaggacctgtccgtcgagctggatagactgagcgaagaatctgtgaacaacgacatctcctcctggacaaagggcagaagcggagaagctctgagcctcctgaagaaaagattctcccatagacccgtgcaggagaagttcgtgtgcctgaactgcggcttcgagacacacgcagccgagcaagccgccctgaacatcgccagatcctggctgttcctgcggagccaggagtacaagaaataccagacaaacaagacaaccggcaacaccgataagagagccttcgtcgagacctggcagtccttttaccggaagaagcttaaggaggtgtggaaacctgccgtgcggtctggcggatctggcggaggctccacaagcatggaggaccccctgagcttcaccgacgtggccatcgacttcagcgccgacgagtgcgagtgcctggacagcgcccagtggaacctgtacaaggaggtgatgctggagaactacagcaacctggtgttcctgggcctggccttcagcaagccccacctggtgaccttcctggagcagagcagcgacccctggagcgtgaagaggaaggccagcgccaccatccccctgggcagcaagccccacaccagccccaagaaaaagagaaaagtctaagctgccttctgcggggcttgccttctggccatgcccttcttctctcccttgcacctgtacctcttggtctttgaataaagcctgagtaggaaggctagcaaaaaaaaaaaaaaaaaaaaaaaaaaaaaaaaaaaaaaaaaaaaaaaaaaaaaaaaaaaaaaaaaaaaaaaaaaaaaaaa

SEQ ID NO: 6218 - RNA, 5797 nt, synthetic construct
  source 1..5797: mol_type = other RNA
aggaaataagagagaaaagaagagtaagaagaaatataagagccaccatggcccctaagaagaagcgtaaagtgagccggatggaacgcctcgtctacgaggtgcggcagaagtgcagaaacatcgaggacatctgcatctcctgcggatctctgaacgtgaccctggagcacccactgttcatcggcggcatgtgccagaactgtaaaaactgttttctggagtgtgcctatcaatacgacgatgacggctaccagagctactgcaccatctgttgcggcggaagagaggtgctgatgtgtggaaataacaactgctgccggtgcttctgcgtggaatgcgtggacctgctggtgggccccggcgccgcccaggccgctattaaggaagatccttggaactgctacatgtgcggccacaagggcacatacggcctgctgagacggagagaggactggcctagcagactgcagatgttcttcgccaataaccacgaccaggagttcgacccccctaaggtgtaccctcccgtccccgccgagaagagaaagcccatccgggtcctgagcctgttcgatggcatcgccaccggtctgctggtgctgaaggacctgggcatccaggtggataggtacattgcctccgaggtgtgcgaggactccatcaccgtgggaatggtgcgtcatcagggcaagatcatgtacgtgggcgacgtgcggagcgtgacacagaagcatatccaggagtggggccctttcgacctggtgatcggcggcagcccttgcaatgacctgagcatcgtgaacccagcccggaagggcctgtacgagggaaccggcagactgttcttcgagttttacagactgctgcacgacgcccggcctaaggaaggcgacgaccggcccttcttttggctgttcgagaatgtggtggccatgggagtcagcgacaagcgggatattagccggttcctggagagcaaccccgtgatgatcgatgccaaggaagtgagcgccgcccaccgggccagatacttctggggcaatctgcctggcatgaacagacccctggccagcaccgtgaacgacaagctggagctgcaggagtgcctggagcacggccggatcgccaagttcagcaaggtgagaaccatcaccacccgaagcaacagcatcaaacaaggcaaggaccagcactttcctgtgttcatgaacgagaaggaggacatcctgtggtgtaccgagatggagagagtgttcgggttcccagtccactacacagatgtcagcaacatgtctagactggccagacagagactgctgggaagaagctggtccgtccctgtgatcagacacctgttcgcccctctgaaggagtacttcgcctgcgtgagcagcggcaacagcaacgccaacagccggggccccagcttctctagcggcctggtgccactgtccctgagagggagccacatgggccccatggagatctacaaaaccgtgagcgcctggaagcggcagcctgtgcgcgtgctgagcctgtttcggaatatcgataaagtcctgaaaagcctgggattcctggagagcggctctggctccggcggtggcaccctgaagtacgtggaggatgtgacaaacgtggtcagacgggatgtggagaagtggggccccttcgatctggtgtacggcagcacccaacccctgggcagctcttgtgaccggtgccctggctggtacatgtttcagttccaccggatcctgcagtacgccctgccgagacaggagtcccagcggccattcttttggattttcatggacaacttgctgctgaccgaggatgaccaggaaactaccactcggttcctgcagaccgaagccgtgaccctgcaggacgtgagaggccgggactaccagaacgccatgcgggtgtggtccaacatccctggactgaaaagcaagcacgcacctctgacccctaaagaagaggagtacctgcaggcccaggtgcggagcagaagcaagctggacgcccctaaggtggatctgctggtgaagaattgcctcctgcccctgagagagtacttcaagtatttcagccagaatagtctgcccctgggcggcccaagcagcggcgcccctcctcccagcggcggcagcccagccggctccccaacctctaccgaggagggcacctctgagtccgccacccccgagagcggccctggcacctccaccgagcccagcgagggcagcgcacccggcagccctgccggcagccccacctccacagaggagggaaccagcaccgagcccagcgaaggcagcgccccaggcaccagcaccgagcctagtgagggcggctctggcggcggcagcgcccaggagattaaacggatcaacaagatcagaagaagacttgtgaaagacagcaacaccaagaaggccggcaagacaggccccatgaaaaccctgctggttagagtgatgacacccgatctgagagagcggctggaaaacctgagaaagaagcctgaaaatatcccccagcccatcagcaatacatctagagccaacctgaataagctgctgaccgattacaccgaaatgaagaaggcgatcctgcatgtgtactgggaagagttccagaaggaccctgtgggcctgatgagccgggtggcccagcctgccagcaagaagatcgatcagaacaagctgaaacctgagatggacgagaagggcaacctgaccaccgccggctttgcctgctctcagtgtggccagcccctgttcgtgtacaagctggagcaggtgtctgagaagggcaaggcttacaccaactacttcggacggtgcaatgtggccgagcacgaaaagctgatcctgctggcccagctgaagcccgagaaggatagcgacgaagccgtgacatatagcctgggaaagtttgggcagagggccctggatttctacagcattcatgtgaccaaggagtccacccaccccgtgaagcccctggcccagatcgccggaaacagatacgcctccggacctgtgggaaaggccctgagcgacgcatgtatgggcacaatcgcctccttcctgtctaagtaccaggacatcatcatcgaacaccagaaggtggtgaagggcaaccagaagagactggagagcctgcgggagctggccggcaaggaaaacctggaataccctagcgtgaccctgccacctcagcctcacaccaaggagggcgttgatgcctacaacgaagtgatcgcccgggtgcgaatgtgggtgaacctgaacctgtggcagaagctgaagctaagcagagatgatgccaagcctctgctgagactgaagggattcccttcctttcctctggtcgagagacaggccaacgaagtggactggtgggacatggtgtgtaacgtgaagaagctgatcaacgagaaaaaggaggatggcaaggtgttttggcagaatctggctggctacaagagacaggaagccctgagaccatacctgagcagcgaggaagatcggaagaagggaaagaaattcgctcggtaccagctgggcgacctgctgctgcacctggaaaagaagcacggcgaggactggggaaaggtgtacgacgaggcctgggagcggattgacaagaaagtggaaggcctgagcaagcacatcaagctggaagaggaacggagaagcgaggacgcccagagcaaggccgccctgaccgactggctgcgggctaaggccagcttcgtgatcgagggcctgaaggaggccgacaaggacgagttctgcagatgcgagctgaagctgcagaagtggtacggggacctgcggggaaagcccttcgccatcgaagccgagaacagcatcctggacatcagcggcttcagcaagcagtacaactgtgccttcatctggcagaaggacggcgtgaagaagctgaacctgtacctgatcatcaactacttcaagggcggcaagctgcggttcaagaagatcaaacctgaagccttcgaagccaacagattctacaccgtgatcaacaaaaagagcggcgagatcgtgcccatggaggtgaacttcaacttcgacgaccccaacctgatcatcctgcctctggcctttggcaagagacagggcagagaattcatctggaacgacctgctgtccctggaaaccggcagcctgaagctggccaacggaagagtgatcgagaagacactgtacaacagaagaacccggcaggatgagcctgccctgttcgtggccctgaccttcgagcggcgggaggtcctggactcctccaatatcaaaccaatgaacctgatcggcgtggcaagaggcgaaaacatccccgccgtgatcgccctgaccgaccccgagggctgcccactgagccggtttaaggatagcctgggaaacccaacccacatcctgagaatcggcgagagctataaggagaagcagcggaccatccaggccaagaaggaggtggagcagcggagagccggcggctacagccggaagtacgccagcaaagccaagaatctggcagacgatatggtgagaaacaccgctagagatctgctgtactacgccgtgacccaggatgccatgctgatcttcgccaacctgagccggggcttcggccggcagggcaagcggaccttcatggccgagagacagtacacacggatggaggactggctgaccgccaagctggcctacgagggcctgagcaagacctacctgtccaagacactggcccagtacacctccaagacatgcagcaactgtgggtttaccatcaccagcgccgactacgacagggtgctggagaagctgaagaagacagcaacaggctggatgaccacaattaacggcaaggagctgaaggtggagggccagattacctactacaacagatacaagagacagaacgtagtcaaggacctgtccgtcgagctggatagactgagcgaagaatctgtgaacaacgacatctcctcctggacaaagggcagaagcggagaagctctgagcctcctgaagaaaagattctcccatagacccgtgcaggagaagttcgtgtgcctgaactgcggcttcgagacacacgcagccgagcaagccgccctgaacatcgccagatcctggctgttcctgcggagccaggagtacaagaaataccagacaaacaagacaaccggcaacaccgataagagagccttcgtcgagacctggcagtccttttaccggaagaagcttaaggaggtgtggaaacctgccgtgcggtctggcggatctggcggaggctccacaagcgcccccggcagcgtgaccttcagggacgtggccatcgacttcagccaggaggagtggaagtggctgcagcccgcccagagggacctgtacaggtgcgtgatgctggagaactacggccacctggtgagcctgggcctgtgcatcagcaagcccgacgtggtgagcctgctggagcagggcaaggagccctggctgggcaagggcggcgtgaacagggacctgttcagcgtgagcgacggcaagaccagccccaagaaaaagagaaaagtctaagctgccttctgcggggcttgccttctggccatgcccttcttctctcccttgcacctgtacctcttggtctttgaataaagcctgagtaggaaggctagcaaaaaaaaaaaaaaaaaaaaaaaaaaaaaaaaaaaaaaaaaaaaaaaaaaaaaaaaaaaaaaaaaaaaaaaaaaaaaaaa

SEQ ID NO: 6219 - RNA, 5797 nt, synthetic construct
  source 1..5797: mol_type = other RNA
aggaaataagagagaaaagaagagtaagaagaaatataagagccaccatggcccctaagaagaagcgtaaagtgagccggatggaacgcctcgtctacgaggtgcggcagaagtgcagaaacatcgaggacatctgcatctcctgcggatctctgaacgtgaccctggagcacccactgttcatcggcggcatgtgccagaactgtaaaaactgttttctggagtgtgcctatcaatacgacgatgacggctaccagagctactgcaccatctgttgcggcggaagagaggtgctgatgtgtggaaataacaactgctgccggtgcttctgcgtggaatgcgtggacctgctggtgggccccggcgccgcccaggccgctattaaggaagatccttggaactgctacatgtgcggccacaagggcacatacggcctgctgagacggagagaggactggcctagcagactgcagatgttcttcgccaataaccacgaccaggagttcgacccccctaaggtgtaccctcccgtccccgccgagaagagaaagcccatccgggtcctgagcctgttcgatggcatcgccaccggtctgctggtgctgaaggacctgggcatccaggtggataggtacattgcctccgaggtgtgcgaggactccatcaccgtgggaatggtgcgtcatcagggcaagatcatgtacgtgggcgacgtgcggagcgtgacacagaagcatatccaggagtggggccctttcgacctggtgatcggcggcagcccttgcaatgacctgagcatcgtgaacccagcccggaagggcctgtacgagggaaccggcagactgttcttcgagttttacagactgctgcacgacgcccggcctaaggaaggcgacgaccggcccttcttttggctgttcgagaatgtggtggccatgggagtcagcgacaagcgggatattagccggttcctggagagcaaccccgtgatgatcgatgccaaggaagtgagcgccgcccaccgggccagatacttctggggcaatctgcctggcatgaacagacccctggccagcaccgtgaacgacaagctggagctgcaggagtgcctggagcacggccggatcgccaagttcagcaaggtgagaaccatcaccacccgaagcaacagcatcaaacaaggcaaggaccagcactttcctgtgttcatgaacgagaaggaggacatcctgtggtgtaccgagatggagagagtgttcgggttcccagtccactacacagatgtcagcaacatgtctagactggccagacagagactgctgggaagaagctggtccgtccctgtgatcagacacctgttcgcccctctgaaggagtacttcgcctgcgtgagcagcggcaacagcaacgccaacagccggggccccagcttctctagcggcctggtgccactgtccctgagagggagccacatgggccccatggagatctacaaaaccgtgagcgcctggaagcggcagcctgtgcgcgtgctgagcctgtttcggaatatcgataaagtcctgaaaagcctgggattcctggagagcggctctggctccggcggtggcaccctgaagtacgtggaggatgtgacaaacgtggtcagacgggatgtggagaagtggggccccttcgatctggtgtacggcagcacccaacccctgggcagctcttgtgaccggtgccctggctggtacatgtttcagttccaccggatcctgcagtacgccctgccgagacaggagtcccagcggccattcttttggattttcatggacaacttgctgctgaccgaggatgaccaggaaactaccactcggttcctgcagaccgaagccgtgaccctgcaggacgtgagaggccgggactaccagaacgccatgcgggtgtggtccaacatccctggactgaaaagcaagcacgcacctctgacccctaaagaagaggagtacctgcaggcccaggtgcggagcagaagcaagctggacgcccctaaggtggatctgctggtgaagaattgcctcctgcccctgagagagtacttcaagtatttcagccagaatagtctgcccctgggcggcccaagcagcggcgcccctcctcccagcggcggcagcccagccggctccccaacctctaccgaggagggcacctctgagtccgccacccccgagagcggccctggcacctccaccgagcccagcgagggcagcgcacccggcagccctgccggcagccccacctccacagaggagggaaccagcaccgagcccagcgaaggcagcgccccaggcaccagcaccgagcctagtgagggcggctctggcggcggcagcgcccaggagattaaacggatcaacaagatcagaagaagacttgtgaaagacagcaacaccaagaaggccggcaagacaggccccatgaaaaccctgctggttagagtgatgacacccgatctgagagagcggctggaaaacctgagaaagaagcctgaaaatatcccccagcccatcagcaatacatctagagccaacctgaataagctgctgaccgattacaccgaaatgaagaaggcgatcctgcatgtgtactgggaagagttccagaaggaccctgtgggcctgatgagccgggtggcccagcctgccagcaagaagatcgatcagaacaagctgaaacctgagatggacgagaagggcaacctgaccaccgccggctttgcctgctctcagtgtggccagcccctgttcgtgtacaagctggagcaggtgtctgagaagggcaaggcttacaccaactacttcggacggtgcaatgtggccgagcacgaaaagctgatcctgctggcccagctgaagcccgagaaggatagcgacgaagccgtgacatatagcctgggaaagtttgggcagagggccctggatttctacagcattcatgtgaccaaggagtccacccaccccgtgaagcccctggcccagatcgccggaaacagatacgcctccggacctgtgggaaaggccctgagcgacgcatgtatgggcacaatcgcctccttcctgtctaagtaccaggacatcatcatcgaacaccagaaggtggtgaagggcaaccagaagagactggagagcctgcgggagctggccggcaaggaaaacctggaataccctagcgtgaccctgccacctcagcctcacaccaaggagggcgttgatgcctacaacgaagtgatcgcccgggtgcgaatgtgggtgaacctgaacctgtggcagaagctgaagctaagcagagatgatgccaagcctctgctgagactgaagggattcccttcctttcctctggtcgagagacaggccaacgaagtggactggtgggacatggtgtgtaacgtgaagaagctgatcaacgagaaaaaggaggatggcaaggtgttttggcagaatctggctggctacaagagacaggaagccctgagaccatacctgagcagcgaggaagatcggaagaagggaaagaaattcgctcggtaccagctgggcgacctgctgctgcacctggaaaagaagcacggcgaggactggggaaaggtgtacgacgaggcctgggagcggattgacaagaaagtggaaggcctgagcaagcacatcaagctggaagaggaacggagaagcgaggacgcccagagcaaggccgccctgaccgactggctgcgggctaaggccagcttcgtgatcgagggcctgaaggaggccgacaaggacgagttctgcagatgcgagctgaagctgcagaagtggtacggggacctgcggggaaagcccttcgccatcgaagccgagaacagcatcctggacatcagcggcttcagcaagcagtacaactgtgccttcatctggcagaaggacggcgtgaagaagctgaacctgtacctgatcatcaactacttcaagggcggcaagctgcggttcaagaagatcaaacctgaagccttcgaagccaacagattctacaccgtgatcaacaaaaagagcggcgagatcgtgcccatggaggtgaacttcaacttcgacgaccccaacctgatcatcctgcctctggcctttggcaagagacagggcagagaattcatctggaacgacctgctgtccctggaaaccggcagcctgaagctggccaacggaagagtgatcgagaagacactgtacaacagaagaacccggcaggatgagcctgccctgttcgtggccctgaccttcgagcggcgggaggtcctggactcctccaatatcaaaccaatgaacctgatcggcgtggcaagaggcgaaaacatccccgccgtgatcgccctgaccgaccccgagggctgcccactgagccggtttaaggatagcctgggaaacccaacccacatcctgagaatcggcgagagctataaggagaagcagcggaccatccaggccaagaaggaggtggagcagcggagagccggcggctacagccggaagtacgccagcaaagccaagaatctggcagacgatatggtgagaaacaccgctagagatctgctgtactacgccgtgacccaggatgccatgctgatcttcgccaacctgagccggggcttcggccggcagggcaagcggaccttcatggccgagagacagtacacacggatggaggactggctgaccgccaagctggcctacgagggcctgagcaagacctacctgtccaagacactggcccagtacacctccaagacatgcagcaactgtgggtttaccatcaccagcgccgactacgacagggtgctggagaagctgaagaagacagcaacaggctggatgaccacaattaacggcaaggagctgaaggtggagggccagattacctactacaacagatacaagagacagaacgtagtcaaggacctgtccgtcgagctggatagactgagcgaagaatctgtgaacaacgacatctcctcctggacaaagggcagaagcggagaagctctgagcctcctgaagaaaagattctcccatagacccgtgcaggagaagttcgtgtgcctgaactgcggcttcgagacacacgcagccgagcaagccgccctgaacatcgccagatcctggctgttcctgcggagccaggagtacaagaaataccagacaaacaagacaaccggcaacaccgataagagagccttcgtcgagacctggcagtccttttaccggaagaagcttaaggaggtgtggaaacctgccgtgcggtctggcggatctggcggaggctccacaagcggcagcgtgatgttcagcgacgtgagcgtggacttcagccaggacgagtgggagtgcctggaccccgtgcagagggacctgtacagggaggtgatgctggagaactacagcaacctggtgagcgtgggcctgtacatccccaagccccaggtgatcagcctgctggagcagggcaaggagccctggatggtgggcaaggagctgaccaggggcctgtgcagcgacctggagagcatgtgcgagaccagccccaagaaaaagagaaaagtctaagctgccttctgcggggcttgccttctggccatgcccttcttctctcccttgcacctgtacctcttggtctttgaataaagcctgagtaggaaggctagcaaaaaaaaaaaaaaaaaaaaaaaaaaaaaaaaaaaaaaaaaaaaaaaaaaaaaaaaaaaaaaaaaaaaaaaaaaaaaaaa

SEQ ID NO: 6220 - RNA, 5797 nt, synthetic construct
  source 1..5797: mol_type = other RNA
aggaaataagagagaaaagaagagtaagaagaaatataagagccaccatggcccctaagaagaagcgtaaagtgagccggatggaacgcctcgtctacgaggtgcggcagaagtgcagaaacatcgaggacatctgcatctcctgcggatctctgaacgtgaccctggagcacccactgttcatcggcggcatgtgccagaactgtaaaaactgttttctggagtgtgcctatcaatacgacgatgacggctaccagagctactgcaccatctgttgcggcggaagagaggtgctgatgtgtggaaataacaactgctgccggtgcttctgcgtggaatgcgtggacctgctggtgggccccggcgccgcccaggccgctattaaggaagatccttggaactgctacatgtgcggccacaagggcacatacggcctgctgagacggagagaggactggcctagcagactgcagatgttcttcgccaataaccacgaccaggagttcgacccccctaaggtgtaccctcccgtccccgccgagaagagaaagcccatccgggtcctgagcctgttcgatggcatcgccaccggtctgctggtgctgaaggacctgggcatccaggtggataggtacattgcctccgaggtgtgcgaggactccatcaccgtgggaatggtgcgtcatcagggcaagatcatgtacgtgggcgacgtgcggagcgtgacacagaagcatatccaggagtggggccctttcgacctggtgatcggcggcagcccttgcaatgacctgagcatcgtgaacccagcccggaagggcctgtacgagggaaccggcagactgttcttcgagttttacagactgctgcacgacgcccggcctaaggaaggcgacgaccggcccttcttttggctgttcgagaatgtggtggccatgggagtcagcgacaagcgggatattagccggttcctggagagcaaccccgtgatgatcgatgccaaggaagtgagcgccgcccaccgggccagatacttctggggcaatctgcctggcatgaacagacccctggccagcaccgtgaacgacaagctggagctgcaggagtgcctggagcacggccggatcgccaagttcagcaaggtgagaaccatcaccacccgaagcaacagcatcaaacaaggcaaggaccagcactttcctgtgttcatgaacgagaaggaggacatcctgtggtgtaccgagatggagagagtgttcgggttcccagtccactacacagatgtcagcaacatgtctagactggccagacagagactgctgggaagaagctggtccgtccctgtgatcagacacctgttcgcccctctgaaggagtacttcgcctgcgtgagcagcggcaacagcaacgccaacagccggggccccagcttctctagcggcctggtgccactgtccctgagagggagccacatgggccccatggagatctacaaaaccgtgagcgcctggaagcggcagcctgtgcgcgtgctgagcctgtttcggaatatcgataaagtcctgaaaagcctgggattcctggagagcggctctggctccggcggtggcaccctgaagtacgtggaggatgtgacaaacgtggtcagacgggatgtggagaagtggggccccttcgatctggtgtacggcagcacccaacccctgggcagctcttgtgaccggtgccctggctggtacatgtttcagttccaccggatcctgcagtacgccctgccgagacaggagtcccagcggccattcttttggattttcatggacaacttgctgctgaccgaggatgaccaggaaactaccactcggttcctgcagaccgaagccgtgaccctgcaggacgtgagaggccgggactaccagaacgccatgcgggtgtggtccaacatccctggactgaaaagcaagcacgcacctctgacccctaaagaagaggagtacctgcaggcccaggtgcggagcagaagcaagctggacgcccctaaggtggatctgctggtgaagaattgcctcctgcccctgagagagtacttcaagtatttcagccagaatagtctgcccctgggcggcccaagcagcggcgcccctcctcccagcggcggcagcccagccggctccccaacctctaccgaggagggcacctctgagtccgccacccccgagagcggccctggcacctccaccgagcccagcgagggcagcgcacccggcagccctgccggcagccccacctccacagaggagggaaccagcaccgagcccagcgaaggcagcgccccaggcaccagcaccgagcctagtgagggcggctctggcggcggcagcgcccaggagattaaacggatcaacaagatcagaagaagacttgtgaaagacagcaacaccaagaaggccggcaagacaggccccatgaaaaccctgctggttagagtgatgacacccgatctgagagagcggctggaaaacctgagaaagaagcctgaaaatatcccccagcccatcagcaatacatctagagccaacctgaataagctgctgaccgattacaccgaaatgaagaaggcgatcctgcatgtgtactgggaagagttccagaaggaccctgtgggcctgatgagccgggtggcccagcctgccagcaagaagatcgatcagaacaagctgaaacctgagatggacgagaagggcaacctgaccaccgccggctttgcctgctctcagtgtggccagcccctgttcgtgtacaagctggagcaggtgtctgagaagggcaaggcttacaccaactacttcggacggtgcaatgtggccgagcacgaaaagctgatcctgctggcccagctgaagcccgagaaggatagcgacgaagccgtgacatatagcctgggaaagtttgggcagagggccctggatttctacagcattcatgtgaccaaggagtccacccaccccgtgaagcccctggcccagatcgccggaaacagatacgcctccggacctgtgggaaaggccctgagcgacgcatgtatgggcacaatcgcctccttcctgtctaagtaccaggacatcatcatcgaacaccagaaggtggtgaagggcaaccagaagagactggagagcctgcgggagctggccggcaaggaaaacctggaataccctagcgtgaccctgccacctcagcctcacaccaaggagggcgttgatgcctacaacgaagtgatcgcccgggtgcgaatgtgggtgaacctgaacctgtggcagaagctgaagctaagcagagatgatgccaagcctctgctgagactgaagggattcccttcctttcctctggtcgagagacaggccaacgaagtggactggtgggacatggtgtgtaacgtgaagaagctgatcaacgagaaaaaggaggatggcaaggtgttttggcagaatctggctggctacaagagacaggaagccctgagaccatacctgagcagcgaggaagatcggaagaagggaaagaaattcgctcggtaccagctgggcgacctgctgctgcacctggaaaagaagcacggcgaggactggggaaaggtgtacgacgaggcctgggagcggattgacaagaaagtggaaggcctgagcaagcacatcaagctggaagaggaacggagaagcgaggacgcccagagcaaggccgccctgaccgactggctgcgggctaaggccagcttcgtgatcgagggcctgaaggaggccgacaaggacgagttctgcagatgcgagctgaagctgcagaagtggtacggggacctgcggggaaagcccttcgccatcgaagccgagaacagcatcctggacatcagcggcttcagcaagcagtacaactgtgccttcatctggcagaaggacggcgtgaagaagctgaacctgtacctgatcatcaactacttcaagggcggcaagctgcggttcaagaagatcaaacctgaagccttcgaagccaacagattctacaccgtgatcaacaaaaagagcggcgagatcgtgcccatggaggtgaacttcaacttcgacgaccccaacctgatcatcctgcctctggcctttggcaagagacagggcagagaattcatctggaacgacctgctgtccctggaaaccggcagcctgaagctggccaacggaagagtgatcgagaagacactgtacaacagaagaacccggcaggatgagcctgccctgttcgtggccctgaccttcgagcggcgggaggtcctggactcctccaatatcaaaccaatgaacctgatcggcgtggcaagaggcgaaaacatccccgccgtgatcgccctgaccgaccccgagggctgcccactgagccggtttaaggatagcctgggaaacccaacccacatcctgagaatcggcgagagctataaggagaagcagcggaccatccaggccaagaaggaggtggagcagcggagagccggcggctacagccggaagtacgccagcaaagccaagaatctggcagacgatatggtgagaaacaccgctagagatctgctgtactacgccgtgacccaggatgccatgctgatcttcgccaacctgagccggggcttcggccggcagggcaagcggaccttcatggccgagagacagtacacacggatggaggactggctgaccgccaagctggcctacgagggcctgagcaagacctacctgtccaagacactggcccagtacacctccaagacatgcagcaactgtgggtttaccatcaccagcgccgactacgacagggtgctggagaagctgaagaagacagcaacaggctggatgaccacaattaacggcaaggagctgaaggtggagggccagattacctactacaacagatacaagagacagaacgtagtcaaggacctgtccgtcgagctggatagactgagcgaagaatctgtgaacaacgacatctcctcctggacaaagggcagaagcggagaagctctgagcctcctgaagaaaagattctcccatagacccgtgcaggagaagttcgtgtgcctgaactgcggcttcgagacacacgcagccgagcaagccgccctgaacatcgccagatcctggctgttcctgcggagccaggagtacaagaaataccagacaaacaagacaaccggcaacaccgataagagagccttcgtcgagacctggcagtccttttaccggaagaagcttaaggaggtgtggaaacctgccgtgcggtctggcggatctggcggaggctccacaagcggcagcgtgtgcgaggtgagcgtgagcttcgaggacgtgaccgtggacttcagcagggaggagtggcagcacctggaccccgcccagaggaggctgtactgggacgtgaccctggagaactacagccacctgtgcagcgtgggctaccaggtgcccaagcccgaggtgatcttcaagctggagcagggcgagggcccctggaccctggaggaggagaccccccaccagagctgcagcggcgccaccagccccaagaaaaagagaaaagtctaagctgccttctgcggggcttgccttctggccatgcccttcttctctcccttgcacctgtacctcttggtctttgaataaagcctgagtaggaaggctagcaaaaaaaaaaaaaaaaaaaaaaaaaaaaaaaaaaaaaaaaaaaaaaaaaaaaaaaaaaaaaaaaaaaaaaaaaaaaaaaa

SEQ ID NO: 6221 - RNA, 5797 nt, synthetic construct
  source 1..5797: mol_type = other RNA
aggaaataagagagaaaagaagagtaagaagaaatataagagccaccatggcccctaagaagaagcgtaaagtgagccggatggaacgcctcgtctacgaggtgcggcagaagtgcagaaacatcgaggacatctgcatctcctgcggatctctgaacgtgaccctggagcacccactgttcatcggcggcatgtgccagaactgtaaaaactgttttctggagtgtgcctatcaatacgacgatgacggctaccagagctactgcaccatctgttgcggcggaagagaggtgctgatgtgtggaaataacaactgctgccggtgcttctgcgtggaatgcgtggacctgctggtgggccccggcgccgcccaggccgctattaaggaagatccttggaactgctacatgtgcggccacaagggcacatacggcctgctgagacggagagaggactggcctagcagactgcagatgttcttcgccaataaccacgaccaggagttcgacccccctaaggtgtaccctcccgtccccgccgagaagagaaagcccatccgggtcctgagcctgttcgatggcatcgccaccggtctgctggtgctgaaggacctgggcatccaggtggataggtacattgcctccgaggtgtgcgaggactccatcaccgtgggaatggtgcgtcatcagggcaagatcatgtacgtgggcgacgtgcggagcgtgacacagaagcatatccaggagtggggccctttcgacctggtgatcggcggcagcccttgcaatgacctgagcatcgtgaacccagcccggaagggcctgtacgagggaaccggcagactgttcttcgagttttacagactgctgcacgacgcccggcctaaggaaggcgacgaccggcccttcttttggctgttcgagaatgtggtggccatgggagtcagcgacaagcgggatattagccggttcctggagagcaaccccgtgatgatcgatgccaaggaagtgagcgccgcccaccgggccagatacttctggggcaatctgcctggcatgaacagacccctggccagcaccgtgaacgacaagctggagctgcaggagtgcctggagcacggccggatcgccaagttcagcaaggtgagaaccatcaccacccgaagcaacagcatcaaacaaggcaaggaccagcactttcctgtgttcatgaacgagaaggaggacatcctgtggtgtaccgagatggagagagtgttcgggttcccagtccactacacagatgtcagcaacatgtctagactggccagacagagactgctgggaagaagctggtccgtccctgtgatcagacacctgttcgcccctctgaaggagtacttcgcctgcgtgagcagcggcaacagcaacgccaacagccggggccccagcttctctagcggcctggtgccactgtccctgagagggagccacatgggccccatggagatctacaaaaccgtgagcgcctggaagcggcagcctgtgcgcgtgctgagcctgtttcggaatatcgataaagtcctgaaaagcctgggattcctggagagcggctctggctccggcggtggcaccctgaagtacgtggaggatgtgacaaacgtggtcagacgggatgtggagaagtggggccccttcgatctggtgtacggcagcacccaacccctgggcagctcttgtgaccggtgccctggctggtacatgtttcagttccaccggatcctgcagtacgccctgccgagacaggagtcccagcggccattcttttggattttcatggacaacttgctgctgaccgaggatgaccaggaaactaccactcggttcctgcagaccgaagccgtgaccctgcaggacgtgagaggccgggactaccagaacgccatgcgggtgtggtccaacatccctggactgaaaagcaagcacgcacctctgacccctaaagaagaggagtacctgcaggcccaggtgcggagcagaagcaagctggacgcccctaaggtggatctgctggtgaagaattgcctcctgcccctgagagagtacttcaagtatttcagccagaatagtctgcccctgggcggcccaagcagcggcgcccctcctcccagcggcggcagcccagccggctccccaacctctaccgaggagggcacctctgagtccgccacccccgagagcggccctggcacctccaccgagcccagcgagggcagcgcacccggcagccctgccggcagccccacctccacagaggagggaaccagcaccgagcccagcgaaggcagcgccccaggcaccagcaccgagcctagtgagggcggctctggcggcggcagcgcccaggagattaaacggatcaacaagatcagaagaagacttgtgaaagacagcaacaccaagaaggccggcaagacaggccccatgaaaaccctgctggttagagtgatgacacccgatctgagagagcggctggaaaacctgagaaagaagcctgaaaatatcccccagcccatcagcaatacatctagagccaacctgaataagctgctgaccgattacaccgaaatgaagaaggcgatcctgcatgtgtactgggaagagttccagaaggaccctgtgggcctgatgagccgggtggcccagcctgccagcaagaagatcgatcagaacaagctgaaacctgagatggacgagaagggcaacctgaccaccgccggctttgcctgctctcagtgtggccagcccctgttcgtgtacaagctggagcaggtgtctgagaagggcaaggcttacaccaactacttcggacggtgcaatgtggccgagcacgaaaagctgatcctgctggcccagctgaagcccgagaaggatagcgacgaagccgtgacatatagcctgggaaagtttgggcagagggccctggatttctacagcattcatgtgaccaaggagtccacccaccccgtgaagcccctggcccagatcgccggaaacagatacgcctccggacctgtgggaaaggccctgagcgacgcatgtatgggcacaatcgcctccttcctgtctaagtaccaggacatcatcatcgaacaccagaaggtggtgaagggcaaccagaagagactggagagcctgcgggagctggccggcaaggaaaacctggaataccctagcgtgaccctgccacctcagcctcacaccaaggagggcgttgatgcctacaacgaagtgatcgcccgggtgcgaatgtgggtgaacctgaacctgtggcagaagctgaagctaagcagagatgatgccaagcctctgctgagactgaagggattcccttcctttcctctggtcgagagacaggccaacgaagtggactggtgggacatggtgtgtaacgtgaagaagctgatcaacgagaaaaaggaggatggcaaggtgttttggcagaatctggctggctacaagagacaggaagccctgagaccatacctgagcagcgaggaagatcggaagaagggaaagaaattcgctcggtaccagctgggcgacctgctgctgcacctggaaaagaagcacggcgaggactggggaaaggtgtacgacgaggcctgggagcggattgacaagaaagtggaaggcctgagcaagcacatcaagctggaagaggaacggagaagcgaggacgcccagagcaaggccgccctgaccgactggctgcgggctaaggccagcttcgtgatcgagggcctgaaggaggccgacaaggacgagttctgcagatgcgagctgaagctgcagaagtggtacggggacctgcggggaaagcccttcgccatcgaagccgagaacagcatcctggacatcagcggcttcagcaagcagtacaactgtgccttcatctggcagaaggacggcgtgaagaagctgaacctgtacctgatcatcaactacttcaagggcggcaagctgcggttcaagaagatcaaacctgaagccttcgaagccaacagattctacaccgtgatcaacaaaaagagcggcgagatcgtgcccatggaggtgaacttcaacttcgacgaccccaacctgatcatcctgcctctggcctttggcaagagacagggcagagaattcatctggaacgacctgctgtccctggaaaccggcagcctgaagctggccaacggaagagtgatcgagaagacactgtacaacagaagaacccggcaggatgagcctgccctgttcgtggccctgaccttcgagcggcgggaggtcctggactcctccaatatcaaaccaatgaacctgatcggcgtggcaagaggcgaaaacatccccgccgtgatcgccctgaccgaccccgagggctgcccactgagccggtttaaggatagcctgggaaacccaacccacatcctgagaatcggcgagagctataaggagaagcagcggaccatccaggccaagaaggaggtggagcagcggagagccggcggctacagccggaagtacgccagcaaagccaagaatctggcagacgatatggtgagaaacaccgctagagatctgctgtactacgccgtgacccaggatgccatgctgatcttcgccaacctgagccggggcttcggccggcagggcaagcggaccttcatggccgagagacagtacacacggatggaggactggctgaccgccaagctggcctacgagggcctgagcaagacctacctgtccaagacactggcccagtacacctccaagacatgcagcaactgtgggtttaccatcaccagcgccgactacgacagggtgctggagaagctgaagaagacagcaacaggctggatgaccacaattaacggcaaggagctgaaggtggagggccagattacctactacaacagatacaagagacagaacgtagtcaaggacctgtccgtcgagctggatagactgagcgaagaatctgtgaacaacgacatctcctcctggacaaagggcagaagcggagaagctctgagcctcctgaagaaaagattctcccatagacccgtgcaggagaagttcgtgtgcctgaactgcggcttcgagacacacgcagccgagcaagccgccctgaacatcgccagatcctggctgttcctgcggagccaggagtacaagaaataccagacaaacaagacaaccggcaacaccgataagagagccttcgtcgagacctggcagtccttttaccggaagaagcttaaggaggtgtggaaacctgccgtgcggtctggcggatctggcggaggctccacaagcatggtgttcgaggacgtggccgtgtacttcagcagggaggagtggggcctgctggacagcgcccagagggccctgtacaggcaggtgatgctggagaacttcgccctggtggccagcctgggcctgagcgccagcaggcccaggatcatcctgcagctggagaggggcgaggagccctgggtgctgagcggcctggacgtggccctggccagggacgcccagaggaggcccagccccgcccagaccagccccaagaaaaagagaaaagtctaagctgccttctgcggggcttgccttctggccatgcccttcttctctcccttgcacctgtacctcttggtctttgaataaagcctgagtaggaaggctagcaaaaaaaaaaaaaaaaaaaaaaaaaaaaaaaaaaaaaaaaaaaaaaaaaaaaaaaaaaaaaaaaaaaaaaaaaaaaaaaa

SEQ ID NO: 6222 - RNA, 5797 nt, synthetic construct
  source 1..5797: mol_type = other RNA
aggaaataagagagaaaagaagagtaagaagaaatataagagccaccatggcccctaagaagaagcgtaaagtgagccggatggaacgcctcgtctacgaggtgcggcagaagtgcagaaacatcgaggacatctgcatctcctgcggatctctgaacgtgaccctggagcacccactgttcatcggcggcatgtgccagaactgtaaaaactgttttctggagtgtgcctatcaatacgacgatgacggctaccagagctactgcaccatctgttgcggcggaagagaggtgctgatgtgtggaaataacaactgctgccggtgcttctgcgtggaatgcgtggacctgctggtgggccccggcgccgcccaggccgctattaaggaagatccttggaactgctacatgtgcggccacaagggcacatacggcctgctgagacggagagaggactggcctagcagactgcagatgttcttcgccaataaccacgaccaggagttcgacccccctaaggtgtaccctcccgtccccgccgagaagagaaagcccatccgggtcctgagcctgttcgatggcatcgccaccggtctgctggtgctgaaggacctgggcatccaggtggataggtacattgcctccgaggtgtgcgaggactccatcaccgtgggaatggtgcgtcatcagggcaagatcatgtacgtgggcgacgtgcggagcgtgacacagaagcatatccaggagtggggccctttcgacctggtgatcggcggcagcccttgcaatgacctgagcatcgtgaacccagcccggaagggcctgtacgagggaaccggcagactgttcttcgagttttacagactgctgcacgacgcccggcctaaggaaggcgacgaccggcccttcttttggctgttcgagaatgtggtggccatgggagtcagcgacaagcgggatattagccggttcctggagagcaaccccgtgatgatcgatgccaaggaagtgagcgccgcccaccgggccagatacttctggggcaatctgcctggcatgaacagacccctggccagcaccgtgaacgacaagctggagctgcaggagtgcctggagcacggccggatcgccaagttcagcaaggtgagaaccatcaccacccgaagcaacagcatcaaacaaggcaaggaccagcactttcctgtgttcatgaacgagaaggaggacatcctgtggtgtaccgagatggagagagtgttcgggttcccagtccactacacagatgtcagcaacatgtctagactggccagacagagactgctgggaagaagctggtccgtccctgtgatcagacacctgttcgcccctctgaaggagtacttcgcctgcgtgagcagcggcaacagcaacgccaacagccggggccccagcttctctagcggcctggtgccactgtccctgagagggagccacatgggccccatggagatctacaaaaccgtgagcgcctggaagcggcagcctgtgcgcgtgctgagcctgtttcggaatatcgataaagtcctgaaaagcctgggattcctggagagcggctctggctccggcggtggcaccctgaagtacgtggaggatgtgacaaacgtggtcagacgggatgtggagaagtggggccccttcgatctggtgtacggcagcacccaacccctgggcagctcttgtgaccggtgccctggctggtacatgtttcagttccaccggatcctgcagtacgccctgccgagacaggagtcccagcggccattcttttggattttcatggacaacttgctgctgaccgaggatgaccaggaaactaccactcggttcctgcagaccgaagccgtgaccctgcaggacgtgagaggccgggactaccagaacgccatgcgggtgtggtccaacatccctggactgaaaagcaagcacgcacctctgacccctaaagaagaggagtacctgcaggcccaggtgcggagcagaagcaagctggacgcccctaaggtggatctgctggtgaagaattgcctcctgcccctgagagagtacttcaagtatttcagccagaatagtctgcccctgggcggcccaagcagcggcgcccctcctcccagcggcggcagcccagccggctccccaacctctaccgaggagggcacctctgagtccgccacccccgagagcggccctggcacctccaccgagcccagcgagggcagcgcacccggcagccctgccggcagccccacctccacagaggagggaaccagcaccgagcccagcgaaggcagcgccccaggcaccagcaccgagcctagtgagggcggctctggcggcggcagcgcccaggagattaaacggatcaacaagatcagaagaagacttgtgaaagacagcaacaccaagaaggccggcaagacaggccccatgaaaaccctgctggttagagtgatgacacccgatctgagagagcggctggaaaacctgagaaagaagcctgaaaatatcccccagcccatcagcaatacatctagagccaacctgaataagctgctgaccgattacaccgaaatgaagaaggcgatcctgcatgtgtactgggaagagttccagaaggaccctgtgggcctgatgagccgggtggcccagcctgccagcaagaagatcgatcagaacaagctgaaacctgagatggacgagaagggcaacctgaccaccgccggctttgcctgctctcagtgtggccagcccctgttcgtgtacaagctggagcaggtgtctgagaagggcaaggcttacaccaactacttcggacggtgcaatgtggccgagcacgaaaagctgatcctgctggcccagctgaagcccgagaaggatagcgacgaagccgtgacatatagcctgggaaagtttgggcagagggccctggatttctacagcattcatgtgaccaaggagtccacccaccccgtgaagcccctggcccagatcgccggaaacagatacgcctccggacctgtgggaaaggccctgagcgacgcatgtatgggcacaatcgcctccttcctgtctaagtaccaggacatcatcatcgaacaccagaaggtggtgaagggcaaccagaagagactggagagcctgcgggagctggccggcaaggaaaacctggaataccctagcgtgaccctgccacctcagcctcacaccaaggagggcgttgatgcctacaacgaagtgatcgcccgggtgcgaatgtgggtgaacctgaacctgtggcagaagctgaagctaagcagagatgatgccaagcctctgctgagactgaagggattcccttcctttcctctggtcgagagacaggccaacgaagtggactggtgggacatggtgtgtaacgtgaagaagctgatcaacgagaaaaaggaggatggcaaggtgttttggcagaatctggctggctacaagagacaggaagccctgagaccatacctgagcagcgaggaagatcggaagaagggaaagaaattcgctcggtaccagctgggcgacctgctgctgcacctggaaaagaagcacggcgaggactggggaaaggtgtacgacgaggcctgggagcggattgacaagaaagtggaaggcctgagcaagcacatcaagctggaagaggaacggagaagcgaggacgcccagagcaaggccgccctgaccgactggctgcgggctaaggccagcttcgtgatcgagggcctgaaggaggccgacaaggacgagttctgcagatgcgagctgaagctgcagaagtggtacggggacctgcggggaaagcccttcgccatcgaagccgagaacagcatcctggacatcagcggcttcagcaagcagtacaactgtgccttcatctggcagaaggacggcgtgaagaagctgaacctgtacctgatcatcaactacttcaagggcggcaagctgcggttcaagaagatcaaacctgaagccttcgaagccaacagattctacaccgtgatcaacaaaaagagcggcgagatcgtgcccatggaggtgaacttcaacttcgacgaccccaacctgatcatcctgcctctggcctttggcaagagacagggcagagaattcatctggaacgacctgctgtccctggaaaccggcagcctgaagctggccaacggaagagtgatcgagaagacactgtacaacagaagaacccggcaggatgagcctgccctgttcgtggccctgaccttcgagcggcgggaggtcctggactcctccaatatcaaaccaatgaacctgatcggcgtggcaagaggcgaaaacatccccgccgtgatcgccctgaccgaccccgagggctgcccactgagccggtttaaggatagcctgggaaacccaacccacatcctgagaatcggcgagagctataaggagaagcagcggaccatccaggccaagaaggaggtggagcagcggagagccggcggctacagccggaagtacgccagcaaagccaagaatctggcagacgatatggtgagaaacaccgctagagatctgctgtactacgccgtgacccaggatgccatgctgatcttcgccaacctgagccggggcttcggccggcagggcaagcggaccttcatggccgagagacagtacacacggatggaggactggctgaccgccaagctggcctacgagggcctgagcaagacctacctgtccaagacactggcccagtacacctccaagacatgcagcaactgtgggtttaccatcaccagcgccgactacgacagggtgctggagaagctgaagaagacagcaacaggctggatgaccacaattaacggcaaggagctgaaggtggagggccagattacctactacaacagatacaagagacagaacgtagtcaaggacctgtccgtcgagctggatagactgagcgaagaatctgtgaacaacgacatctcctcctggacaaagggcagaagcggagaagctctgagcctcctgaagaaaagattctcccatagacccgtgcaggagaagttcgtgtgcctgaactgcggcttcgagacacacgcagccgagcaagccgccctgaacatcgccagatcctggctgttcctgcggagccaggagtacaagaaataccagacaaacaagacaaccggcaacaccgataagagagccttcgtcgagacctggcagtccttttaccggaagaagcttaaggaggtgtggaaacctgccgtgcggtctggcggatctggcggaggctccacaagcagcatcaccttcaaggacgtggtggtggacttcacccaggaggagtggtgcctgctggaccccagccagaaggagctgtacagggaggtgatgctggagaacgtgcagaacctgttcttcgtggaggccgagaccaacttcgaggtgaaggagatgagcaccaagatgaggctgttcgtggagggcagcaacagccccaggggcatgaagaggaacccctgcgacttcctgttcagggagatcaccagccccaagaaaaagagaaaagtctaagctgccttctgcggggcttgccttctggccatgcccttcttctctcccttgcacctgtacctcttggtctttgaataaagcctgagtaggaaggctagcaaaaaaaaaaaaaaaaaaaaaaaaaaaaaaaaaaaaaaaaaaaaaaaaaaaaaaaaaaaaaaaaaaaaaaaaaaaaaaaa

SEQ ID NO: 6223 - RNA, 5797 nt, synthetic construct
  source 1..5797: mol_type = other RNA
aggaaataagagagaaaagaagagtaagaagaaatataagagccaccatggcccctaagaagaagcgtaaagtgagccggatggaacgcctcgtctacgaggtgcggcagaagtgcagaaacatcgaggacatctgcatctcctgcggatctctgaacgtgaccctggagcacccactgttcatcggcggcatgtgccagaactgtaaaaactgttttctggagtgtgcctatcaatacgacgatgacggctaccagagctactgcaccatctgttgcggcggaagagaggtgctgatgtgtggaaataacaactgctgccggtgcttctgcgtggaatgcgtggacctgctggtgggccccggcgccgcccaggccgctattaaggaagatccttggaactgctacatgtgcggccacaagggcacatacggcctgctgagacggagagaggactggcctagcagactgcagatgttcttcgccaataaccacgaccaggagttcgacccccctaaggtgtaccctcccgtccccgccgagaagagaaagcccatccgggtcctgagcctgttcgatggcatcgccaccggtctgctggtgctgaaggacctgggcatccaggtggataggtacattgcctccgaggtgtgcgaggactccatcaccgtgggaatggtgcgtcatcagggcaagatcatgtacgtgggcgacgtgcggagcgtgacacagaagcatatccaggagtggggccctttcgacctggtgatcggcggcagcccttgcaatgacctgagcatcgtgaacccagcccggaagggcctgtacgagggaaccggcagactgttcttcgagttttacagactgctgcacgacgcccggcctaaggaaggcgacgaccggcccttcttttggctgttcgagaatgtggtggccatgggagtcagcgacaagcgggatattagccggttcctggagagcaaccccgtgatgatcgatgccaaggaagtgagcgccgcccaccgggccagatacttctggggcaatctgcctggcatgaacagacccctggccagcaccgtgaacgacaagctggagctgcaggagtgcctggagcacggccggatcgccaagttcagcaaggtgagaaccatcaccacccgaagcaacagcatcaaacaaggcaaggaccagcactttcctgtgttcatgaacgagaaggaggacatcctgtggtgtaccgagatggagagagtgttcgggttcccagtccactacacagatgtcagcaacatgtctagactggccagacagagactgctgggaagaagctggtccgtccctgtgatcagacacctgttcgcccctctgaaggagtacttcgcctgcgtgagcagcggcaacagcaacgccaacagccggggccccagcttctctagcggcctggtgccactgtccctgagagggagccacatgggccccatggagatctacaaaaccgtgagcgcctggaagcggcagcctgtgcgcgtgctgagcctgtttcggaatatcgataaagtcctgaaaagcctgggattcctggagagcggctctggctccggcggtggcaccctgaagtacgtggaggatgtgacaaacgtggtcagacgggatgtggagaagtggggccccttcgatctggtgtacggcagcacccaacccctgggcagctcttgtgaccggtgccctggctggtacatgtttcagttccaccggatcctgcagtacgccctgccgagacaggagtcccagcggccattcttttggattttcatggacaacttgctgctgaccgaggatgaccaggaaactaccactcggttcctgcagaccgaagccgtgaccctgcaggacgtgagaggccgggactaccagaacgccatgcgggtgtggtccaacatccctggactgaaaagcaagcacgcacctctgacccctaaagaagaggagtacctgcaggcccaggtgcggagcagaagcaagctggacgcccctaaggtggatctgctggtgaagaattgcctcctgcccctgagagagtacttcaagtatttcagccagaatagtctgcccctgggcggcccaagcagcggcgcccctcctcccagcggcggcagcccagccggctccccaacctctaccgaggagggcacctctgagtccgccacccccgagagcggccctggcacctccaccgagcccagcgagggcagcgcacccggcagccctgccggcagccccacctccacagaggagggaaccagcaccgagcccagcgaaggcagcgccccaggcaccagcaccgagcctagtgagggcggctctggcggcggcagcgcccaggagattaaacggatcaacaagatcagaagaagacttgtgaaagacagcaacaccaagaaggccggcaagacaggccccatgaaaaccctgctggttagagtgatgacacccgatctgagagagcggctggaaaacctgagaaagaagcctgaaaatatcccccagcccatcagcaatacatctagagccaacctgaataagctgctgaccgattacaccgaaatgaagaaggcgatcctgcatgtgtactgggaagagttccagaaggaccctgtgggcctgatgagccgggtggcccagcctgccagcaagaagatcgatcagaacaagctgaaacctgagatggacgagaagggcaacctgaccaccgccggctttgcctgctctcagtgtggccagcccctgttcgtgtacaagctggagcaggtgtctgagaagggcaaggcttacaccaactacttcggacggtgcaatgtggccgagcacgaaaagctgatcctgctggcccagctgaagcccgagaaggatagcgacgaagccgtgacatatagcctgggaaagtttgggcagagggccctggatttctacagcattcatgtgaccaaggagtccacccaccccgtgaagcccctggcccagatcgccggaaacagatacgcctccggacctgtgggaaaggccctgagcgacgcatgtatgggcacaatcgcctccttcctgtctaagtaccaggacatcatcatcgaacaccagaaggtggtgaagggcaaccagaagagactggagagcctgcgggagctggccggcaaggaaaacctggaataccctagcgtgaccctgccacctcagcctcacaccaaggagggcgttgatgcctacaacgaagtgatcgcccgggtgcgaatgtgggtgaacctgaacctgtggcagaagctgaagctaagcagagatgatgccaagcctctgctgagactgaagggattcccttcctttcctctggtcgagagacaggccaacgaagtggactggtgggacatggtgtgtaacgtgaagaagctgatcaacgagaaaaaggaggatggcaaggtgttttggcagaatctggctggctacaagagacaggaagccctgagaccatacctgagcagcgaggaagatcggaagaagggaaagaaattcgctcggtaccagctgggcgacctgctgctgcacctggaaaagaagcacggcgaggactggggaaaggtgtacgacgaggcctgggagcggattgacaagaaagtggaaggcctgagcaagcacatcaagctggaagaggaacggagaagcgaggacgcccagagcaaggccgccctgaccgactggctgcgggctaaggccagcttcgtgatcgagggcctgaaggaggccgacaaggacgagttctgcagatgcgagctgaagctgcagaagtggtacggggacctgcggggaaagcccttcgccatcgaagccgagaacagcatcctggacatcagcggcttcagcaagcagtacaactgtgccttcatctggcagaaggacggcgtgaagaagctgaacctgtacctgatcatcaactacttcaagggcggcaagctgcggttcaagaagatcaaacctgaagccttcgaagccaacagattctacaccgtgatcaacaaaaagagcggcgagatcgtgcccatggaggtgaacttcaacttcgacgaccccaacctgatcatcctgcctctggcctttggcaagagacagggcagagaattcatctggaacgacctgctgtccctggaaaccggcagcctgaagctggccaacggaagagtgatcgagaagacactgtacaacagaagaacccggcaggatgagcctgccctgttcgtggccctgaccttcgagcggcgggaggtcctggactcctccaatatcaaaccaatgaacctgatcggcgtggcaagaggcgaaaacatccccgccgtgatcgccctgaccgaccccgagggctgcccactgagccggtttaaggatagcctgggaaacccaacccacatcctgagaatcggcgagagctataaggagaagcagcggaccatccaggccaagaaggaggtggagcagcggagagccggcggctacagccggaagtacgccagcaaagccaagaatctggcagacgatatggtgagaaacaccgctagagatctgctgtactacgccgtgacccaggatgccatgctgatcttcgccaacctgagccggggcttcggccggcagggcaagcggaccttcatggccgagagacagtacacacggatggaggactggctgaccgccaagctggcctacgagggcctgagcaagacctacctgtccaagacactggcccagtacacctccaagacatgcagcaactgtgggtttaccatcaccagcgccgactacgacagggtgctggagaagctgaagaagacagcaacaggctggatgaccacaattaacggcaaggagctgaaggtggagggccagattacctactacaacagatacaagagacagaacgtagtcaaggacctgtccgtcgagctggatagactgagcgaagaatctgtgaacaacgacatctcctcctggacaaagggcagaagcggagaagctctgagcctcctgaagaaaagattctcccatagacccgtgcaggagaagttcgtgtgcctgaactgcggcttcgagacacacgcagccgagcaagccgccctgaacatcgccagatcctggctgttcctgcggagccaggagtacaagaaataccagacaaacaagacaaccggcaacaccgataagagagccttcgtcgagacctggcagtccttttaccggaagaagcttaaggaggtgtggaaacctgccgtgcggtctggcggatctggcggaggctccacaagccagagcctggtgaccttcggcgacgtggccgtggacttcagcagggaggagtgggagtggctgaacagcgcccagaggaccctgcacagggacgtgatgctggagaactacaggaacctggtgagcctgggcctgtgcgtgagcaagcccgacatgatcagcagcctggagcagaggaaggagccctggatgctgaagaggaagctgaccaggggcaggtgccccgacctgaagaccatgcagaccagccccaagaaaaagagaaaagtctaagctgccttctgcggggcttgccttctggccatgcccttcttctctcccttgcacctgtacctcttggtctttgaataaagcctgagtaggaaggctagcaaaaaaaaaaaaaaaaaaaaaaaaaaaaaaaaaaaaaaaaaaaaaaaaaaaaaaaaaaaaaaaaaaaaaaaaaaaaaaaa

SEQ ID NO: 6224 - RNA, 5797 nt, synthetic construct
  source 1..5797: mol_type = other RNA
aggaaataagagagaaaagaagagtaagaagaaatataagagccaccatggcccctaagaagaagcgtaaagtgagccggatggaacgcctcgtctacgaggtgcggcagaagtgcagaaacatcgaggacatctgcatctcctgcggatctctgaacgtgaccctggagcacccactgttcatcggcggcatgtgccagaactgtaaaaactgttttctggagtgtgcctatcaatacgacgatgacggctaccagagctactgcaccatctgttgcggcggaagagaggtgctgatgtgtggaaataacaactgctgccggtgcttctgcgtggaatgcgtggacctgctggtgggccccggcgccgcccaggccgctattaaggaagatccttggaactgctacatgtgcggccacaagggcacatacggcctgctgagacggagagaggactggcctagcagactgcagatgttcttcgccaataaccacgaccaggagttcgacccccctaaggtgtaccctcccgtccccgccgagaagagaaagcccatccgggtcctgagcctgttcgatggcatcgccaccggtctgctggtgctgaaggacctgggcatccaggtggataggtacattgcctccgaggtgtgcgaggactccatcaccgtgggaatggtgcgtcatcagggcaagatcatgtacgtgggcgacgtgcggagcgtgacacagaagcatatccaggagtggggccctttcgacctggtgatcggcggcagcccttgcaatgacctgagcatcgtgaacccagcccggaagggcctgtacgagggaaccggcagactgttcttcgagttttacagactgctgcacgacgcccggcctaaggaaggcgacgaccggcccttcttttggctgttcgagaatgtggtggccatgggagtcagcgacaagcgggatattagccggttcctggagagcaaccccgtgatgatcgatgccaaggaagtgagcgccgcccaccgggccagatacttctggggcaatctgcctggcatgaacagacccctggccagcaccgtgaacgacaagctggagctgcaggagtgcctggagcacggccggatcgccaagttcagcaaggtgagaaccatcaccacccgaagcaacagcatcaaacaaggcaaggaccagcactttcctgtgttcatgaacgagaaggaggacatcctgtggtgtaccgagatggagagagtgttcgggttcccagtccactacacagatgtcagcaacatgtctagactggccagacagagactgctgggaagaagctggtccgtccctgtgatcagacacctgttcgcccctctgaaggagtacttcgcctgcgtgagcagcggcaacagcaacgccaacagccggggccccagcttctctagcggcctggtgccactgtccctgagagggagccacatgggccccatggagatctacaaaaccgtgagcgcctggaagcggcagcctgtgcgcgtgctgagcctgtttcggaatatcgataaagtcctgaaaagcctgggattcctggagagcggctctggctccggcggtggcaccctgaagtacgtggaggatgtgacaaacgtggtcagacgggatgtggagaagtggggccccttcgatctggtgtacggcagcacccaacccctgggcagctcttgtgaccggtgccctggctggtacatgtttcagttccaccggatcctgcagtacgccctgccgagacaggagtcccagcggccattcttttggattttcatggacaacttgctgctgaccgaggatgaccaggaaactaccactcggttcctgcagaccgaagccgtgaccctgcaggacgtgagaggccgggactaccagaacgccatgcgggtgtggtccaacatccctggactgaaaagcaagcacgcacctctgacccctaaagaagaggagtacctgcaggcccaggtgcggagcagaagcaagctggacgcccctaaggtggatctgctggtgaagaattgcctcctgcccctgagagagtacttcaagtatttcagccagaatagtctgcccctgggcggcccaagcagcggcgcccctcctcccagcggcggcagcccagccggctccccaacctctaccgaggagggcacctctgagtccgccacccccgagagcggccctggcacctccaccgagcccagcgagggcagcgcacccggcagccctgccggcagccccacctccacagaggagggaaccagcaccgagcccagcgaaggcagcgccccaggcaccagcaccgagcctagtgagggcggctctggcggcggcagcgcccaggagattaaacggatcaacaagatcagaagaagacttgtgaaagacagcaacaccaagaaggccggcaagacaggccccatgaaaaccctgctggttagagtgatgacacccgatctgagagagcggctggaaaacctgagaaagaagcctgaaaatatcccccagcccatcagcaatacatctagagccaacctgaataagctgctgaccgattacaccgaaatgaagaaggcgatcctgcatgtgtactgggaagagttccagaaggaccctgtgggcctgatgagccgggtggcccagcctgccagcaagaagatcgatcagaacaagctgaaacctgagatggacgagaagggcaacctgaccaccgccggctttgcctgctctcagtgtggccagcccctgttcgtgtacaagctggagcaggtgtctgagaagggcaaggcttacaccaactacttcggacggtgcaatgtggccgagcacgaaaagctgatcctgctggcccagctgaagcccgagaaggatagcgacgaagccgtgacatatagcctgggaaagtttgggcagagggccctggatttctacagcattcatgtgaccaaggagtccacccaccccgtgaagcccctggcccagatcgccggaaacagatacgcctccggacctgtgggaaaggccctgagcgacgcatgtatgggcacaatcgcctccttcctgtctaagtaccaggacatcatcatcgaacaccagaaggtggtgaagggcaaccagaagagactggagagcctgcgggagctggccggcaaggaaaacctggaataccctagcgtgaccctgccacctcagcctcacaccaaggagggcgttgatgcctacaacgaagtgatcgcccgggtgcgaatgtgggtgaacctgaacctgtggcagaagctgaagctaagcagagatgatgccaagcctctgctgagactgaagggattcccttcctttcctctggtcgagagacaggccaacgaagtggactggtgggacatggtgtgtaacgtgaagaagctgatcaacgagaaaaaggaggatggcaaggtgttttggcagaatctggctggctacaagagacaggaagccctgagaccatacctgagcagcgaggaagatcggaagaagggaaagaaattcgctcggtaccagctgggcgacctgctgctgcacctggaaaagaagcacggcgaggactggggaaaggtgtacgacgaggcctgggagcggattgacaagaaagtggaaggcctgagcaagcacatcaagctggaagaggaacggagaagcgaggacgcccagagcaaggccgccctgaccgactggctgcgggctaaggccagcttcgtgatcgagggcctgaaggaggccgacaaggacgagttctgcagatgcgagctgaagctgcagaagtggtacggggacctgcggggaaagcccttcgccatcgaagccgagaacagcatcctggacatcagcggcttcagcaagcagtacaactgtgccttcatctggcagaaggacggcgtgaagaagctgaacctgtacctgatcatcaactacttcaagggcggcaagctgcggttcaagaagatcaaacctgaagccttcgaagccaacagattctacaccgtgatcaacaaaaagagcggcgagatcgtgcccatggaggtgaacttcaacttcgacgaccccaacctgatcatcctgcctctggcctttggcaagagacagggcagagaattcatctggaacgacctgctgtccctggaaaccggcagcctgaagctggccaacggaagagtgatcgagaagacactgtacaacagaagaacccggcaggatgagcctgccctgttcgtggccctgaccttcgagcggcgggaggtcctggactcctccaatatcaaaccaatgaacctgatcggcgtggcaagaggcgaaaacatccccgccgtgatcgccctgaccgaccccgagggctgcccactgagccggtttaaggatagcctgggaaacccaacccacatcctgagaatcggcgagagctataaggagaagcagcggaccatccaggccaagaaggaggtggagcagcggagagccggcggctacagccggaagtacgccagcaaagccaagaatctggcagacgatatggtgagaaacaccgctagagatctgctgtactacgccgtgacccaggatgccatgctgatcttcgccaacctgagccggggcttcggccggcagggcaagcggaccttcatggccgagagacagtacacacggatggaggactggctgaccgccaagctggcctacgagggcctgagcaagacctacctgtccaagacactggcccagtacacctccaagacatgcagcaactgtgggtttaccatcaccagcgccgactacgacagggtgctggagaagctgaagaagacagcaacaggctggatgaccacaattaacggcaaggagctgaaggtggagggccagattacctactacaacagatacaagagacagaacgtagtcaaggacctgtccgtcgagctggatagactgagcgaagaatctgtgaacaacgacatctcctcctggacaaagggcagaagcggagaagctctgagcctcctgaagaaaagattctcccatagacccgtgcaggagaagttcgtgtgcctgaactgcggcttcgagacacacgcagccgagcaagccgccctgaacatcgccagatcctggctgttcctgcggagccaggagtacaagaaataccagacaaacaagacaaccggcaacaccgataagagagccttcgtcgagacctggcagtccttttaccggaagaagcttaaggaggtgtggaaacctgccgtgcggtctggcggatctggcggaggctccacaagcccccagaagagcgtgaccttcgaggacgtggccgtgtacttcacccccaccgagtgggacggcctgagccccgcccagagggccctgtacagggacgtgatgctggagaactacggcaacgtggccagcctgggcttccccctgatcaagcccgccgtgatcctgcagctggagggcggcggcgagctgggcggccccagccccctggccgccgagaccggcaccgacccccccggcctgtggaccagccccaagaaaaagagaaaagtctaagctgccttctgcggggcttgccttctggccatgcccttcttctctcccttgcacctgtacctcttggtctttgaataaagcctgagtaggaaggctagcaaaaaaaaaaaaaaaaaaaaaaaaaaaaaaaaaaaaaaaaaaaaaaaaaaaaaaaaaaaaaaaaaaaaaaaaaaaaaaaa

SEQ ID NO: 6225 - RNA, 5797 nt, synthetic construct
  source 1..5797: mol_type = other RNA
aggaaataagagagaaaagaagagtaagaagaaatataagagccaccatggcccctaagaagaagcgtaaagtgagccggatggaacgcctcgtctacgaggtgcggcagaagtgcagaaacatcgaggacatctgcatctcctgcggatctctgaacgtgaccctggagcacccactgttcatcggcggcatgtgccagaactgtaaaaactgttttctggagtgtgcctatcaatacgacgatgacggctaccagagctactgcaccatctgttgcggcggaagagaggtgctgatgtgtggaaataacaactgctgccggtgcttctgcgtggaatgcgtggacctgctggtgggccccggcgccgcccaggccgctattaaggaagatccttggaactgctacatgtgcggccacaagggcacatacggcctgctgagacggagagaggactggcctagcagactgcagatgttcttcgccaataaccacgaccaggagttcgacccccctaaggtgtaccctcccgtccccgccgagaagagaaagcccatccgggtcctgagcctgttcgatggcatcgccaccggtctgctggtgctgaaggacctgggcatccaggtggataggtacattgcctccgaggtgtgcgaggactccatcaccgtgggaatggtgcgtcatcagggcaagatcatgtacgtgggcgacgtgcggagcgtgacacagaagcatatccaggagtggggccctttcgacctggtgatcggcggcagcccttgcaatgacctgagcatcgtgaacccagcccggaagggcctgtacgagggaaccggcagactgttcttcgagttttacagactgctgcacgacgcccggcctaaggaaggcgacgaccggcccttcttttggctgttcgagaatgtggtggccatgggagtcagcgacaagcgggatattagccggttcctggagagcaaccccgtgatgatcgatgccaaggaagtgagcgccgcccaccgggccagatacttctggggcaatctgcctggcatgaacagacccctggccagcaccgtgaacgacaagctggagctgcaggagtgcctggagcacggccggatcgccaagttcagcaaggtgagaaccatcaccacccgaagcaacagcatcaaacaaggcaaggaccagcactttcctgtgttcatgaacgagaaggaggacatcctgtggtgtaccgagatggagagagtgttcgggttcccagtccactacacagatgtcagcaacatgtctagactggccagacagagactgctgggaagaagctggtccgtccctgtgatcagacacctgttcgcccctctgaaggagtacttcgcctgcgtgagcagcggcaacagcaacgccaacagccggggccccagcttctctagcggcctggtgccactgtccctgagagggagccacatgggccccatggagatctacaaaaccgtgagcgcctggaagcggcagcctgtgcgcgtgctgagcctgtttcggaatatcgataaagtcctgaaaagcctgggattcctggagagcggctctggctccggcggtggcaccctgaagtacgtggaggatgtgacaaacgtggtcagacgggatgtggagaagtggggccccttcgatctggtgtacggcagcacccaacccctgggcagctcttgtgaccggtgccctggctggtacatgtttcagttccaccggatcctgcagtacgccctgccgagacaggagtcccagcggccattcttttggattttcatggacaacttgctgctgaccgaggatgaccaggaaactaccactcggttcctgcagaccgaagccgtgaccctgcaggacgtgagaggccgggactaccagaacgccatgcgggtgtggtccaacatccctggactgaaaagcaagcacgcacctctgacccctaaagaagaggagtacctgcaggcccaggtgcggagcagaagcaagctggacgcccctaaggtggatctgctggtgaagaattgcctcctgcccctgagagagtacttcaagtatttcagccagaatagtctgcccctgggcggcccaagcagcggcgcccctcctcccagcggcggcagcccagccggctccccaacctctaccgaggagggcacctctgagtccgccacccccgagagcggccctggcacctccaccgagcccagcgagggcagcgcacccggcagccctgccggcagccccacctccacagaggagggaaccagcaccgagcccagcgaaggcagcgccccaggcaccagcaccgagcctagtgagggcggctctggcggcggcagcgcccaggagattaaacggatcaacaagatcagaagaagacttgtgaaagacagcaacaccaagaaggccggcaagacaggccccatgaaaaccctgctggttagagtgatgacacccgatctgagagagcggctggaaaacctgagaaagaagcctgaaaatatcccccagcccatcagcaatacatctagagccaacctgaataagctgctgaccgattacaccgaaatgaagaaggcgatcctgcatgtgtactgggaagagttccagaaggaccctgtgggcctgatgagccgggtggcccagcctgccagcaagaagatcgatcagaacaagctgaaacctgagatggacgagaagggcaacctgaccaccgccggctttgcctgctctcagtgtggccagcccctgttcgtgtacaagctggagcaggtgtctgagaagggcaaggcttacaccaactacttcggacggtgcaatgtggccgagcacgaaaagctgatcctgctggcccagctgaagcccgagaaggatagcgacgaagccgtgacatatagcctgggaaagtttgggcagagggccctggatttctacagcattcatgtgaccaaggagtccacccaccccgtgaagcccctggcccagatcgccggaaacagatacgcctccggacctgtgggaaaggccctgagcgacgcatgtatgggcacaatcgcctccttcctgtctaagtaccaggacatcatcatcgaacaccagaaggtggtgaagggcaaccagaagagactggagagcctgcgggagctggccggcaaggaaaacctggaataccctagcgtgaccctgccacctcagcctcacaccaaggagggcgttgatgcctacaacgaagtgatcgcccgggtgcgaatgtgggtgaacctgaacctgtggcagaagctgaagctaagcagagatgatgccaagcctctgctgagactgaagggattcccttcctttcctctggtcgagagacaggccaacgaagtggactggtgggacatggtgtgtaacgtgaagaagctgatcaacgagaaaaaggaggatggcaaggtgttttggcagaatctggctggctacaagagacaggaagccctgagaccatacctgagcagcgaggaagatcggaagaagggaaagaaattcgctcggtaccagctgggcgacctgctgctgcacctggaaaagaagcacggcgaggactggggaaaggtgtacgacgaggcctgggagcggattgacaagaaagtggaaggcctgagcaagcacatcaagctggaagaggaacggagaagcgaggacgcccagagcaaggccgccctgaccgactggctgcgggctaaggccagcttcgtgatcgagggcctgaaggaggccgacaaggacgagttctgcagatgcgagctgaagctgcagaagtggtacggggacctgcggggaaagcccttcgccatcgaagccgagaacagcatcctggacatcagcggcttcagcaagcagtacaactgtgccttcatctggcagaaggacggcgtgaagaagctgaacctgtacctgatcatcaactacttcaagggcggcaagctgcggttcaagaagatcaaacctgaagccttcgaagccaacagattctacaccgtgatcaacaaaaagagcggcgagatcgtgcccatggaggtgaacttcaacttcgacgaccccaacctgatcatcctgcctctggcctttggcaagagacagggcagagaattcatctggaacgacctgctgtccctggaaaccggcagcctgaagctggccaacggaagagtgatcgagaagacactgtacaacagaagaacccggcaggatgagcctgccctgttcgtggccctgaccttcgagcggcgggaggtcctggactcctccaatatcaaaccaatgaacctgatcggcgtggcaagaggcgaaaacatccccgccgtgatcgccctgaccgaccccgagggctgcccactgagccggtttaaggatagcctgggaaacccaacccacatcctgagaatcggcgagagctataaggagaagcagcggaccatccaggccaagaaggaggtggagcagcggagagccggcggctacagccggaagtacgccagcaaagccaagaatctggcagacgatatggtgagaaacaccgctagagatctgctgtactacgccgtgacccaggatgccatgctgatcttcgccaacctgagccggggcttcggccggcagggcaagcggaccttcatggccgagagacagtacacacggatggaggactggctgaccgccaagctggcctacgagggcctgagcaagacctacctgtccaagacactggcccagtacacctccaagacatgcagcaactgtgggtttaccatcaccagcgccgactacgacagggtgctggagaagctgaagaagacagcaacaggctggatgaccacaattaacggcaaggagctgaaggtggagggccagattacctactacaacagatacaagagacagaacgtagtcaaggacctgtccgtcgagctggatagactgagcgaagaatctgtgaacaacgacatctcctcctggacaaagggcagaagcggagaagctctgagcctcctgaagaaaagattctcccatagacccgtgcaggagaagttcgtgtgcctgaactgcggcttcgagacacacgcagccgagcaagccgccctgaacatcgccagatcctggctgttcctgcggagccaggagtacaagaaataccagacaaacaagacaaccggcaacaccgataagagagccttcgtcgagacctggcagtccttttaccggaagaagcttaaggaggtgtggaaacctgccgtgcggtctggcggatctggcggaggctccacaagcagcaaggcccccgtgaccttcggcgacctggccatctacttcagccaggaggagtgggagtggctgagccccatccagaaggacctgtacgaggacgtgatgctggagaactacaccaacctggtgagcctgggcctgagcagcaggaggcccaacgtgatcgccctgctggagaagggcaaggccccctggatggtggagccccccaggaggaggcagggccccgacagcaggagcaagtgcaccagccccaagaaaaagagaaaagtctaagctgccttctgcggggcttgccttctggccatgcccttcttctctcccttgcacctgtacctcttggtctttgaataaagcctgagtaggaaggctagcaaaaaaaaaaaaaaaaaaaaaaaaaaaaaaaaaaaaaaaaaaaaaaaaaaaaaaaaaaaaaaaaaaaaaaaaaaaaaaaa

SEQ ID NO: 6226 - RNA, 5797 nt, synthetic construct
  source 1..5797: mol_type = other RNA
aggaaataagagagaaaagaagagtaagaagaaatataagagccaccatggcccctaagaagaagcgtaaagtgagccggatggaacgcctcgtctacgaggtgcggcagaagtgcagaaacatcgaggacatctgcatctcctgcggatctctgaacgtgaccctggagcacccactgttcatcggcggcatgtgccagaactgtaaaaactgttttctggagtgtgcctatcaatacgacgatgacggctaccagagctactgcaccatctgttgcggcggaagagaggtgctgatgtgtggaaataacaactgctgccggtgcttctgcgtggaatgcgtggacctgctggtgggccccggcgccgcccaggccgctattaaggaagatccttggaactgctacatgtgcggccacaagggcacatacggcctgctgagacggagagaggactggcctagcagactgcagatgttcttcgccaataaccacgaccaggagttcgacccccctaaggtgtaccctcccgtccccgccgagaagagaaagcccatccgggtcctgagcctgttcgatggcatcgccaccggtctgctggtgctgaaggacctgggcatccaggtggataggtacattgcctccgaggtgtgcgaggactccatcaccgtgggaatggtgcgtcatcagggcaagatcatgtacgtgggcgacgtgcggagcgtgacacagaagcatatccaggagtggggccctttcgacctggtgatcggcggcagcccttgcaatgacctgagcatcgtgaacccagcccggaagggcctgtacgagggaaccggcagactgttcttcgagttttacagactgctgcacgacgcccggcctaaggaaggcgacgaccggcccttcttttggctgttcgagaatgtggtggccatgggagtcagcgacaagcgggatattagccggttcctggagagcaaccccgtgatgatcgatgccaaggaagtgagcgccgcccaccgggccagatacttctggggcaatctgcctggcatgaacagacccctggccagcaccgtgaacgacaagctggagctgcaggagtgcctggagcacggccggatcgccaagttcagcaaggtgagaaccatcaccacccgaagcaacagcatcaaacaaggcaaggaccagcactttcctgtgttcatgaacgagaaggaggacatcctgtggtgtaccgagatggagagagtgttcgggttcccagtccactacacagatgtcagcaacatgtctagactggccagacagagactgctgggaagaagctggtccgtccctgtgatcagacacctgttcgcccctctgaaggagtacttcgcctgcgtgagcagcggcaacagcaacgccaacagccggggccccagcttctctagcggcctggtgccactgtccctgagagggagccacatgggccccatggagatctacaaaaccgtgagcgcctggaagcggcagcctgtgcgcgtgctgagcctgtttcggaatatcgataaagtcctgaaaagcctgggattcctggagagcggctctggctccggcggtggcaccctgaagtacgtggaggatgtgacaaacgtggtcagacgggatgtggagaagtggggccccttcgatctggtgtacggcagcacccaacccctgggcagctcttgtgaccggtgccctggctggtacatgtttcagttccaccggatcctgcagtacgccctgccgagacaggagtcccagcggccattcttttggattttcatggacaacttgctgctgaccgaggatgaccaggaaactaccactcggttcctgcagaccgaagccgtgaccctgcaggacgtgagaggccgggactaccagaacgccatgcgggtgtggtccaacatccctggactgaaaagcaagcacgcacctctgacccctaaagaagaggagtacctgcaggcccaggtgcggagcagaagcaagctggacgcccctaaggtggatctgctggtgaagaattgcctcctgcccctgagagagtacttcaagtatttcagccagaatagtctgcccctgggcggcccaagcagcggcgcccctcctcccagcggcggcagcccagccggctccccaacctctaccgaggagggcacctctgagtccgccacccccgagagcggccctggcacctccaccgagcccagcgagggcagcgcacccggcagccctgccggcagccccacctccacagaggagggaaccagcaccgagcccagcgaaggcagcgccccaggcaccagcaccgagcctagtgagggcggctctggcggcggcagcgcccaggagattaaacggatcaacaagatcagaagaagacttgtgaaagacagcaacaccaagaaggccggcaagacaggccccatgaaaaccctgctggttagagtgatgacacccgatctgagagagcggctggaaaacctgagaaagaagcctgaaaatatcccccagcccatcagcaatacatctagagccaacctgaataagctgctgaccgattacaccgaaatgaagaaggcgatcctgcatgtgtactgggaagagttccagaaggaccctgtgggcctgatgagccgggtggcccagcctgccagcaagaagatcgatcagaacaagctgaaacctgagatggacgagaagggcaacctgaccaccgccggctttgcctgctctcagtgtggccagcccctgttcgtgtacaagctggagcaggtgtctgagaagggcaaggcttacaccaactacttcggacggtgcaatgtggccgagcacgaaaagctgatcctgctggcccagctgaagcccgagaaggatagcgacgaagccgtgacatatagcctgggaaagtttgggcagagggccctggatttctacagcattcatgtgaccaaggagtccacccaccccgtgaagcccctggcccagatcgccggaaacagatacgcctccggacctgtgggaaaggccctgagcgacgcatgtatgggcacaatcgcctccttcctgtctaagtaccaggacatcatcatcgaacaccagaaggtggtgaagggcaaccagaagagactggagagcctgcgggagctggccggcaaggaaaacctggaataccctagcgtgaccctgccacctcagcctcacaccaaggagggcgttgatgcctacaacgaagtgatcgcccgggtgcgaatgtgggtgaacctgaacctgtggcagaagctgaagctaagcagagatgatgccaagcctctgctgagactgaagggattcccttcctttcctctggtcgagagacaggccaacgaagtggactggtgggacatggtgtgtaacgtgaagaagctgatcaacgagaaaaaggaggatggcaaggtgttttggcagaatctggctggctacaagagacaggaagccctgagaccatacctgagcagcgaggaagatcggaagaagggaaagaaattcgctcggtaccagctgggcgacctgctgctgcacctggaaaagaagcacggcgaggactggggaaaggtgtacgacgaggcctgggagcggattgacaagaaagtggaaggcctgagcaagcacatcaagctggaagaggaacggagaagcgaggacgcccagagcaaggccgccctgaccgactggctgcgggctaaggccagcttcgtgatcgagggcctgaaggaggccgacaaggacgagttctgcagatgcgagctgaagctgcagaagtggtacggggacctgcggggaaagcccttcgccatcgaagccgagaacagcatcctggacatcagcggcttcagcaagcagtacaactgtgccttcatctggcagaaggacggcgtgaagaagctgaacctgtacctgatcatcaactacttcaagggcggcaagctgcggttcaagaagatcaaacctgaagccttcgaagccaacagattctacaccgtgatcaacaaaaagagcggcgagatcgtgcccatggaggtgaacttcaacttcgacgaccccaacctgatcatcctgcctctggcctttggcaagagacagggcagagaattcatctggaacgacctgctgtccctggaaaccggcagcctgaagctggccaacggaagagtgatcgagaagacactgtacaacagaagaacccggcaggatgagcctgccctgttcgtggccctgaccttcgagcggcgggaggtcctggactcctccaatatcaaaccaatgaacctgatcggcgtggcaagaggcgaaaacatccccgccgtgatcgccctgaccgaccccgagggctgcccactgagccggtttaaggatagcctgggaaacccaacccacatcctgagaatcggcgagagctataaggagaagcagcggaccatccaggccaagaaggaggtggagcagcggagagccggcggctacagccggaagtacgccagcaaagccaagaatctggcagacgatatggtgagaaacaccgctagagatctgctgtactacgccgtgacccaggatgccatgctgatcttcgccaacctgagccggggcttcggccggcagggcaagcggaccttcatggccgagagacagtacacacggatggaggactggctgaccgccaagctggcctacgagggcctgagcaagacctacctgtccaagacactggcccagtacacctccaagacatgcagcaactgtgggtttaccatcaccagcgccgactacgacagggtgctggagaagctgaagaagacagcaacaggctggatgaccacaattaacggcaaggagctgaaggtggagggccagattacctactacaacagatacaagagacagaacgtagtcaaggacctgtccgtcgagctggatagactgagcgaagaatctgtgaacaacgacatctcctcctggacaaagggcagaagcggagaagctctgagcctcctgaagaaaagattctcccatagacccgtgcaggagaagttcgtgtgcctgaactgcggcttcgagacacacgcagccgagcaagccgccctgaacatcgccagatcctggctgttcctgcggagccaggagtacaagaaataccagacaaacaagacaaccggcaacaccgataagagagccttcgtcgagacctggcagtccttttaccggaagaagcttaaggaggtgtggaaacctgccgtgcggtctggcggatctggcggaggctccacaagcttccagggcagcgtgagcttcaaggacgtgaccgtggacttcagcagggaggagtggcagcagctggacctggcccagaagagcctgtacagggacgtgatgctggagaactacttcaacctgatcagcgtgggctgccaggtgcccaagcccgaggtgatcttcaacctggagaggggcgagcagccctgcatgctggacggcgagatcagcagccagagctacctggaccagggcatcggcaccagccccaagaaaaagagaaaagtctaagctgccttctgcggggcttgccttctggccatgcccttcttctctcccttgcacctgtacctcttggtctttgaataaagcctgagtaggaaggctagcaaaaaaaaaaaaaaaaaaaaaaaaaaaaaaaaaaaaaaaaaaaaaaaaaaaaaaaaaaaaaaaaaaaaaaaaaaaaaaaa

SEQ ID NO: 6227 - RNA, 5797 nt, synthetic construct
  source 1..5797: mol_type = other RNA
aggaaataagagagaaaagaagagtaagaagaaatataagagccaccatggcccctaagaagaagcgtaaagtgagccggatggaacgcctcgtctacgaggtgcggcagaagtgcagaaacatcgaggacatctgcatctcctgcggatctctgaacgtgaccctggagcacccactgttcatcggcggcatgtgccagaactgtaaaaactgttttctggagtgtgcctatcaatacgacgatgacggctaccagagctactgcaccatctgttgcggcggaagagaggtgctgatgtgtggaaataacaactgctgccggtgcttctgcgtggaatgcgtggacctgctggtgggccccggcgccgcccaggccgctattaaggaagatccttggaactgctacatgtgcggccacaagggcacatacggcctgctgagacggagagaggactggcctagcagactgcagatgttcttcgccaataaccacgaccaggagttcgacccccctaaggtgtaccctcccgtccccgccgagaagagaaagcccatccgggtcctgagcctgttcgatggcatcgccaccggtctgctggtgctgaaggacctgggcatccaggtggataggtacattgcctccgaggtgtgcgaggactccatcaccgtgggaatggtgcgtcatcagggcaagatcatgtacgtgggcgacgtgcggagcgtgacacagaagcatatccaggagtggggccctttcgacctggtgatcggcggcagcccttgcaatgacctgagcatcgtgaacccagcccggaagggcctgtacgagggaaccggcagactgttcttcgagttttacagactgctgcacgacgcccggcctaaggaaggcgacgaccggcccttcttttggctgttcgagaatgtggtggccatgggagtcagcgacaagcgggatattagccggttcctggagagcaaccccgtgatgatcgatgccaaggaagtgagcgccgcccaccgggccagatacttctggggcaatctgcctggcatgaacagacccctggccagcaccgtgaacgacaagctggagctgcaggagtgcctggagcacggccggatcgccaagttcagcaaggtgagaaccatcaccacccgaagcaacagcatcaaacaaggcaaggaccagcactttcctgtgttcatgaacgagaaggaggacatcctgtggtgtaccgagatggagagagtgttcgggttcccagtccactacacagatgtcagcaacatgtctagactggccagacagagactgctgggaagaagctggtccgtccctgtgatcagacacctgttcgcccctctgaaggagtacttcgcctgcgtgagcagcggcaacagcaacgccaacagccggggccccagcttctctagcggcctggtgccactgtccctgagagggagccacatgggccccatggagatctacaaaaccgtgagcgcctggaagcggcagcctgtgcgcgtgctgagcctgtttcggaatatcgataaagtcctgaaaagcctgggattcctggagagcggctctggctccggcggtggcaccctgaagtacgtggaggatgtgacaaacgtggtcagacgggatgtggagaagtggggccccttcgatctggtgtacggcagcacccaacccctgggcagctcttgtgaccggtgccctggctggtacatgtttcagttccaccggatcctgcagtacgccctgccgagacaggagtcccagcggccattcttttggattttcatggacaacttgctgctgaccgaggatgaccaggaaactaccactcggttcctgcagaccgaagccgtgaccctgcaggacgtgagaggccgggactaccagaacgccatgcgggtgtggtccaacatccctggactgaaaagcaagcacgcacctctgacccctaaagaagaggagtacctgcaggcccaggtgcggagcagaagcaagctggacgcccctaaggtggatctgctggtgaagaattgcctcctgcccctgagagagtacttcaagtatttcagccagaatagtctgcccctgggcggcccaagcagcggcgcccctcctcccagcggcggcagcccagccggctccccaacctctaccgaggagggcacctctgagtccgccacccccgagagcggccctggcacctccaccgagcccagcgagggcagcgcacccggcagccctgccggcagccccacctccacagaggagggaaccagcaccgagcccagcgaaggcagcgccccaggcaccagcaccgagcctagtgagggcggctctggcggcggcagcgcccaggagattaaacggatcaacaagatcagaagaagacttgtgaaagacagcaacaccaagaaggccggcaagacaggccccatgaaaaccctgctggttagagtgatgacacccgatctgagagagcggctggaaaacctgagaaagaagcctgaaaatatcccccagcccatcagcaatacatctagagccaacctgaataagctgctgaccgattacaccgaaatgaagaaggcgatcctgcatgtgtactgggaagagttccagaaggaccctgtgggcctgatgagccgggtggcccagcctgccagcaagaagatcgatcagaacaagctgaaacctgagatggacgagaagggcaacctgaccaccgccggctttgcctgctctcagtgtggccagcccctgttcgtgtacaagctggagcaggtgtctgagaagggcaaggcttacaccaactacttcggacggtgcaatgtggccgagcacgaaaagctgatcctgctggcccagctgaagcccgagaaggatagcgacgaagccgtgacatatagcctgggaaagtttgggcagagggccctggatttctacagcattcatgtgaccaaggagtccacccaccccgtgaagcccctggcccagatcgccggaaacagatacgcctccggacctgtgggaaaggccctgagcgacgcatgtatgggcacaatcgcctccttcctgtctaagtaccaggacatcatcatcgaacaccagaaggtggtgaagggcaaccagaagagactggagagcctgcgggagctggccggcaaggaaaacctggaataccctagcgtgaccctgccacctcagcctcacaccaaggagggcgttgatgcctacaacgaagtgatcgcccgggtgcgaatgtgggtgaacctgaacctgtggcagaagctgaagctaagcagagatgatgccaagcctctgctgagactgaagggattcccttcctttcctctggtcgagagacaggccaacgaagtggactggtgggacatggtgtgtaacgtgaagaagctgatcaacgagaaaaaggaggatggcaaggtgttttggcagaatctggctggctacaagagacaggaagccctgagaccatacctgagcagcgaggaagatcggaagaagggaaagaaattcgctcggtaccagctgggcgacctgctgctgcacctggaaaagaagcacggcgaggactggggaaaggtgtacgacgaggcctgggagcggattgacaagaaagtggaaggcctgagcaagcacatcaagctggaagaggaacggagaagcgaggacgcccagagcaaggccgccctgaccgactggctgcgggctaaggccagcttcgtgatcgagggcctgaaggaggccgacaaggacgagttctgcagatgcgagctgaagctgcagaagtggtacggggacctgcggggaaagcccttcgccatcgaagccgagaacagcatcctggacatcagcggcttcagcaagcagtacaactgtgccttcatctggcagaaggacggcgtgaagaagctgaacctgtacctgatcatcaactacttcaagggcggcaagctgcggttcaagaagatcaaacctgaagccttcgaagccaacagattctacaccgtgatcaacaaaaagagcggcgagatcgtgcccatggaggtgaacttcaacttcgacgaccccaacctgatcatcctgcctctggcctttggcaagagacagggcagagaattcatctggaacgacctgctgtccctggaaaccggcagcctgaagctggccaacggaagagtgatcgagaagacactgtacaacagaagaacccggcaggatgagcctgccctgttcgtggccctgaccttcgagcggcgggaggtcctggactcctccaatatcaaaccaatgaacctgatcggcgtggcaagaggcgaaaacatccccgccgtgatcgccctgaccgaccccgagggctgcccactgagccggtttaaggatagcctgggaaacccaacccacatcctgagaatcggcgagagctataaggagaagcagcggaccatccaggccaagaaggaggtggagcagcggagagccggcggctacagccggaagtacgccagcaaagccaagaatctggcagacgatatggtgagaaacaccgctagagatctgctgtactacgccgtgacccaggatgccatgctgatcttcgccaacctgagccggggcttcggccggcagggcaagcggaccttcatggccgagagacagtacacacggatggaggactggctgaccgccaagctggcctacgagggcctgagcaagacctacctgtccaagacactggcccagtacacctccaagacatgcagcaactgtgggtttaccatcaccagcgccgactacgacagggtgctggagaagctgaagaagacagcaacaggctggatgaccacaattaacggcaaggagctgaaggtggagggccagattacctactacaacagatacaagagacagaacgtagtcaaggacctgtccgtcgagctggatagactgagcgaagaatctgtgaacaacgacatctcctcctggacaaagggcagaagcggagaagctctgagcctcctgaagaaaagattctcccatagacccgtgcaggagaagttcgtgtgcctgaactgcggcttcgagacacacgcagccgagcaagccgccctgaacatcgccagatcctggctgttcctgcggagccaggagtacaagaaataccagacaaacaagacaaccggcaacaccgataagagagccttcgtcgagacctggcagtccttttaccggaagaagcttaaggaggtgtggaaacctgccgtgcggtctggcggatctggcggaggctccacaagcatgagcctgggcagcgagctgttcagggacgtggccatcgtgttcagccaggaggagtggcagtggctggcccccgcccagagggacctgtacagggacgtgatgctggagacctacagcaacctggtgagcctgggcctggccatcagcaagcccgacgtgatcagcttcctggagcagggcaaggagccctggatggtggagagggtggtgagcaggggcctgtgccccgtgctggagagcaccagccccaagaaaaagagaaaagtctaagctgccttctgcggggcttgccttctggccatgcccttcttctctcccttgcacctgtacctcttggtctttgaataaagcctgagtaggaaggctagcaaaaaaaaaaaaaaaaaaaaaaaaaaaaaaaaaaaaaaaaaaaaaaaaaaaaaaaaaaaaaaaaaaaaaaaaaaaaaaaa

SEQ ID NO: 6228 - RNA, 5797 nt, synthetic construct
  source 1..5797: mol_type = other RNA
aggaaataagagagaaaagaagagtaagaagaaatataagagccaccatggcccctaagaagaagcgtaaagtgagccggatggaacgcctcgtctacgaggtgcggcagaagtgcagaaacatcgaggacatctgcatctcctgcggatctctgaacgtgaccctggagcacccactgttcatcggcggcatgtgccagaactgtaaaaactgttttctggagtgtgcctatcaatacgacgatgacggctaccagagctactgcaccatctgttgcggcggaagagaggtgctgatgtgtggaaataacaactgctgccggtgcttctgcgtggaatgcgtggacctgctggtgggccccggcgccgcccaggccgctattaaggaagatccttggaactgctacatgtgcggccacaagggcacatacggcctgctgagacggagagaggactggcctagcagactgcagatgttcttcgccaataaccacgaccaggagttcgacccccctaaggtgtaccctcccgtccccgccgagaagagaaagcccatccgggtcctgagcctgttcgatggcatcgccaccggtctgctggtgctgaaggacctgggcatccaggtggataggtacattgcctccgaggtgtgcgaggactccatcaccgtgggaatggtgcgtcatcagggcaagatcatgtacgtgggcgacgtgcggagcgtgacacagaagcatatccaggagtggggccctttcgacctggtgatcggcggcagcccttgcaatgacctgagcatcgtgaacccagcccggaagggcctgtacgagggaaccggcagactgttcttcgagttttacagactgctgcacgacgcccggcctaaggaaggcgacgaccggcccttcttttggctgttcgagaatgtggtggccatgggagtcagcgacaagcgggatattagccggttcctggagagcaaccccgtgatgatcgatgccaaggaagtgagcgccgcccaccgggccagatacttctggggcaatctgcctggcatgaacagacccctggccagcaccgtgaacgacaagctggagctgcaggagtgcctggagcacggccggatcgccaagttcagcaaggtgagaaccatcaccacccgaagcaacagcatcaaacaaggcaaggaccagcactttcctgtgttcatgaacgagaaggaggacatcctgtggtgtaccgagatggagagagtgttcgggttcccagtccactacacagatgtcagcaacatgtctagactggccagacagagactgctgggaagaagctggtccgtccctgtgatcagacacctgttcgcccctctgaaggagtacttcgcctgcgtgagcagcggcaacagcaacgccaacagccggggccccagcttctctagcggcctggtgccactgtccctgagagggagccacatgggccccatggagatctacaaaaccgtgagcgcctggaagcggcagcctgtgcgcgtgctgagcctgtttcggaatatcgataaagtcctgaaaagcctgggattcctggagagcggctctggctccggcggtggcaccctgaagtacgtggaggatgtgacaaacgtggtcagacgggatgtggagaagtggggccccttcgatctggtgtacggcagcacccaacccctgggcagctcttgtgaccggtgccctggctggtacatgtttcagttccaccggatcctgcagtacgccctgccgagacaggagtcccagcggccattcttttggattttcatggacaacttgctgctgaccgaggatgaccaggaaactaccactcggttcctgcagaccgaagccgtgaccctgcaggacgtgagaggccgggactaccagaacgccatgcgggtgtggtccaacatccctggactgaaaagcaagcacgcacctctgacccctaaagaagaggagtacctgcaggcccaggtgcggagcagaagcaagctggacgcccctaaggtggatctgctggtgaagaattgcctcctgcccctgagagagtacttcaagtatttcagccagaatagtctgcccctgggcggcccaagcagcggcgcccctcctcccagcggcggcagcccagccggctccccaacctctaccgaggagggcacctctgagtccgccacccccgagagcggccctggcacctccaccgagcccagcgagggcagcgcacccggcagccctgccggcagccccacctccacagaggagggaaccagcaccgagcccagcgaaggcagcgccccaggcaccagcaccgagcctagtgagggcggctctggcggcggcagcgcccaggagattaaacggatcaacaagatcagaagaagacttgtgaaagacagcaacaccaagaaggccggcaagacaggccccatgaaaaccctgctggttagagtgatgacacccgatctgagagagcggctggaaaacctgagaaagaagcctgaaaatatcccccagcccatcagcaatacatctagagccaacctgaataagctgctgaccgattacaccgaaatgaagaaggcgatcctgcatgtgtactgggaagagttccagaaggaccctgtgggcctgatgagccgggtggcccagcctgccagcaagaagatcgatcagaacaagctgaaacctgagatggacgagaagggcaacctgaccaccgccggctttgcctgctctcagtgtggccagcccctgttcgtgtacaagctggagcaggtgtctgagaagggcaaggcttacaccaactacttcggacggtgcaatgtggccgagcacgaaaagctgatcctgctggcccagctgaagcccgagaaggatagcgacgaagccgtgacatatagcctgggaaagtttgggcagagggccctggatttctacagcattcatgtgaccaaggagtccacccaccccgtgaagcccctggcccagatcgccggaaacagatacgcctccggacctgtgggaaaggccctgagcgacgcatgtatgggcacaatcgcctccttcctgtctaagtaccaggacatcatcatcgaacaccagaaggtggtgaagggcaaccagaagagactggagagcctgcgggagctggccggcaaggaaaacctggaataccctagcgtgaccctgccacctcagcctcacaccaaggagggcgttgatgcctacaacgaagtgatcgcccgggtgcgaatgtgggtgaacctgaacctgtggcagaagctgaagctaagcagagatgatgccaagcctctgctgagactgaagggattcccttcctttcctctggtcgagagacaggccaacgaagtggactggtgggacatggtgtgtaacgtgaagaagctgatcaacgagaaaaaggaggatggcaaggtgttttggcagaatctggctggctacaagagacaggaagccctgagaccatacctgagcagcgaggaagatcggaagaagggaaagaaattcgctcggtaccagctgggcgacctgctgctgcacctggaaaagaagcacggcgaggactggggaaaggtgtacgacgaggcctgggagcggattgacaagaaagtggaaggcctgagcaagcacatcaagctggaagaggaacggagaagcgaggacgcccagagcaaggccgccctgaccgactggctgcgggctaaggccagcttcgtgatcgagggcctgaaggaggccgacaaggacgagttctgcagatgcgagctgaagctgcagaagtggtacggggacctgcggggaaagcccttcgccatcgaagccgagaacagcatcctggacatcagcggcttcagcaagcagtacaactgtgccttcatctggcagaaggacggcgtgaagaagctgaacctgtacctgatcatcaactacttcaagggcggcaagctgcggttcaagaagatcaaacctgaagccttcgaagccaacagattctacaccgtgatcaacaaaaagagcggcgagatcgtgcccatggaggtgaacttcaacttcgacgaccccaacctgatcatcctgcctctggcctttggcaagagacagggcagagaattcatctggaacgacctgctgtccctggaaaccggcagcctgaagctggccaacggaagagtgatcgagaagacactgtacaacagaagaacccggcaggatgagcctgccctgttcgtggccctgaccttcgagcggcgggaggtcctggactcctccaatatcaaaccaatgaacctgatcggcgtggcaagaggcgaaaacatccccgccgtgatcgccctgaccgaccccgagggctgcccactgagccggtttaaggatagcctgggaaacccaacccacatcctgagaatcggcgagagctataaggagaagcagcggaccatccaggccaagaaggaggtggagcagcggagagccggcggctacagccggaagtacgccagcaaagccaagaatctggcagacgatatggtgagaaacaccgctagagatctgctgtactacgccgtgacccaggatgccatgctgatcttcgccaacctgagccggggcttcggccggcagggcaagcggaccttcatggccgagagacagtacacacggatggaggactggctgaccgccaagctggcctacgagggcctgagcaagacctacctgtccaagacactggcccagtacacctccaagacatgcagcaactgtgggtttaccatcaccagcgccgactacgacagggtgctggagaagctgaagaagacagcaacaggctggatgaccacaattaacggcaaggagctgaaggtggagggccagattacctactacaacagatacaagagacagaacgtagtcaaggacctgtccgtcgagctggatagactgagcgaagaatctgtgaacaacgacatctcctcctggacaaagggcagaagcggagaagctctgagcctcctgaagaaaagattctcccatagacccgtgcaggagaagttcgtgtgcctgaactgcggcttcgagacacacgcagccgagcaagccgccctgaacatcgccagatcctggctgttcctgcggagccaggagtacaagaaataccagacaaacaagacaaccggcaacaccgataagagagccttcgtcgagacctggcagtccttttaccggaagaagcttaaggaggtgtggaaacctgccgtgcggtctggcggatctggcggaggctccacaagcgcccaggagagcgtgatgttcagcgacgtgagcatcgacttcagccaggaggagtgggagtgcctgaccgacgaccagaggcacctgtacagggacgtgatgctggagaactacagcaacctggtgagcatgggccacagcatcagcaagcccaacgtgatcagctacctggagcagggcaaggagccctggctggtggacaggggcaggaccaggggccagtggcccgtgctggagagcaccaccagccccaagaaaaagagaaaagtctaagctgccttctgcggggcttgccttctggccatgcccttcttctctcccttgcacctgtacctcttggtctttgaataaagcctgagtaggaaggctagcaaaaaaaaaaaaaaaaaaaaaaaaaaaaaaaaaaaaaaaaaaaaaaaaaaaaaaaaaaaaaaaaaaaaaaaaaaaaaaaa

SEQ ID NO: 6229 - RNA, 5797 nt, synthetic construct
  source 1..5797: mol_type = other RNA
aggaaataagagagaaaagaagagtaagaagaaatataagagccaccatggcccctaagaagaagcgtaaagtgagccggatggaacgcctcgtctacgaggtgcggcagaagtgcagaaacatcgaggacatctgcatctcctgcggatctctgaacgtgaccctggagcacccactgttcatcggcggcatgtgccagaactgtaaaaactgttttctggagtgtgcctatcaatacgacgatgacggctaccagagctactgcaccatctgttgcggcggaagagaggtgctgatgtgtggaaataacaactgctgccggtgcttctgcgtggaatgcgtggacctgctggtgggccccggcgccgcccaggccgctattaaggaagatccttggaactgctacatgtgcggccacaagggcacatacggcctgctgagacggagagaggactggcctagcagactgcagatgttcttcgccaataaccacgaccaggagttcgacccccctaaggtgtaccctcccgtccccgccgagaagagaaagcccatccgggtcctgagcctgttcgatggcatcgccaccggtctgctggtgctgaaggacctgggcatccaggtggataggtacattgcctccgaggtgtgcgaggactccatcaccgtgggaatggtgcgtcatcagggcaagatcatgtacgtgggcgacgtgcggagcgtgacacagaagcatatccaggagtggggccctttcgacctggtgatcggcggcagcccttgcaatgacctgagcatcgtgaacccagcccggaagggcctgtacgagggaaccggcagactgttcttcgagttttacagactgctgcacgacgcccggcctaaggaaggcgacgaccggcccttcttttggctgttcgagaatgtggtggccatgggagtcagcgacaagcgggatattagccggttcctggagagcaaccccgtgatgatcgatgccaaggaagtgagcgccgcccaccgggccagatacttctggggcaatctgcctggcatgaacagacccctggccagcaccgtgaacgacaagctggagctgcaggagtgcctggagcacggccggatcgccaagttcagcaaggtgagaaccatcaccacccgaagcaacagcatcaaacaaggcaaggaccagcactttcctgtgttcatgaacgagaaggaggacatcctgtggtgtaccgagatggagagagtgttcgggttcccagtccactacacagatgtcagcaacatgtctagactggccagacagagactgctgggaagaagctggtccgtccctgtgatcagacacctgttcgcccctctgaaggagtacttcgcctgcgtgagcagcggcaacagcaacgccaacagccggggccccagcttctctagcggcctggtgccactgtccctgagagggagccacatgggccccatggagatctacaaaaccgtgagcgcctggaagcggcagcctgtgcgcgtgctgagcctgtttcggaatatcgataaagtcctgaaaagcctgggattcctggagagcggctctggctccggcggtggcaccctgaagtacgtggaggatgtgacaaacgtggtcagacgggatgtggagaagtggggccccttcgatctggtgtacggcagcacccaacccctgggcagctcttgtgaccggtgccctggctggtacatgtttcagttccaccggatcctgcagtacgccctgccgagacaggagtcccagcggccattcttttggattttcatggacaacttgctgctgaccgaggatgaccaggaaactaccactcggttcctgcagaccgaagccgtgaccctgcaggacgtgagaggccgggactaccagaacgccatgcgggtgtggtccaacatccctggactgaaaagcaagcacgcacctctgacccctaaagaagaggagtacctgcaggcccaggtgcggagcagaagcaagctggacgcccctaaggtggatctgctggtgaagaattgcctcctgcccctgagagagtacttcaagtatttcagccagaatagtctgcccctgggcggcccaagcagcggcgcccctcctcccagcggcggcagcccagccggctccccaacctctaccgaggagggcacctctgagtccgccacccccgagagcggccctggcacctccaccgagcccagcgagggcagcgcacccggcagccctgccggcagccccacctccacagaggagggaaccagcaccgagcccagcgaaggcagcgccccaggcaccagcaccgagcctagtgagggcggctctggcggcggcagcgcccaggagattaaacggatcaacaagatcagaagaagacttgtgaaagacagcaacaccaagaaggccggcaagacaggccccatgaaaaccctgctggttagagtgatgacacccgatctgagagagcggctggaaaacctgagaaagaagcctgaaaatatcccccagcccatcagcaatacatctagagccaacctgaataagctgctgaccgattacaccgaaatgaagaaggcgatcctgcatgtgtactgggaagagttccagaaggaccctgtgggcctgatgagccgggtggcccagcctgccagcaagaagatcgatcagaacaagctgaaacctgagatggacgagaagggcaacctgaccaccgccggctttgcctgctctcagtgtggccagcccctgttcgtgtacaagctggagcaggtgtctgagaagggcaaggcttacaccaactacttcggacggtgcaatgtggccgagcacgaaaagctgatcctgctggcccagctgaagcccgagaaggatagcgacgaagccgtgacatatagcctgggaaagtttgggcagagggccctggatttctacagcattcatgtgaccaaggagtccacccaccccgtgaagcccctggcccagatcgccggaaacagatacgcctccggacctgtgggaaaggccctgagcgacgcatgtatgggcacaatcgcctccttcctgtctaagtaccaggacatcatcatcgaacaccagaaggtggtgaagggcaaccagaagagactggagagcctgcgggagctggccggcaaggaaaacctggaataccctagcgtgaccctgccacctcagcctcacaccaaggagggcgttgatgcctacaacgaagtgatcgcccgggtgcgaatgtgggtgaacctgaacctgtggcagaagctgaagctaagcagagatgatgccaagcctctgctgagactgaagggattcccttcctttcctctggtcgagagacaggccaacgaagtggactggtgggacatggtgtgtaacgtgaagaagctgatcaacgagaaaaaggaggatggcaaggtgttttggcagaatctggctggctacaagagacaggaagccctgagaccatacctgagcagcgaggaagatcggaagaagggaaagaaattcgctcggtaccagctgggcgacctgctgctgcacctggaaaagaagcacggcgaggactggggaaaggtgtacgacgaggcctgggagcggattgacaagaaagtggaaggcctgagcaagcacatcaagctggaagaggaacggagaagcgaggacgcccagagcaaggccgccctgaccgactggctgcgggctaaggccagcttcgtgatcgagggcctgaaggaggccgacaaggacgagttctgcagatgcgagctgaagctgcagaagtggtacggggacctgcggggaaagcccttcgccatcgaagccgagaacagcatcctggacatcagcggcttcagcaagcagtacaactgtgccttcatctggcagaaggacggcgtgaagaagctgaacctgtacctgatcatcaactacttcaagggcggcaagctgcggttcaagaagatcaaacctgaagccttcgaagccaacagattctacaccgtgatcaacaaaaagagcggcgagatcgtgcccatggaggtgaacttcaacttcgacgaccccaacctgatcatcctgcctctggcctttggcaagagacagggcagagaattcatctggaacgacctgctgtccctggaaaccggcagcctgaagctggccaacggaagagtgatcgagaagacactgtacaacagaagaacccggcaggatgagcctgccctgttcgtggccctgaccttcgagcggcgggaggtcctggactcctccaatatcaaaccaatgaacctgatcggcgtggcaagaggcgaaaacatccccgccgtgatcgccctgaccgaccccgagggctgcccactgagccggtttaaggatagcctgggaaacccaacccacatcctgagaatcggcgagagctataaggagaagcagcggaccatccaggccaagaaggaggtggagcagcggagagccggcggctacagccggaagtacgccagcaaagccaagaatctggcagacgatatggtgagaaacaccgctagagatctgctgtactacgccgtgacccaggatgccatgctgatcttcgccaacctgagccggggcttcggccggcagggcaagcggaccttcatggccgagagacagtacacacggatggaggactggctgaccgccaagctggcctacgagggcctgagcaagacctacctgtccaagacactggcccagtacacctccaagacatgcagcaactgtgggtttaccatcaccagcgccgactacgacagggtgctggagaagctgaagaagacagcaacaggctggatgaccacaattaacggcaaggagctgaaggtggagggccagattacctactacaacagatacaagagacagaacgtagtcaaggacctgtccgtcgagctggatagactgagcgaagaatctgtgaacaacgacatctcctcctggacaaagggcagaagcggagaagctctgagcctcctgaagaaaagattctcccatagacccgtgcaggagaagttcgtgtgcctgaactgcggcttcgagacacacgcagccgagcaagccgccctgaacatcgccagatcctggctgttcctgcggagccaggagtacaagaaataccagacaaacaagacaaccggcaacaccgataagagagccttcgtcgagacctggcagtccttttaccggaagaagcttaaggaggtgtggaaacctgccgtgcggtctggcggatctggcggaggctccacaagcctgcaggtgagcgtgagcttcgaggacgtgaccgtggacttcagcagggaggagtggcagcacctggaccccgcccagaggaggctgtacagggacgtgaccctggagaactacagccacctgcacagcgtgggctaccaggtgcccaagcccgaggtgatcttcaagctggagcagggcgagggcccctggaccctggagggcgagaccccccaccagggctgcagcgacgaggccatcggcaccagccccaagaaaaagagaaaagtctaagctgccttctgcggggcttgccttctggccatgcccttcttctctcccttgcacctgtacctcttggtctttgaataaagcctgagtaggaaggctagcaaaaaaaaaaaaaaaaaaaaaaaaaaaaaaaaaaaaaaaaaaaaaaaaaaaaaaaaaaaaaaaaaaaaaaaaaaaaaaaa

SEQ ID NO: 6230 - RNA, 5797 nt, synthetic construct
  source 1..5797: mol_type = other RNA
aggaaataagagagaaaagaagagtaagaagaaatataagagccaccatggcccctaagaagaagcgtaaagtgagccggatggaacgcctcgtctacgaggtgcggcagaagtgcagaaacatcgaggacatctgcatctcctgcggatctctgaacgtgaccctggagcacccactgttcatcggcggcatgtgccagaactgtaaaaactgttttctggagtgtgcctatcaatacgacgatgacggctaccagagctactgcaccatctgttgcggcggaagagaggtgctgatgtgtggaaataacaactgctgccggtgcttctgcgtggaatgcgtggacctgctggtgggccccggcgccgcccaggccgctattaaggaagatccttggaactgctacatgtgcggccacaagggcacatacggcctgctgagacggagagaggactggcctagcagactgcagatgttcttcgccaataaccacgaccaggagttcgacccccctaaggtgtaccctcccgtccccgccgagaagagaaagcccatccgggtcctgagcctgttcgatggcatcgccaccggtctgctggtgctgaaggacctgggcatccaggtggataggtacattgcctccgaggtgtgcgaggactccatcaccgtgggaatggtgcgtcatcagggcaagatcatgtacgtgggcgacgtgcggagcgtgacacagaagcatatccaggagtggggccctttcgacctggtgatcggcggcagcccttgcaatgacctgagcatcgtgaacccagcccggaagggcctgtacgagggaaccggcagactgttcttcgagttttacagactgctgcacgacgcccggcctaaggaaggcgacgaccggcccttcttttggctgttcgagaatgtggtggccatgggagtcagcgacaagcgggatattagccggttcctggagagcaaccccgtgatgatcgatgccaaggaagtgagcgccgcccaccgggccagatacttctggggcaatctgcctggcatgaacagacccctggccagcaccgtgaacgacaagctggagctgcaggagtgcctggagcacggccggatcgccaagttcagcaaggtgagaaccatcaccacccgaagcaacagcatcaaacaaggcaaggaccagcactttcctgtgttcatgaacgagaaggaggacatcctgtggtgtaccgagatggagagagtgttcgggttcccagtccactacacagatgtcagcaacatgtctagactggccagacagagactgctgggaagaagctggtccgtccctgtgatcagacacctgttcgcccctctgaaggagtacttcgcctgcgtgagcagcggcaacagcaacgccaacagccggggccccagcttctctagcggcctggtgccactgtccctgagagggagccacatgggccccatggagatctacaaaaccgtgagcgcctggaagcggcagcctgtgcgcgtgctgagcctgtttcggaatatcgataaagtcctgaaaagcctgggattcctggagagcggctctggctccggcggtggcaccctgaagtacgtggaggatgtgacaaacgtggtcagacgggatgtggagaagtggggccccttcgatctggtgtacggcagcacccaacccctgggcagctcttgtgaccggtgccctggctggtacatgtttcagttccaccggatcctgcagtacgccctgccgagacaggagtcccagcggccattcttttggattttcatggacaacttgctgctgaccgaggatgaccaggaaactaccactcggttcctgcagaccgaagccgtgaccctgcaggacgtgagaggccgggactaccagaacgccatgcgggtgtggtccaacatccctggactgaaaagcaagcacgcacctctgacccctaaagaagaggagtacctgcaggcccaggtgcggagcagaagcaagctggacgcccctaaggtggatctgctggtgaagaattgcctcctgcccctgagagagtacttcaagtatttcagccagaatagtctgcccctgggcggcccaagcagcggcgcccctcctcccagcggcggcagcccagccggctccccaacctctaccgaggagggcacctctgagtccgccacccccgagagcggccctggcacctccaccgagcccagcgagggcagcgcacccggcagccctgccggcagccccacctccacagaggagggaaccagcaccgagcccagcgaaggcagcgccccaggcaccagcaccgagcctagtgagggcggctctggcggcggcagcgcccaggagattaaacggatcaacaagatcagaagaagacttgtgaaagacagcaacaccaagaaggccggcaagacaggccccatgaaaaccctgctggttagagtgatgacacccgatctgagagagcggctggaaaacctgagaaagaagcctgaaaatatcccccagcccatcagcaatacatctagagccaacctgaataagctgctgaccgattacaccgaaatgaagaaggcgatcctgcatgtgtactgggaagagttccagaaggaccctgtgggcctgatgagccgggtggcccagcctgccagcaagaagatcgatcagaacaagctgaaacctgagatggacgagaagggcaacctgaccaccgccggctttgcctgctctcagtgtggccagcccctgttcgtgtacaagctggagcaggtgtctgagaagggcaaggcttacaccaactacttcggacggtgcaatgtggccgagcacgaaaagctgatcctgctggcccagctgaagcccgagaaggatagcgacgaagccgtgacatatagcctgggaaagtttgggcagagggccctggatttctacagcattcatgtgaccaaggagtccacccaccccgtgaagcccctggcccagatcgccggaaacagatacgcctccggacctgtgggaaaggccctgagcgacgcatgtatgggcacaatcgcctccttcctgtctaagtaccaggacatcatcatcgaacaccagaaggtggtgaagggcaaccagaagagactggagagcctgcgggagctggccggcaaggaaaacctggaataccctagcgtgaccctgccacctcagcctcacaccaaggagggcgttgatgcctacaacgaagtgatcgcccgggtgcgaatgtgggtgaacctgaacctgtggcagaagctgaagctaagcagagatgatgccaagcctctgctgagactgaagggattcccttcctttcctctggtcgagagacaggccaacgaagtggactggtgggacatggtgtgtaacgtgaagaagctgatcaacgagaaaaaggaggatggcaaggtgttttggcagaatctggctggctacaagagacaggaagccctgagaccatacctgagcagcgaggaagatcggaagaagggaaagaaattcgctcggtaccagctgggcgacctgctgctgcacctggaaaagaagcacggcgaggactggggaaaggtgtacgacgaggcctgggagcggattgacaagaaagtggaaggcctgagcaagcacatcaagctggaagaggaacggagaagcgaggacgcccagagcaaggccgccctgaccgactggctgcgggctaaggccagcttcgtgatcgagggcctgaaggaggccgacaaggacgagttctgcagatgcgagctgaagctgcagaagtggtacggggacctgcggggaaagcccttcgccatcgaagccgagaacagcatcctggacatcagcggcttcagcaagcagtacaactgtgccttcatctggcagaaggacggcgtgaagaagctgaacctgtacctgatcatcaactacttcaagggcggcaagctgcggttcaagaagatcaaacctgaagccttcgaagccaacagattctacaccgtgatcaacaaaaagagcggcgagatcgtgcccatggaggtgaacttcaacttcgacgaccccaacctgatcatcctgcctctggcctttggcaagagacagggcagagaattcatctggaacgacctgctgtccctggaaaccggcagcctgaagctggccaacggaagagtgatcgagaagacactgtacaacagaagaacccggcaggatgagcctgccctgttcgtggccctgaccttcgagcggcgggaggtcctggactcctccaatatcaaaccaatgaacctgatcggcgtggcaagaggcgaaaacatccccgccgtgatcgccctgaccgaccccgagggctgcccactgagccggtttaaggatagcctgggaaacccaacccacatcctgagaatcggcgagagctataaggagaagcagcggaccatccaggccaagaaggaggtggagcagcggagagccggcggctacagccggaagtacgccagcaaagccaagaatctggcagacgatatggtgagaaacaccgctagagatctgctgtactacgccgtgacccaggatgccatgctgatcttcgccaacctgagccggggcttcggccggcagggcaagcggaccttcatggccgagagacagtacacacggatggaggactggctgaccgccaagctggcctacgagggcctgagcaagacctacctgtccaagacactggcccagtacacctccaagacatgcagcaactgtgggtttaccatcaccagcgccgactacgacagggtgctggagaagctgaagaagacagcaacaggctggatgaccacaattaacggcaaggagctgaaggtggagggccagattacctactacaacagatacaagagacagaacgtagtcaaggacctgtccgtcgagctggatagactgagcgaagaatctgtgaacaacgacatctcctcctggacaaagggcagaagcggagaagctctgagcctcctgaagaaaagattctcccatagacccgtgcaggagaagttcgtgtgcctgaactgcggcttcgagacacacgcagccgagcaagccgccctgaacatcgccagatcctggctgttcctgcggagccaggagtacaagaaataccagacaaacaagacaaccggcaacaccgataagagagccttcgtcgagacctggcagtccttttaccggaagaagcttaaggaggtgtggaaacctgccgtgcggtctggcggatctggcggaggctccacaagcagcctgggcagcgacctgttcagggacgtggccatcgtgttcagccaggaggagtgggagcagctggcccccacccagagggacctgtacagggacgtgatgctggagacctacagcaacctggtgagcctgggcctggccgtgagcaagcccgacgtgatcagcttcctggagcagggcaaggagccctggaccgtggaggaggtggccgccggcggcctgtgccccgtgctgaagagcaggaccagccccaagaaaaagagaaaagtctaagctgccttctgcggggcttgccttctggccatgcccttcttctctcccttgcacctgtacctcttggtctttgaataaagcctgagtaggaaggctagcaaaaaaaaaaaaaaaaaaaaaaaaaaaaaaaaaaaaaaaaaaaaaaaaaaaaaaaaaaaaaaaaaaaaaaaaaaaaaaaa

SEQ ID NO: 6231 - RNA, 5797 nt, synthetic construct
  source 1..5797: mol_type = other RNA
aggaaataagagagaaaagaagagtaagaagaaatataagagccaccatggcccctaagaagaagcgtaaagtgagccggatggaacgcctcgtctacgaggtgcggcagaagtgcagaaacatcgaggacatctgcatctcctgcggatctctgaacgtgaccctggagcacccactgttcatcggcggcatgtgccagaactgtaaaaactgttttctggagtgtgcctatcaatacgacgatgacggctaccagagctactgcaccatctgttgcggcggaagagaggtgctgatgtgtggaaataacaactgctgccggtgcttctgcgtggaatgcgtggacctgctggtgggccccggcgccgcccaggccgctattaaggaagatccttggaactgctacatgtgcggccacaagggcacatacggcctgctgagacggagagaggactggcctagcagactgcagatgttcttcgccaataaccacgaccaggagttcgacccccctaaggtgtaccctcccgtccccgccgagaagagaaagcccatccgggtcctgagcctgttcgatggcatcgccaccggtctgctggtgctgaaggacctgggcatccaggtggataggtacattgcctccgaggtgtgcgaggactccatcaccgtgggaatggtgcgtcatcagggcaagatcatgtacgtgggcgacgtgcggagcgtgacacagaagcatatccaggagtggggccctttcgacctggtgatcggcggcagcccttgcaatgacctgagcatcgtgaacccagcccggaagggcctgtacgagggaaccggcagactgttcttcgagttttacagactgctgcacgacgcccggcctaaggaaggcgacgaccggcccttcttttggctgttcgagaatgtggtggccatgggagtcagcgacaagcgggatattagccggttcctggagagcaaccccgtgatgatcgatgccaaggaagtgagcgccgcccaccgggccagatacttctggggcaatctgcctggcatgaacagacccctggccagcaccgtgaacgacaagctggagctgcaggagtgcctggagcacggccggatcgccaagttcagcaaggtgagaaccatcaccacccgaagcaacagcatcaaacaaggcaaggaccagcactttcctgtgttcatgaacgagaaggaggacatcctgtggtgtaccgagatggagagagtgttcgggttcccagtccactacacagatgtcagcaacatgtctagactggccagacagagactgctgggaagaagctggtccgtccctgtgatcagacacctgttcgcccctctgaaggagtacttcgcctgcgtgagcagcggcaacagcaacgccaacagccggggccccagcttctctagcggcctggtgccactgtccctgagagggagccacatgggccccatggagatctacaaaaccgtgagcgcctggaagcggcagcctgtgcgcgtgctgagcctgtttcggaatatcgataaagtcctgaaaagcctgggattcctggagagcggctctggctccggcggtggcaccctgaagtacgtggaggatgtgacaaacgtggtcagacgggatgtggagaagtggggccccttcgatctggtgtacggcagcacccaacccctgggcagctcttgtgaccggtgccctggctggtacatgtttcagttccaccggatcctgcagtacgccctgccgagacaggagtcccagcggccattcttttggattttcatggacaacttgctgctgaccgaggatgaccaggaaactaccactcggttcctgcagaccgaagccgtgaccctgcaggacgtgagaggccgggactaccagaacgccatgcgggtgtggtccaacatccctggactgaaaagcaagcacgcacctctgacccctaaagaagaggagtacctgcaggcccaggtgcggagcagaagcaagctggacgcccctaaggtggatctgctggtgaagaattgcctcctgcccctgagagagtacttcaagtatttcagccagaatagtctgcccctgggcggcccaagcagcggcgcccctcctcccagcggcggcagcccagccggctccccaacctctaccgaggagggcacctctgagtccgccacccccgagagcggccctggcacctccaccgagcccagcgagggcagcgcacccggcagccctgccggcagccccacctccacagaggagggaaccagcaccgagcccagcgaaggcagcgccccaggcaccagcaccgagcctagtgagggcggctctggcggcggcagcgcccaggagattaaacggatcaacaagatcagaagaagacttgtgaaagacagcaacaccaagaaggccggcaagacaggccccatgaaaaccctgctggttagagtgatgacacccgatctgagagagcggctggaaaacctgagaaagaagcctgaaaatatcccccagcccatcagcaatacatctagagccaacctgaataagctgctgaccgattacaccgaaatgaagaaggcgatcctgcatgtgtactgggaagagttccagaaggaccctgtgggcctgatgagccgggtggcccagcctgccagcaagaagatcgatcagaacaagctgaaacctgagatggacgagaagggcaacctgaccaccgccggctttgcctgctctcagtgtggccagcccctgttcgtgtacaagctggagcaggtgtctgagaagggcaaggcttacaccaactacttcggacggtgcaatgtggccgagcacgaaaagctgatcctgctggcccagctgaagcccgagaaggatagcgacgaagccgtgacatatagcctgggaaagtttgggcagagggccctggatttctacagcattcatgtgaccaaggagtccacccaccccgtgaagcccctggcccagatcgccggaaacagatacgcctccggacctgtgggaaaggccctgagcgacgcatgtatgggcacaatcgcctccttcctgtctaagtaccaggacatcatcatcgaacaccagaaggtggtgaagggcaaccagaagagactggagagcctgcgggagctggccggcaaggaaaacctggaataccctagcgtgaccctgccacctcagcctcacaccaaggagggcgttgatgcctacaacgaagtgatcgcccgggtgcgaatgtgggtgaacctgaacctgtggcagaagctgaagctaagcagagatgatgccaagcctctgctgagactgaagggattcccttcctttcctctggtcgagagacaggccaacgaagtggactggtgggacatggtgtgtaacgtgaagaagctgatcaacgagaaaaaggaggatggcaaggtgttttggcagaatctggctggctacaagagacaggaagccctgagaccatacctgagcagcgaggaagatcggaagaagggaaagaaattcgctcggtaccagctgggcgacctgctgctgcacctggaaaagaagcacggcgaggactggggaaaggtgtacgacgaggcctgggagcggattgacaagaaagtggaaggcctgagcaagcacatcaagctggaagaggaacggagaagcgaggacgcccagagcaaggccgccctgaccgactggctgcgggctaaggccagcttcgtgatcgagggcctgaaggaggccgacaaggacgagttctgcagatgcgagctgaagctgcagaagtggtacggggacctgcggggaaagcccttcgccatcgaagccgagaacagcatcctggacatcagcggcttcagcaagcagtacaactgtgccttcatctggcagaaggacggcgtgaagaagctgaacctgtacctgatcatcaactacttcaagggcggcaagctgcggttcaagaagatcaaacctgaagccttcgaagccaacagattctacaccgtgatcaacaaaaagagcggcgagatcgtgcccatggaggtgaacttcaacttcgacgaccccaacctgatcatcctgcctctggcctttggcaagagacagggcagagaattcatctggaacgacctgctgtccctggaaaccggcagcctgaagctggccaacggaagagtgatcgagaagacactgtacaacagaagaacccggcaggatgagcctgccctgttcgtggccctgaccttcgagcggcgggaggtcctggactcctccaatatcaaaccaatgaacctgatcggcgtggcaagaggcgaaaacatccccgccgtgatcgccctgaccgaccccgagggctgcccactgagccggtttaaggatagcctgggaaacccaacccacatcctgagaatcggcgagagctataaggagaagcagcggaccatccaggccaagaaggaggtggagcagcggagagccggcggctacagccggaagtacgccagcaaagccaagaatctggcagacgatatggtgagaaacaccgctagagatctgctgtactacgccgtgacccaggatgccatgctgatcttcgccaacctgagccggggcttcggccggcagggcaagcggaccttcatggccgagagacagtacacacggatggaggactggctgaccgccaagctggcctacgagggcctgagcaagacctacctgtccaagacactggcccagtacacctccaagacatgcagcaactgtgggtttaccatcaccagcgccgactacgacagggtgctggagaagctgaagaagacagcaacaggctggatgaccacaattaacggcaaggagctgaaggtggagggccagattacctactacaacagatacaagagacagaacgtagtcaaggacctgtccgtcgagctggatagactgagcgaagaatctgtgaacaacgacatctcctcctggacaaagggcagaagcggagaagctctgagcctcctgaagaaaagattctcccatagacccgtgcaggagaagttcgtgtgcctgaactgcggcttcgagacacacgcagccgagcaagccgccctgaacatcgccagatcctggctgttcctgcggagccaggagtacaagaaataccagacaaacaagacaaccggcaacaccgataagagagccttcgtcgagacctggcagtccttttaccggaagaagcttaaggaggtgtggaaacctgccgtgcggtctggcggatctggcggaggctccacaagcgccagcgtgaccgtgaccttcgacgacgtggccctgtacttcagcgagcaggagtgggagatcctggagaagtggcagaagcagatgtacaagcaggagatgaagaccaactaccagaccctggacagcctgggctacgccttcagcaagcccgacctgatcacctggatggagcagggcaggatgctgttcatcagcgagcagggctgcctggacaagaccaggaggaccaccagcccccccaccagccccaagaaaaagagaaaagtctaagctgccttctgcggggcttgccttctggccatgcccttcttctctcccttgcacctgtacctcttggtctttgaataaagcctgagtaggaaggctagcaaaaaaaaaaaaaaaaaaaaaaaaaaaaaaaaaaaaaaaaaaaaaaaaaaaaaaaaaaaaaaaaaaaaaaaaaaaaaaaa

SEQ ID NO: 6232 - RNA, 5797 nt, synthetic construct
  source 1..5797: mol_type = other RNA
aggaaataagagagaaaagaagagtaagaagaaatataagagccaccatggcccctaagaagaagcgtaaagtgagccggatggaacgcctcgtctacgaggtgcggcagaagtgcagaaacatcgaggacatctgcatctcctgcggatctctgaacgtgaccctggagcacccactgttcatcggcggcatgtgccagaactgtaaaaactgttttctggagtgtgcctatcaatacgacgatgacggctaccagagctactgcaccatctgttgcggcggaagagaggtgctgatgtgtggaaataacaactgctgccggtgcttctgcgtggaatgcgtggacctgctggtgggccccggcgccgcccaggccgctattaaggaagatccttggaactgctacatgtgcggccacaagggcacatacggcctgctgagacggagagaggactggcctagcagactgcagatgttcttcgccaataaccacgaccaggagttcgacccccctaaggtgtaccctcccgtccccgccgagaagagaaagcccatccgggtcctgagcctgttcgatggcatcgccaccggtctgctggtgctgaaggacctgggcatccaggtggataggtacattgcctccgaggtgtgcgaggactccatcaccgtgggaatggtgcgtcatcagggcaagatcatgtacgtgggcgacgtgcggagcgtgacacagaagcatatccaggagtggggccctttcgacctggtgatcggcggcagcccttgcaatgacctgagcatcgtgaacccagcccggaagggcctgtacgagggaaccggcagactgttcttcgagttttacagactgctgcacgacgcccggcctaaggaaggcgacgaccggcccttcttttggctgttcgagaatgtggtggccatgggagtcagcgacaagcgggatattagccggttcctggagagcaaccccgtgatgatcgatgccaaggaagtgagcgccgcccaccgggccagatacttctggggcaatctgcctggcatgaacagacccctggccagcaccgtgaacgacaagctggagctgcaggagtgcctggagcacggccggatcgccaagttcagcaaggtgagaaccatcaccacccgaagcaacagcatcaaacaaggcaaggaccagcactttcctgtgttcatgaacgagaaggaggacatcctgtggtgtaccgagatggagagagtgttcgggttcccagtccactacacagatgtcagcaacatgtctagactggccagacagagactgctgggaagaagctggtccgtccctgtgatcagacacctgttcgcccctctgaaggagtacttcgcctgcgtgagcagcggcaacagcaacgccaacagccggggccccagcttctctagcggcctggtgccactgtccctgagagggagccacatgggccccatggagatctacaaaaccgtgagcgcctggaagcggcagcctgtgcgcgtgctgagcctgtttcggaatatcgataaagtcctgaaaagcctgggattcctggagagcggctctggctccggcggtggcaccctgaagtacgtggaggatgtgacaaacgtggtcagacgggatgtggagaagtggggccccttcgatctggtgtacggcagcacccaacccctgggcagctcttgtgaccggtgccctggctggtacatgtttcagttccaccggatcctgcagtacgccctgccgagacaggagtcccagcggccattcttttggattttcatggacaacttgctgctgaccgaggatgaccaggaaactaccactcggttcctgcagaccgaagccgtgaccctgcaggacgtgagaggccgggactaccagaacgccatgcgggtgtggtccaacatccctggactgaaaagcaagcacgcacctctgacccctaaagaagaggagtacctgcaggcccaggtgcggagcagaagcaagctggacgcccctaaggtggatctgctggtgaagaattgcctcctgcccctgagagagtacttcaagtatttcagccagaatagtctgcccctgggcggcccaagcagcggcgcccctcctcccagcggcggcagcccagccggctccccaacctctaccgaggagggcacctctgagtccgccacccccgagagcggccctggcacctccaccgagcccagcgagggcagcgcacccggcagccctgccggcagccccacctccacagaggagggaaccagcaccgagcccagcgaaggcagcgccccaggcaccagcaccgagcctagtgagggcggctctggcggcggcagcgcccaggagattaaacggatcaacaagatcagaagaagacttgtgaaagacagcaacaccaagaaggccggcaagacaggccccatgaaaaccctgctggttagagtgatgacacccgatctgagagagcggctggaaaacctgagaaagaagcctgaaaatatcccccagcccatcagcaatacatctagagccaacctgaataagctgctgaccgattacaccgaaatgaagaaggcgatcctgcatgtgtactgggaagagttccagaaggaccctgtgggcctgatgagccgggtggcccagcctgccagcaagaagatcgatcagaacaagctgaaacctgagatggacgagaagggcaacctgaccaccgccggctttgcctgctctcagtgtggccagcccctgttcgtgtacaagctggagcaggtgtctgagaagggcaaggcttacaccaactacttcggacggtgcaatgtggccgagcacgaaaagctgatcctgctggcccagctgaagcccgagaaggatagcgacgaagccgtgacatatagcctgggaaagtttgggcagagggccctggatttctacagcattcatgtgaccaaggagtccacccaccccgtgaagcccctggcccagatcgccggaaacagatacgcctccggacctgtgggaaaggccctgagcgacgcatgtatgggcacaatcgcctccttcctgtctaagtaccaggacatcatcatcgaacaccagaaggtggtgaagggcaaccagaagagactggagagcctgcgggagctggccggcaaggaaaacctggaataccctagcgtgaccctgccacctcagcctcacaccaaggagggcgttgatgcctacaacgaagtgatcgcccgggtgcgaatgtgggtgaacctgaacctgtggcagaagctgaagctaagcagagatgatgccaagcctctgctgagactgaagggattcccttcctttcctctggtcgagagacaggccaacgaagtggactggtgggacatggtgtgtaacgtgaagaagctgatcaacgagaaaaaggaggatggcaaggtgttttggcagaatctggctggctacaagagacaggaagccctgagaccatacctgagcagcgaggaagatcggaagaagggaaagaaattcgctcggtaccagctgggcgacctgctgctgcacctggaaaagaagcacggcgaggactggggaaaggtgtacgacgaggcctgggagcggattgacaagaaagtggaaggcctgagcaagcacatcaagctggaagaggaacggagaagcgaggacgcccagagcaaggccgccctgaccgactggctgcgggctaaggccagcttcgtgatcgagggcctgaaggaggccgacaaggacgagttctgcagatgcgagctgaagctgcagaagtggtacggggacctgcggggaaagcccttcgccatcgaagccgagaacagcatcctggacatcagcggcttcagcaagcagtacaactgtgccttcatctggcagaaggacggcgtgaagaagctgaacctgtacctgatcatcaactacttcaagggcggcaagctgcggttcaagaagatcaaacctgaagccttcgaagccaacagattctacaccgtgatcaacaaaaagagcggcgagatcgtgcccatggaggtgaacttcaacttcgacgaccccaacctgatcatcctgcctctggcctttggcaagagacagggcagagaattcatctggaacgacctgctgtccctggaaaccggcagcctgaagctggccaacggaagagtgatcgagaagacactgtacaacagaagaacccggcaggatgagcctgccctgttcgtggccctgaccttcgagcggcgggaggtcctggactcctccaatatcaaaccaatgaacctgatcggcgtggcaagaggcgaaaacatccccgccgtgatcgccctgaccgaccccgagggctgcccactgagccggtttaaggatagcctgggaaacccaacccacatcctgagaatcggcgagagctataaggagaagcagcggaccatccaggccaagaaggaggtggagcagcggagagccggcggctacagccggaagtacgccagcaaagccaagaatctggcagacgatatggtgagaaacaccgctagagatctgctgtactacgccgtgacccaggatgccatgctgatcttcgccaacctgagccggggcttcggccggcagggcaagcggaccttcatggccgagagacagtacacacggatggaggactggctgaccgccaagctggcctacgagggcctgagcaagacctacctgtccaagacactggcccagtacacctccaagacatgcagcaactgtgggtttaccatcaccagcgccgactacgacagggtgctggagaagctgaagaagacagcaacaggctggatgaccacaattaacggcaaggagctgaaggtggagggccagattacctactacaacagatacaagagacagaacgtagtcaaggacctgtccgtcgagctggatagactgagcgaagaatctgtgaacaacgacatctcctcctggacaaagggcagaagcggagaagctctgagcctcctgaagaaaagattctcccatagacccgtgcaggagaagttcgtgtgcctgaactgcggcttcgagacacacgcagccgagcaagccgccctgaacatcgccagatcctggctgttcctgcggagccaggagtacaagaaataccagacaaacaagacaaccggcaacaccgataagagagccttcgtcgagacctggcagtccttttaccggaagaagcttaaggaggtgtggaaacctgccgtgcggtctggcggatctggcggaggctccacaagccagccccaggaggccgtgaccttcaaggacgtggaggtgaccttcagccaggacgagtggggctggctggacgccagccagaggaacctgtacagggacgtgatgctggagaactacggcaacgtgaccagcctggtgggccccttcaccaagcccgccctgatcagctggctggaggccagggagccctggggcctgaacgtgcagggcgcccaccccaagaggagccccagcgccgcccccaccagccccaagaaaaagagaaaagtctaagctgccttctgcggggcttgccttctggccatgcccttcttctctcccttgcacctgtacctcttggtctttgaataaagcctgagtaggaaggctagcaaaaaaaaaaaaaaaaaaaaaaaaaaaaaaaaaaaaaaaaaaaaaaaaaaaaaaaaaaaaaaaaaaaaaaaaaaaaaaaa

SEQ ID NO: 6233 - RNA, 5797 nt, synthetic construct
  source 1..5797: mol_type = other RNA
aggaaataagagagaaaagaagagtaagaagaaatataagagccaccatggcccctaagaagaagcgtaaagtgagccggatggaacgcctcgtctacgaggtgcggcagaagtgcagaaacatcgaggacatctgcatctcctgcggatctctgaacgtgaccctggagcacccactgttcatcggcggcatgtgccagaactgtaaaaactgttttctggagtgtgcctatcaatacgacgatgacggctaccagagctactgcaccatctgttgcggcggaagagaggtgctgatgtgtggaaataacaactgctgccggtgcttctgcgtggaatgcgtggacctgctggtgggccccggcgccgcccaggccgctattaaggaagatccttggaactgctacatgtgcggccacaagggcacatacggcctgctgagacggagagaggactggcctagcagactgcagatgttcttcgccaataaccacgaccaggagttcgacccccctaaggtgtaccctcccgtccccgccgagaagagaaagcccatccgggtcctgagcctgttcgatggcatcgccaccggtctgctggtgctgaaggacctgggcatccaggtggataggtacattgcctccgaggtgtgcgaggactccatcaccgtgggaatggtgcgtcatcagggcaagatcatgtacgtgggcgacgtgcggagcgtgacacagaagcatatccaggagtggggccctttcgacctggtgatcggcggcagcccttgcaatgacctgagcatcgtgaacccagcccggaagggcctgtacgagggaaccggcagactgttcttcgagttttacagactgctgcacgacgcccggcctaaggaaggcgacgaccggcccttcttttggctgttcgagaatgtggtggccatgggagtcagcgacaagcgggatattagccggttcctggagagcaaccccgtgatgatcgatgccaaggaagtgagcgccgcccaccgggccagatacttctggggcaatctgcctggcatgaacagacccctggccagcaccgtgaacgacaagctggagctgcaggagtgcctggagcacggccggatcgccaagttcagcaaggtgagaaccatcaccacccgaagcaacagcatcaaacaaggcaaggaccagcactttcctgtgttcatgaacgagaaggaggacatcctgtggtgtaccgagatggagagagtgttcgggttcccagtccactacacagatgtcagcaacatgtctagactggccagacagagactgctgggaagaagctggtccgtccctgtgatcagacacctgttcgcccctctgaaggagtacttcgcctgcgtgagcagcggcaacagcaacgccaacagccggggccccagcttctctagcggcctggtgccactgtccctgagagggagccacatgggccccatggagatctacaaaaccgtgagcgcctggaagcggcagcctgtgcgcgtgctgagcctgtttcggaatatcgataaagtcctgaaaagcctgggattcctggagagcggctctggctccggcggtggcaccctgaagtacgtggaggatgtgacaaacgtggtcagacgggatgtggagaagtggggccccttcgatctggtgtacggcagcacccaacccctgggcagctcttgtgaccggtgccctggctggtacatgtttcagttccaccggatcctgcagtacgccctgccgagacaggagtcccagcggccattcttttggattttcatggacaacttgctgctgaccgaggatgaccaggaaactaccactcggttcctgcagaccgaagccgtgaccctgcaggacgtgagaggccgggactaccagaacgccatgcgggtgtggtccaacatccctggactgaaaagcaagcacgcacctctgacccctaaagaagaggagtacctgcaggcccaggtgcggagcagaagcaagctggacgcccctaaggtggatctgctggtgaagaattgcctcctgcccctgagagagtacttcaagtatttcagccagaatagtctgcccctgggcggcccaagcagcggcgcccctcctcccagcggcggcagcccagccggctccccaacctctaccgaggagggcacctctgagtccgccacccccgagagcggccctggcacctccaccgagcccagcgagggcagcgcacccggcagccctgccggcagccccacctccacagaggagggaaccagcaccgagcccagcgaaggcagcgccccaggcaccagcaccgagcctagtgagggcggctctggcggcggcagcgcccaggagattaaacggatcaacaagatcagaagaagacttgtgaaagacagcaacaccaagaaggccggcaagacaggccccatgaaaaccctgctggttagagtgatgacacccgatctgagagagcggctggaaaacctgagaaagaagcctgaaaatatcccccagcccatcagcaatacatctagagccaacctgaataagctgctgaccgattacaccgaaatgaagaaggcgatcctgcatgtgtactgggaagagttccagaaggaccctgtgggcctgatgagccgggtggcccagcctgccagcaagaagatcgatcagaacaagctgaaacctgagatggacgagaagggcaacctgaccaccgccggctttgcctgctctcagtgtggccagcccctgttcgtgtacaagctggagcaggtgtctgagaagggcaaggcttacaccaactacttcggacggtgcaatgtggccgagcacgaaaagctgatcctgctggcccagctgaagcccgagaaggatagcgacgaagccgtgacatatagcctgggaaagtttgggcagagggccctggatttctacagcattcatgtgaccaaggagtccacccaccccgtgaagcccctggcccagatcgccggaaacagatacgcctccggacctgtgggaaaggccctgagcgacgcatgtatgggcacaatcgcctccttcctgtctaagtaccaggacatcatcatcgaacaccagaaggtggtgaagggcaaccagaagagactggagagcctgcgggagctggccggcaaggaaaacctggaataccctagcgtgaccctgccacctcagcctcacaccaaggagggcgttgatgcctacaacgaagtgatcgcccgggtgcgaatgtgggtgaacctgaacctgtggcagaagctgaagctaagcagagatgatgccaagcctctgctgagactgaagggattcccttcctttcctctggtcgagagacaggccaacgaagtggactggtgggacatggtgtgtaacgtgaagaagctgatcaacgagaaaaaggaggatggcaaggtgttttggcagaatctggctggctacaagagacaggaagccctgagaccatacctgagcagcgaggaagatcggaagaagggaaagaaattcgctcggtaccagctgggcgacctgctgctgcacctggaaaagaagcacggcgaggactggggaaaggtgtacgacgaggcctgggagcggattgacaagaaagtggaaggcctgagcaagcacatcaagctggaagaggaacggagaagcgaggacgcccagagcaaggccgccctgaccgactggctgcgggctaaggccagcttcgtgatcgagggcctgaaggaggccgacaaggacgagttctgcagatgcgagctgaagctgcagaagtggtacggggacctgcggggaaagcccttcgccatcgaagccgagaacagcatcctggacatcagcggcttcagcaagcagtacaactgtgccttcatctggcagaaggacggcgtgaagaagctgaacctgtacctgatcatcaactacttcaagggcggcaagctgcggttcaagaagatcaaacctgaagccttcgaagccaacagattctacaccgtgatcaacaaaaagagcggcgagatcgtgcccatggaggtgaacttcaacttcgacgaccccaacctgatcatcctgcctctggcctttggcaagagacagggcagagaattcatctggaacgacctgctgtccctggaaaccggcagcctgaagctggccaacggaagagtgatcgagaagacactgtacaacagaagaacccggcaggatgagcctgccctgttcgtggccctgaccttcgagcggcgggaggtcctggactcctccaatatcaaaccaatgaacctgatcggcgtggcaagaggcgaaaacatccccgccgtgatcgccctgaccgaccccgagggctgcccactgagccggtttaaggatagcctgggaaacccaacccacatcctgagaatcggcgagagctataaggagaagcagcggaccatccaggccaagaaggaggtggagcagcggagagccggcggctacagccggaagtacgccagcaaagccaagaatctggcagacgatatggtgagaaacaccgctagagatctgctgtactacgccgtgacccaggatgccatgctgatcttcgccaacctgagccggggcttcggccggcagggcaagcggaccttcatggccgagagacagtacacacggatggaggactggctgaccgccaagctggcctacgagggcctgagcaagacctacctgtccaagacactggcccagtacacctccaagacatgcagcaactgtgggtttaccatcaccagcgccgactacgacagggtgctggagaagctgaagaagacagcaacaggctggatgaccacaattaacggcaaggagctgaaggtggagggccagattacctactacaacagatacaagagacagaacgtagtcaaggacctgtccgtcgagctggatagactgagcgaagaatctgtgaacaacgacatctcctcctggacaaagggcagaagcggagaagctctgagcctcctgaagaaaagattctcccatagacccgtgcaggagaagttcgtgtgcctgaactgcggcttcgagacacacgcagccgagcaagccgccctgaacatcgccagatcctggctgttcctgcggagccaggagtacaagaaataccagacaaacaagacaaccggcaacaccgataagagagccttcgtcgagacctggcagtccttttaccggaagaagcttaaggaggtgtggaaacctgccgtgcggtctggcggatctggcggaggctccacaagccaggccgaggtgaccttcgaggacgtggccgtgttcctgagccaggaggagtggggcctgctgggccccgcccagaagggcctgtacagggaggtgatgctggagacctacaggaacctggtgagcctgggcgccggcctggccggccccaagcccgaggtgatcgcccagctggagcagggcgacgagctgtgggtgctggacatgcacggcgccgagcagcccagcgtggacggcagcgccaccagccccaagaaaaagagaaaagtctaagctgccttctgcggggcttgccttctggccatgcccttcttctctcccttgcacctgtacctcttggtctttgaataaagcctgagtaggaaggctagcaaaaaaaaaaaaaaaaaaaaaaaaaaaaaaaaaaaaaaaaaaaaaaaaaaaaaaaaaaaaaaaaaaaaaaaaaaaaaaaa

SEQ ID NO: 6234 - RNA, 5794 nt, synthetic construct
  source 1..5794: mol_type = other RNA
aggaaataagagagaaaagaagagtaagaagaaatataagagccaccatggcccctaagaagaagcgtaaagtgagccggatggaacgcctcgtctacgaggtgcggcagaagtgcagaaacatcgaggacatctgcatctcctgcggatctctgaacgtgaccctggagcacccactgttcatcggcggcatgtgccagaactgtaaaaactgttttctggagtgtgcctatcaatacgacgatgacggctaccagagctactgcaccatctgttgcggcggaagagaggtgctgatgtgtggaaataacaactgctgccggtgcttctgcgtggaatgcgtggacctgctggtgggccccggcgccgcccaggccgctattaaggaagatccttggaactgctacatgtgcggccacaagggcacatacggcctgctgagacggagagaggactggcctagcagactgcagatgttcttcgccaataaccacgaccaggagttcgacccccctaaggtgtaccctcccgtccccgccgagaagagaaagcccatccgggtcctgagcctgttcgatggcatcgccaccggtctgctggtgctgaaggacctgggcatccaggtggataggtacattgcctccgaggtgtgcgaggactccatcaccgtgggaatggtgcgtcatcagggcaagatcatgtacgtgggcgacgtgcggagcgtgacacagaagcatatccaggagtggggccctttcgacctggtgatcggcggcagcccttgcaatgacctgagcatcgtgaacccagcccggaagggcctgtacgagggaaccggcagactgttcttcgagttttacagactgctgcacgacgcccggcctaaggaaggcgacgaccggcccttcttttggctgttcgagaatgtggtggccatgggagtcagcgacaagcgggatattagccggttcctggagagcaaccccgtgatgatcgatgccaaggaagtgagcgccgcccaccgggccagatacttctggggcaatctgcctggcatgaacagacccctggccagcaccgtgaacgacaagctggagctgcaggagtgcctggagcacggccggatcgccaagttcagcaaggtgagaaccatcaccacccgaagcaacagcatcaaacaaggcaaggaccagcactttcctgtgttcatgaacgagaaggaggacatcctgtggtgtaccgagatggagagagtgttcgggttcccagtccactacacagatgtcagcaacatgtctagactggccagacagagactgctgggaagaagctggtccgtccctgtgatcagacacctgttcgcccctctgaaggagtacttcgcctgcgtgagcagcggcaacagcaacgccaacagccggggccccagcttctctagcggcctggtgccactgtccctgagagggagccacatgggccccatggagatctacaaaaccgtgagcgcctggaagcggcagcctgtgcgcgtgctgagcctgtttcggaatatcgataaagtcctgaaaagcctgggattcctggagagcggctctggctccggcggtggcaccctgaagtacgtggaggatgtgacaaacgtggtcagacgggatgtggagaagtggggccccttcgatctggtgtacggcagcacccaacccctgggcagctcttgtgaccggtgccctggctggtacatgtttcagttccaccggatcctgcagtacgccctgccgagacaggagtcccagcggccattcttttggattttcatggacaacttgctgctgaccgaggatgaccaggaaactaccactcggttcctgcagaccgaagccgtgaccctgcaggacgtgagaggccgggactaccagaacgccatgcgggtgtggtccaacatccctggactgaaaagcaagcacgcacctctgacccctaaagaagaggagtacctgcaggcccaggtgcggagcagaagcaagctggacgcccctaaggtggatctgctggtgaagaattgcctcctgcccctgagagagtacttcaagtatttcagccagaatagtctgcccctgggcggcccaagcagcggcgcccctcctcccagcggcggcagcccagccggctccccaacctctaccgaggagggcacctctgagtccgccacccccgagagcggccctggcacctccaccgagcccagcgagggcagcgcacccggcagccctgccggcagccccacctccacagaggagggaaccagcaccgagcccagcgaaggcagcgccccaggcaccagcaccgagcctagtgagggcggctctggcggcggcagcgcccaggagattaaacggatcaacaagatcagaagaagacttgtgaaagacagcaacaccaagaaggccggcaagacaggccccatgaaaaccctgctggttagagtgatgacacccgatctgagagagcggctggaaaacctgagaaagaagcctgaaaatatcccccagcccatcagcaatacatctagagccaacctgaataagctgctgaccgattacaccgaaatgaagaaggcgatcctgcatgtgtactgggaagagttccagaaggaccctgtgggcctgatgagccgggtggcccagcctgccagcaagaagatcgatcagaacaagctgaaacctgagatggacgagaagggcaacctgaccaccgccggctttgcctgctctcagtgtggccagcccctgttcgtgtacaagctggagcaggtgtctgagaagggcaaggcttacaccaactacttcggacggtgcaatgtggccgagcacgaaaagctgatcctgctggcccagctgaagcccgagaaggatagcgacgaagccgtgacatatagcctgggaaagtttgggcagagggccctggatttctacagcattcatgtgaccaaggagtccacccaccccgtgaagcccctggcccagatcgccggaaacagatacgcctccggacctgtgggaaaggccctgagcgacgcatgtatgggcacaatcgcctccttcctgtctaagtaccaggacatcatcatcgaacaccagaaggtggtgaagggcaaccagaagagactggagagcctgcgggagctggccggcaaggaaaacctggaataccctagcgtgaccctgccacctcagcctcacaccaaggagggcgttgatgcctacaacgaagtgatcgcccgggtgcgaatgtgggtgaacctgaacctgtggcagaagctgaagctaagcagagatgatgccaagcctctgctgagactgaagggattcccttcctttcctctggtcgagagacaggccaacgaagtggactggtgggacatggtgtgtaacgtgaagaagctgatcaacgagaaaaaggaggatggcaaggtgttttggcagaatctggctggctacaagagacaggaagccctgagaccatacctgagcagcgaggaagatcggaagaagggaaagaaattcgctcggtaccagctgggcgacctgctgctgcacctggaaaagaagcacggcgaggactggggaaaggtgtacgacgaggcctgggagcggattgacaagaaagtggaaggcctgagcaagcacatcaagctggaagaggaacggagaagcgaggacgcccagagcaaggccgccctgaccgactggctgcgggctaaggccagcttcgtgatcgagggcctgaaggaggccgacaaggacgagttctgcagatgcgagctgaagctgcagaagtggtacggggacctgcggggaaagcccttcgccatcgaagccgagaacagcatcctggacatcagcggcttcagcaagcagtacaactgtgccttcatctggcagaaggacggcgtgaagaagctgaacctgtacctgatcatcaactacttcaagggcggcaagctgcggttcaagaagatcaaacctgaagccttcgaagccaacagattctacaccgtgatcaacaaaaagagcggcgagatcgtgcccatggaggtgaacttcaacttcgacgaccccaacctgatcatcctgcctctggcctttggcaagagacagggcagagaattcatctggaacgacctgctgtccctggaaaccggcagcctgaagctggccaacggaagagtgatcgagaagacactgtacaacagaagaacccggcaggatgagcctgccctgttcgtggccctgaccttcgagcggcgggaggtcctggactcctccaatatcaaaccaatgaacctgatcggcgtggcaagaggcgaaaacatccccgccgtgatcgccctgaccgaccccgagggctgcccactgagccggtttaaggatagcctgggaaacccaacccacatcctgagaatcggcgagagctataaggagaagcagcggaccatccaggccaagaaggaggtggagcagcggagagccggcggctacagccggaagtacgccagcaaagccaagaatctggcagacgatatggtgagaaacaccgctagagatctgctgtactacgccgtgacccaggatgccatgctgatcttcgccaacctgagccggggcttcggccggcagggcaagcggaccttcatggccgagagacagtacacacggatggaggactggctgaccgccaagctggcctacgagggcctgagcaagacctacctgtccaagacactggcccagtacacctccaagacatgcagcaactgtgggtttaccatcaccagcgccgactacgacagggtgctggagaagctgaagaagacagcaacaggctggatgaccacaattaacggcaaggagctgaaggtggagggccagattacctactacaacagatacaagagacagaacgtagtcaaggacctgtccgtcgagctggatagactgagcgaagaatctgtgaacaacgacatctcctcctggacaaagggcagaagcggagaagctctgagcctcctgaagaaaagattctcccatagacccgtgcaggagaagttcgtgtgcctgaactgcggcttcgagacacacgcagccgagcaagccgccctgaacatcgccagatcctggctgttcctgcggagccaggagtacaagaaataccagacaaacaagacaaccggcaacaccgataagagagccttcgtcgagacctggcagtccttttaccggaagaagcttaaggaggtgtggaaacctgccgtgcggtctggcggatctggcggaggctccacaagcaacatggagggcctggtgatgttccaggacctgagcatcgacttcagccaggaggagtgggagtgcctggacgccgcccagaaggacctgtacagagacgtgatgatggagaactacagcagcctggtgagcctgggcctgagcatccccaagcccgacgtgatcagcctgctggagcagggcaaggagccctggatggtgagcagagacgtgctgggcggctggtgcagagacagcgagaccagccccaagaaaaagagaaaagtctaagctgccttctgcggggcttgccttctggccatgcccttcttctctcccttgcacctgtacctcttggtctttgaataaagcctgagtaggaaggctagcaaaaaaaaaaaaaaaaaaaaaaaaaaaaaaaaaaaaaaaaaaaaaaaaaaaaaaaaaaaaaaaaaaaaaaaaaaaaaaaa

SEQ ID NO: 6235 - RNA, 5797 nt, synthetic construct
  source 1..5797: mol_type = other RNA
aggaaataagagagaaaagaagagtaagaagaaatataagagccaccatggcccctaagaagaagcgtaaagtgagccggatggaacgcctcgtctacgaggtgcggcagaagtgcagaaacatcgaggacatctgcatctcctgcggatctctgaacgtgaccctggagcacccactgttcatcggcggcatgtgccagaactgtaaaaactgttttctggagtgtgcctatcaatacgacgatgacggctaccagagctactgcaccatctgttgcggcggaagagaggtgctgatgtgtggaaataacaactgctgccggtgcttctgcgtggaatgcgtggacctgctggtgggccccggcgccgcccaggccgctattaaggaagatccttggaactgctacatgtgcggccacaagggcacatacggcctgctgagacggagagaggactggcctagcagactgcagatgttcttcgccaataaccacgaccaggagttcgacccccctaaggtgtaccctcccgtccccgccgagaagagaaagcccatccgggtcctgagcctgttcgatggcatcgccaccggtctgctggtgctgaaggacctgggcatccaggtggataggtacattgcctccgaggtgtgcgaggactccatcaccgtgggaatggtgcgtcatcagggcaagatcatgtacgtgggcgacgtgcggagcgtgacacagaagcatatccaggagtggggccctttcgacctggtgatcggcggcagcccttgcaatgacctgagcatcgtgaacccagcccggaagggcctgtacgagggaaccggcagactgttcttcgagttttacagactgctgcacgacgcccggcctaaggaaggcgacgaccggcccttcttttggctgttcgagaatgtggtggccatgggagtcagcgacaagcgggatattagccggttcctggagagcaaccccgtgatgatcgatgccaaggaagtgagcgccgcccaccgggccagatacttctggggcaatctgcctggcatgaacagacccctggccagcaccgtgaacgacaagctggagctgcaggagtgcctggagcacggccggatcgccaagttcagcaaggtgagaaccatcaccacccgaagcaacagcatcaaacaaggcaaggaccagcactttcctgtgttcatgaacgagaaggaggacatcctgtggtgtaccgagatggagagagtgttcgggttcccagtccactacacagatgtcagcaacatgtctagactggccagacagagactgctgggaagaagctggtccgtccctgtgatcagacacctgttcgcccctctgaaggagtacttcgcctgcgtgagcagcggcaacagcaacgccaacagccggggccccagcttctctagcggcctggtgccactgtccctgagagggagccacatgggccccatggagatctacaaaaccgtgagcgcctggaagcggcagcctgtgcgcgtgctgagcctgtttcggaatatcgataaagtcctgaaaagcctgggattcctggagagcggctctggctccggcggtggcaccctgaagtacgtggaggatgtgacaaacgtggtcagacgggatgtggagaagtggggccccttcgatctggtgtacggcagcacccaacccctgggcagctcttgtgaccggtgccctggctggtacatgtttcagttccaccggatcctgcagtacgccctgccgagacaggagtcccagcggccattcttttggattttcatggacaacttgctgctgaccgaggatgaccaggaaactaccactcggttcctgcagaccgaagccgtgaccctgcaggacgtgagaggccgggactaccagaacgccatgcgggtgtggtccaacatccctggactgaaaagcaagcacgcacctctgacccctaaagaagaggagtacctgcaggcccaggtgcggagcagaagcaagctggacgcccctaaggtggatctgctggtgaagaattgcctcctgcccctgagagagtacttcaagtatttcagccagaatagtctgcccctgggcggcccaagcagcggcgcccctcctcccagcggcggcagcccagccggctccccaacctctaccgaggagggcacctctgagtccgccacccccgagagcggccctggcacctccaccgagcccagcgagggcagcgcacccggcagccctgccggcagccccacctccacagaggagggaaccagcaccgagcccagcgaaggcagcgccccaggcaccagcaccgagcctagtgagggcggctctggcggcggcagcgcccaggagattaaacggatcaacaagatcagaagaagacttgtgaaagacagcaacaccaagaaggccggcaagacaggccccatgaaaaccctgctggttagagtgatgacacccgatctgagagagcggctggaaaacctgagaaagaagcctgaaaatatcccccagcccatcagcaatacatctagagccaacctgaataagctgctgaccgattacaccgaaatgaagaaggcgatcctgcatgtgtactgggaagagttccagaaggaccctgtgggcctgatgagccgggtggcccagcctgccagcaagaagatcgatcagaacaagctgaaacctgagatggacgagaagggcaacctgaccaccgccggctttgcctgctctcagtgtggccagcccctgttcgtgtacaagctggagcaggtgtctgagaagggcaaggcttacaccaactacttcggacggtgcaatgtggccgagcacgaaaagctgatcctgctggcccagctgaagcccgagaaggatagcgacgaagccgtgacatatagcctgggaaagtttgggcagagggccctggatttctacagcattcatgtgaccaaggagtccacccaccccgtgaagcccctggcccagatcgccggaaacagatacgcctccggacctgtgggaaaggccctgagcgacgcatgtatgggcacaatcgcctccttcctgtctaagtaccaggacatcatcatcgaacaccagaaggtggtgaagggcaaccagaagagactggagagcctgcgggagctggccggcaaggaaaacctggaataccctagcgtgaccctgccacctcagcctcacaccaaggagggcgttgatgcctacaacgaagtgatcgcccgggtgcgaatgtgggtgaacctgaacctgtggcagaagctgaagctaagcagagatgatgccaagcctctgctgagactgaagggattcccttcctttcctctggtcgagagacaggccaacgaagtggactggtgggacatggtgtgtaacgtgaagaagctgatcaacgagaaaaaggaggatggcaaggtgttttggcagaatctggctggctacaagagacaggaagccctgagaccatacctgagcagcgaggaagatcggaagaagggaaagaaattcgctcggtaccagctgggcgacctgctgctgcacctggaaaagaagcacggcgaggactggggaaaggtgtacgacgaggcctgggagcggattgacaagaaagtggaaggcctgagcaagcacatcaagctggaagaggaacggagaagcgaggacgcccagagcaaggccgccctgaccgactggctgcgggctaaggccagcttcgtgatcgagggcctgaaggaggccgacaaggacgagttctgcagatgcgagctgaagctgcagaagtggtacggggacctgcggggaaagcccttcgccatcgaagccgagaacagcatcctggacatcagcggcttcagcaagcagtacaactgtgccttcatctggcagaaggacggcgtgaagaagctgaacctgtacctgatcatcaactacttcaagggcggcaagctgcggttcaagaagatcaaacctgaagccttcgaagccaacagattctacaccgtgatcaacaaaaagagcggcgagatcgtgcccatggaggtgaacttcaacttcgacgaccccaacctgatcatcctgcctctggcctttggcaagagacagggcagagaattcatctggaacgacctgctgtccctggaaaccggcagcctgaagctggccaacggaagagtgatcgagaagacactgtacaacagaagaacccggcaggatgagcctgccctgttcgtggccctgaccttcgagcggcgggaggtcctggactcctccaatatcaaaccaatgaacctgatcggcgtggcaagaggcgaaaacatccccgccgtgatcgccctgaccgaccccgagggctgcccactgagccggtttaaggatagcctgggaaacccaacccacatcctgagaatcggcgagagctataaggagaagcagcggaccatccaggccaagaaggaggtggagcagcggagagccggcggctacagccggaagtacgccagcaaagccaagaatctggcagacgatatggtgagaaacaccgctagagatctgctgtactacgccgtgacccaggatgccatgctgatcttcgccaacctgagccggggcttcggccggcagggcaagcggaccttcatggccgagagacagtacacacggatggaggactggctgaccgccaagctggcctacgagggcctgagcaagacctacctgtccaagacactggcccagtacacctccaagacatgcagcaactgtgggtttaccatcaccagcgccgactacgacagggtgctggagaagctgaagaagacagcaacaggctggatgaccacaattaacggcaaggagctgaaggtggagggccagattacctactacaacagatacaagagacagaacgtagtcaaggacctgtccgtcgagctggatagactgagcgaagaatctgtgaacaacgacatctcctcctggacaaagggcagaagcggagaagctctgagcctcctgaagaaaagattctcccatagacccgtgcaggagaagttcgtgtgcctgaactgcggcttcgagacacacgcagccgagcaagccgccctgaacatcgccagatcctggctgttcctgcggagccaggagtacaagaaataccagacaaacaagacaaccggcaacaccgataagagagccttcgtcgagacctggcagtccttttaccggaagaagcttaaggaggtgtggaaacctgccgtgcggtctggcggatctggcggaggctccacaagcgcccccctgctggcccccaggcccggcgagaccaggcccggctgcaggaagcccggcgccgtgagcttcgccgacgtggccgtgtacttcagccccgaggagtggggctgcctgaggcccgcccagagggccctgtacagggacgtgatgagggagacctacggccacctgggcgccctgggcttccccggccccaagcccgccctgatcagctggatggagcaggagagcgaggcctggagcaccagccccaagaaaaagagaaaagtctaagctgccttctgcggggcttgccttctggccatgcccttcttctctcccttgcacctgtacctcttggtctttgaataaagcctgagtaggaaggctagcaaaaaaaaaaaaaaaaaaaaaaaaaaaaaaaaaaaaaaaaaaaaaaaaaaaaaaaaaaaaaaaaaaaaaaaaaaaaaaaa

SEQ ID NO: 6236 - RNA, 5797 nt, synthetic construct
  source 1..5797: mol_type = other RNA
aggaaataagagagaaaagaagagtaagaagaaatataagagccaccatggcccctaagaagaagcgtaaagtgagccggatggaacgcctcgtctacgaggtgcggcagaagtgcagaaacatcgaggacatctgcatctcctgcggatctctgaacgtgaccctggagcacccactgttcatcggcggcatgtgccagaactgtaaaaactgttttctggagtgtgcctatcaatacgacgatgacggctaccagagctactgcaccatctgttgcggcggaagagaggtgctgatgtgtggaaataacaactgctgccggtgcttctgcgtggaatgcgtggacctgctggtgggccccggcgccgcccaggccgctattaaggaagatccttggaactgctacatgtgcggccacaagggcacatacggcctgctgagacggagagaggactggcctagcagactgcagatgttcttcgccaataaccacgaccaggagttcgacccccctaaggtgtaccctcccgtccccgccgagaagagaaagcccatccgggtcctgagcctgttcgatggcatcgccaccggtctgctggtgctgaaggacctgggcatccaggtggataggtacattgcctccgaggtgtgcgaggactccatcaccgtgggaatggtgcgtcatcagggcaagatcatgtacgtgggcgacgtgcggagcgtgacacagaagcatatccaggagtggggccctttcgacctggtgatcggcggcagcccttgcaatgacctgagcatcgtgaacccagcccggaagggcctgtacgagggaaccggcagactgttcttcgagttttacagactgctgcacgacgcccggcctaaggaaggcgacgaccggcccttcttttggctgttcgagaatgtggtggccatgggagtcagcgacaagcgggatattagccggttcctggagagcaaccccgtgatgatcgatgccaaggaagtgagcgccgcccaccgggccagatacttctggggcaatctgcctggcatgaacagacccctggccagcaccgtgaacgacaagctggagctgcaggagtgcctggagcacggccggatcgccaagttcagcaaggtgagaaccatcaccacccgaagcaacagcatcaaacaaggcaaggaccagcactttcctgtgttcatgaacgagaaggaggacatcctgtggtgtaccgagatggagagagtgttcgggttcccagtccactacacagatgtcagcaacatgtctagactggccagacagagactgctgggaagaagctggtccgtccctgtgatcagacacctgttcgcccctctgaaggagtacttcgcctgcgtgagcagcggcaacagcaacgccaacagccggggccccagcttctctagcggcctggtgccactgtccctgagagggagccacatgggccccatggagatctacaaaaccgtgagcgcctggaagcggcagcctgtgcgcgtgctgagcctgtttcggaatatcgataaagtcctgaaaagcctgggattcctggagagcggctctggctccggcggtggcaccctgaagtacgtggaggatgtgacaaacgtggtcagacgggatgtggagaagtggggccccttcgatctggtgtacggcagcacccaacccctgggcagctcttgtgaccggtgccctggctggtacatgtttcagttccaccggatcctgcagtacgccctgccgagacaggagtcccagcggccattcttttggattttcatggacaacttgctgctgaccgaggatgaccaggaaactaccactcggttcctgcagaccgaagccgtgaccctgcaggacgtgagaggccgggactaccagaacgccatgcgggtgtggtccaacatccctggactgaaaagcaagcacgcacctctgacccctaaagaagaggagtacctgcaggcccaggtgcggagcagaagcaagctggacgcccctaaggtggatctgctggtgaagaattgcctcctgcccctgagagagtacttcaagtatttcagccagaatagtctgcccctgggcggcccaagcagcggcgcccctcctcccagcggcggcagcccagccggctccccaacctctaccgaggagggcacctctgagtccgccacccccgagagcggccctggcacctccaccgagcccagcgagggcagcgcacccggcagccctgccggcagccccacctccacagaggagggaaccagcaccgagcccagcgaaggcagcgccccaggcaccagcaccgagcctagtgagggcggctctggcggcggcagcgcccaggagattaaacggatcaacaagatcagaagaagacttgtgaaagacagcaacaccaagaaggccggcaagacaggccccatgaaaaccctgctggttagagtgatgacacccgatctgagagagcggctggaaaacctgagaaagaagcctgaaaatatcccccagcccatcagcaatacatctagagccaacctgaataagctgctgaccgattacaccgaaatgaagaaggcgatcctgcatgtgtactgggaagagttccagaaggaccctgtgggcctgatgagccgggtggcccagcctgccagcaagaagatcgatcagaacaagctgaaacctgagatggacgagaagggcaacctgaccaccgccggctttgcctgctctcagtgtggccagcccctgttcgtgtacaagctggagcaggtgtctgagaagggcaaggcttacaccaactacttcggacggtgcaatgtggccgagcacgaaaagctgatcctgctggcccagctgaagcccgagaaggatagcgacgaagccgtgacatatagcctgggaaagtttgggcagagggccctggatttctacagcattcatgtgaccaaggagtccacccaccccgtgaagcccctggcccagatcgccggaaacagatacgcctccggacctgtgggaaaggccctgagcgacgcatgtatgggcacaatcgcctccttcctgtctaagtaccaggacatcatcatcgaacaccagaaggtggtgaagggcaaccagaagagactggagagcctgcgggagctggccggcaaggaaaacctggaataccctagcgtgaccctgccacctcagcctcacaccaaggagggcgttgatgcctacaacgaagtgatcgcccgggtgcgaatgtgggtgaacctgaacctgtggcagaagctgaagctaagcagagatgatgccaagcctctgctgagactgaagggattcccttcctttcctctggtcgagagacaggccaacgaagtggactggtgggacatggtgtgtaacgtgaagaagctgatcaacgagaaaaaggaggatggcaaggtgttttggcagaatctggctggctacaagagacaggaagccctgagaccatacctgagcagcgaggaagatcggaagaagggaaagaaattcgctcggtaccagctgggcgacctgctgctgcacctggaaaagaagcacggcgaggactggggaaaggtgtacgacgaggcctgggagcggattgacaagaaagtggaaggcctgagcaagcacatcaagctggaagaggaacggagaagcgaggacgcccagagcaaggccgccctgaccgactggctgcgggctaaggccagcttcgtgatcgagggcctgaaggaggccgacaaggacgagttctgcagatgcgagctgaagctgcagaagtggtacggggacctgcggggaaagcccttcgccatcgaagccgagaacagcatcctggacatcagcggcttcagcaagcagtacaactgtgccttcatctggcagaaggacggcgtgaagaagctgaacctgtacctgatcatcaactacttcaagggcggcaagctgcggttcaagaagatcaaacctgaagccttcgaagccaacagattctacaccgtgatcaacaaaaagagcggcgagatcgtgcccatggaggtgaacttcaacttcgacgaccccaacctgatcatcctgcctctggcctttggcaagagacagggcagagaattcatctggaacgacctgctgtccctggaaaccggcagcctgaagctggccaacggaagagtgatcgagaagacactgtacaacagaagaacccggcaggatgagcctgccctgttcgtggccctgaccttcgagcggcgggaggtcctggactcctccaatatcaaaccaatgaacctgatcggcgtggcaagaggcgaaaacatccccgccgtgatcgccctgaccgaccccgagggctgcccactgagccggtttaaggatagcctgggaaacccaacccacatcctgagaatcggcgagagctataaggagaagcagcggaccatccaggccaagaaggaggtggagcagcggagagccggcggctacagccggaagtacgccagcaaagccaagaatctggcagacgatatggtgagaaacaccgctagagatctgctgtactacgccgtgacccaggatgccatgctgatcttcgccaacctgagccggggcttcggccggcagggcaagcggaccttcatggccgagagacagtacacacggatggaggactggctgaccgccaagctggcctacgagggcctgagcaagacctacctgtccaagacactggcccagtacacctccaagacatgcagcaactgtgggtttaccatcaccagcgccgactacgacagggtgctggagaagctgaagaagacagcaacaggctggatgaccacaattaacggcaaggagctgaaggtggagggccagattacctactacaacagatacaagagacagaacgtagtcaaggacctgtccgtcgagctggatagactgagcgaagaatctgtgaacaacgacatctcctcctggacaaagggcagaagcggagaagctctgagcctcctgaagaaaagattctcccatagacccgtgcaggagaagttcgtgtgcctgaactgcggcttcgagacacacgcagccgagcaagccgccctgaacatcgccagatcctggctgttcctgcggagccaggagtacaagaaataccagacaaacaagacaaccggcaacaccgataagagagccttcgtcgagacctggcagtccttttaccggaagaagcttaaggaggtgtggaaacctgccgtgcggtctggcggatctggcggaggctccacaagcttccagggcctggtgaccttcgaggaggtggccgtgtacttcaccagggaggagggcgccctgctggaccccacccagagggccctgtacagggacgtgatgcaggagaactacgagaccgtggtgctgctgggcaaggagagcttcagcaagcccgacgtgatcagccagctggagaggggcgaggagccctgggtgcccgacctgcagggcagcgagaaggagaggcccgaggagaacttcaccagccccaagaaaaagagaaaagtctaagctgccttctgcggggcttgccttctggccatgcccttcttctctcccttgcacctgtacctcttggtctttgaataaagcctgagtaggaaggctagcaaaaaaaaaaaaaaaaaaaaaaaaaaaaaaaaaaaaaaaaaaaaaaaaaaaaaaaaaaaaaaaaaaaaaaaaaaaaaaaa

SEQ ID NO: 6237 - RNA, 5797 nt, synthetic construct
  source 1..5797: mol_type = other RNA
aggaaataagagagaaaagaagagtaagaagaaatataagagccaccatggcccctaagaagaagcgtaaagtgagccggatggaacgcctcgtctacgaggtgcggcagaagtgcagaaacatcgaggacatctgcatctcctgcggatctctgaacgtgaccctggagcacccactgttcatcggcggcatgtgccagaactgtaaaaactgttttctggagtgtgcctatcaatacgacgatgacggctaccagagctactgcaccatctgttgcggcggaagagaggtgctgatgtgtggaaataacaactgctgccggtgcttctgcgtggaatgcgtggacctgctggtgggccccggcgccgcccaggccgctattaaggaagatccttggaactgctacatgtgcggccacaagggcacatacggcctgctgagacggagagaggactggcctagcagactgcagatgttcttcgccaataaccacgaccaggagttcgacccccctaaggtgtaccctcccgtccccgccgagaagagaaagcccatccgggtcctgagcctgttcgatggcatcgccaccggtctgctggtgctgaaggacctgggcatccaggtggataggtacattgcctccgaggtgtgcgaggactccatcaccgtgggaatggtgcgtcatcagggcaagatcatgtacgtgggcgacgtgcggagcgtgacacagaagcatatccaggagtggggccctttcgacctggtgatcggcggcagcccttgcaatgacctgagcatcgtgaacccagcccggaagggcctgtacgagggaaccggcagactgttcttcgagttttacagactgctgcacgacgcccggcctaaggaaggcgacgaccggcccttcttttggctgttcgagaatgtggtggccatgggagtcagcgacaagcgggatattagccggttcctggagagcaaccccgtgatgatcgatgccaaggaagtgagcgccgcccaccgggccagatacttctggggcaatctgcctggcatgaacagacccctggccagcaccgtgaacgacaagctggagctgcaggagtgcctggagcacggccggatcgccaagttcagcaaggtgagaaccatcaccacccgaagcaacagcatcaaacaaggcaaggaccagcactttcctgtgttcatgaacgagaaggaggacatcctgtggtgtaccgagatggagagagtgttcgggttcccagtccactacacagatgtcagcaacatgtctagactggccagacagagactgctgggaagaagctggtccgtccctgtgatcagacacctgttcgcccctctgaaggagtacttcgcctgcgtgagcagcggcaacagcaacgccaacagccggggccccagcttctctagcggcctggtgccactgtccctgagagggagccacatgggccccatggagatctacaaaaccgtgagcgcctggaagcggcagcctgtgcgcgtgctgagcctgtttcggaatatcgataaagtcctgaaaagcctgggattcctggagagcggctctggctccggcggtggcaccctgaagtacgtggaggatgtgacaaacgtggtcagacgggatgtggagaagtggggccccttcgatctggtgtacggcagcacccaacccctgggcagctcttgtgaccggtgccctggctggtacatgtttcagttccaccggatcctgcagtacgccctgccgagacaggagtcccagcggccattcttttggattttcatggacaacttgctgctgaccgaggatgaccaggaaactaccactcggttcctgcagaccgaagccgtgaccctgcaggacgtgagaggccgggactaccagaacgccatgcgggtgtggtccaacatccctggactgaaaagcaagcacgcacctctgacccctaaagaagaggagtacctgcaggcccaggtgcggagcagaagcaagctggacgcccctaaggtggatctgctggtgaagaattgcctcctgcccctgagagagtacttcaagtatttcagccagaatagtctgcccctgggcggcccaagcagcggcgcccctcctcccagcggcggcagcccagccggctccccaacctctaccgaggagggcacctctgagtccgccacccccgagagcggccctggcacctccaccgagcccagcgagggcagcgcacccggcagccctgccggcagccccacctccacagaggagggaaccagcaccgagcccagcgaaggcagcgccccaggcaccagcaccgagcctagtgagggcggctctggcggcggcagcgcccaggagattaaacggatcaacaagatcagaagaagacttgtgaaagacagcaacaccaagaaggccggcaagacaggccccatgaaaaccctgctggttagagtgatgacacccgatctgagagagcggctggaaaacctgagaaagaagcctgaaaatatcccccagcccatcagcaatacatctagagccaacctgaataagctgctgaccgattacaccgaaatgaagaaggcgatcctgcatgtgtactgggaagagttccagaaggaccctgtgggcctgatgagccgggtggcccagcctgccagcaagaagatcgatcagaacaagctgaaacctgagatggacgagaagggcaacctgaccaccgccggctttgcctgctctcagtgtggccagcccctgttcgtgtacaagctggagcaggtgtctgagaagggcaaggcttacaccaactacttcggacggtgcaatgtggccgagcacgaaaagctgatcctgctggcccagctgaagcccgagaaggatagcgacgaagccgtgacatatagcctgggaaagtttgggcagagggccctggatttctacagcattcatgtgaccaaggagtccacccaccccgtgaagcccctggcccagatcgccggaaacagatacgcctccggacctgtgggaaaggccctgagcgacgcatgtatgggcacaatcgcctccttcctgtctaagtaccaggacatcatcatcgaacaccagaaggtggtgaagggcaaccagaagagactggagagcctgcgggagctggccggcaaggaaaacctggaataccctagcgtgaccctgccacctcagcctcacaccaaggagggcgttgatgcctacaacgaagtgatcgcccgggtgcgaatgtgggtgaacctgaacctgtggcagaagctgaagctaagcagagatgatgccaagcctctgctgagactgaagggattcccttcctttcctctggtcgagagacaggccaacgaagtggactggtgggacatggtgtgtaacgtgaagaagctgatcaacgagaaaaaggaggatggcaaggtgttttggcagaatctggctggctacaagagacaggaagccctgagaccatacctgagcagcgaggaagatcggaagaagggaaagaaattcgctcggtaccagctgggcgacctgctgctgcacctggaaaagaagcacggcgaggactggggaaaggtgtacgacgaggcctgggagcggattgacaagaaagtggaaggcctgagcaagcacatcaagctggaagaggaacggagaagcgaggacgcccagagcaaggccgccctgaccgactggctgcgggctaaggccagcttcgtgatcgagggcctgaaggaggccgacaaggacgagttctgcagatgcgagctgaagctgcagaagtggtacggggacctgcggggaaagcccttcgccatcgaagccgagaacagcatcctggacatcagcggcttcagcaagcagtacaactgtgccttcatctggcagaaggacggcgtgaagaagctgaacctgtacctgatcatcaactacttcaagggcggcaagctgcggttcaagaagatcaaacctgaagccttcgaagccaacagattctacaccgtgatcaacaaaaagagcggcgagatcgtgcccatggaggtgaacttcaacttcgacgaccccaacctgatcatcctgcctctggcctttggcaagagacagggcagagaattcatctggaacgacctgctgtccctggaaaccggcagcctgaagctggccaacggaagagtgatcgagaagacactgtacaacagaagaacccggcaggatgagcctgccctgttcgtggccctgaccttcgagcggcgggaggtcctggactcctccaatatcaaaccaatgaacctgatcggcgtggcaagaggcgaaaacatccccgccgtgatcgccctgaccgaccccgagggctgcccactgagccggtttaaggatagcctgggaaacccaacccacatcctgagaatcggcgagagctataaggagaagcagcggaccatccaggccaagaaggaggtggagcagcggagagccggcggctacagccggaagtacgccagcaaagccaagaatctggcagacgatatggtgagaaacaccgctagagatctgctgtactacgccgtgacccaggatgccatgctgatcttcgccaacctgagccggggcttcggccggcagggcaagcggaccttcatggccgagagacagtacacacggatggaggactggctgaccgccaagctggcctacgagggcctgagcaagacctacctgtccaagacactggcccagtacacctccaagacatgcagcaactgtgggtttaccatcaccagcgccgactacgacagggtgctggagaagctgaagaagacagcaacaggctggatgaccacaattaacggcaaggagctgaaggtggagggccagattacctactacaacagatacaagagacagaacgtagtcaaggacctgtccgtcgagctggatagactgagcgaagaatctgtgaacaacgacatctcctcctggacaaagggcagaagcggagaagctctgagcctcctgaagaaaagattctcccatagacccgtgcaggagaagttcgtgtgcctgaactgcggcttcgagacacacgcagccgagcaagccgccctgaacatcgccagatcctggctgttcctgcggagccaggagtacaagaaataccagacaaacaagacaaccggcaacaccgataagagagccttcgtcgagacctggcagtccttttaccggaagaagcttaaggaggtgtggaaacctgccgtgcggtctggcggatctggcggaggctccacaagccaggccgaggtgaccttcgaggacgtggccgtgctgctgagcagggaggagtggggcaggctgggccccgtgcagaagggcctgtacagggacgtgatgctggagacctacaggaacctggtgagcctgggcggcggccccgccggccccaagcccgaggtgatcacccagctggagaggggcgacgagccctgggtgcccgacgtgcagggcagggagaggctgaccatcgacggcagcgccaccagccccaagaaaaagagaaaagtctaagctgccttctgcggggcttgccttctggccatgcccttcttctctcccttgcacctgtacctcttggtctttgaataaagcctgagtaggaaggctagcaaaaaaaaaaaaaaaaaaaaaaaaaaaaaaaaaaaaaaaaaaaaaaaaaaaaaaaaaaaaaaaaaaaaaaaaaaaaaaaa

SEQ ID NO: 6238 - RNA, 5797 nt, synthetic construct
  source 1..5797: mol_type = other RNA
aggaaataagagagaaaagaagagtaagaagaaatataagagccaccatggcccctaagaagaagcgtaaagtgagccggatggaacgcctcgtctacgaggtgcggcagaagtgcagaaacatcgaggacatctgcatctcctgcggatctctgaacgtgaccctggagcacccactgttcatcggcggcatgtgccagaactgtaaaaactgttttctggagtgtgcctatcaatacgacgatgacggctaccagagctactgcaccatctgttgcggcggaagagaggtgctgatgtgtggaaataacaactgctgccggtgcttctgcgtggaatgcgtggacctgctggtgggccccggcgccgcccaggccgctattaaggaagatccttggaactgctacatgtgcggccacaagggcacatacggcctgctgagacggagagaggactggcctagcagactgcagatgttcttcgccaataaccacgaccaggagttcgacccccctaaggtgtaccctcccgtccccgccgagaagagaaagcccatccgggtcctgagcctgttcgatggcatcgccaccggtctgctggtgctgaaggacctgggcatccaggtggataggtacattgcctccgaggtgtgcgaggactccatcaccgtgggaatggtgcgtcatcagggcaagatcatgtacgtgggcgacgtgcggagcgtgacacagaagcatatccaggagtggggccctttcgacctggtgatcggcggcagcccttgcaatgacctgagcatcgtgaacccagcccggaagggcctgtacgagggaaccggcagactgttcttcgagttttacagactgctgcacgacgcccggcctaaggaaggcgacgaccggcccttcttttggctgttcgagaatgtggtggccatgggagtcagcgacaagcgggatattagccggttcctggagagcaaccccgtgatgatcgatgccaaggaagtgagcgccgcccaccgggccagatacttctggggcaatctgcctggcatgaacagacccctggccagcaccgtgaacgacaagctggagctgcaggagtgcctggagcacggccggatcgccaagttcagcaaggtgagaaccatcaccacccgaagcaacagcatcaaacaaggcaaggaccagcactttcctgtgttcatgaacgagaaggaggacatcctgtggtgtaccgagatggagagagtgttcgggttcccagtccactacacagatgtcagcaacatgtctagactggccagacagagactgctgggaagaagctggtccgtccctgtgatcagacacctgttcgcccctctgaaggagtacttcgcctgcgtgagcagcggcaacagcaacgccaacagccggggccccagcttctctagcggcctggtgccactgtccctgagagggagccacatgggccccatggagatctacaaaaccgtgagcgcctggaagcggcagcctgtgcgcgtgctgagcctgtttcggaatatcgataaagtcctgaaaagcctgggattcctggagagcggctctggctccggcggtggcaccctgaagtacgtggaggatgtgacaaacgtggtcagacgggatgtggagaagtggggccccttcgatctggtgtacggcagcacccaacccctgggcagctcttgtgaccggtgccctggctggtacatgtttcagttccaccggatcctgcagtacgccctgccgagacaggagtcccagcggccattcttttggattttcatggacaacttgctgctgaccgaggatgaccaggaaactaccactcggttcctgcagaccgaagccgtgaccctgcaggacgtgagaggccgggactaccagaacgccatgcgggtgtggtccaacatccctggactgaaaagcaagcacgcacctctgacccctaaagaagaggagtacctgcaggcccaggtgcggagcagaagcaagctggacgcccctaaggtggatctgctggtgaagaattgcctcctgcccctgagagagtacttcaagtatttcagccagaatagtctgcccctgggcggcccaagcagcggcgcccctcctcccagcggcggcagcccagccggctccccaacctctaccgaggagggcacctctgagtccgccacccccgagagcggccctggcacctccaccgagcccagcgagggcagcgcacccggcagccctgccggcagccccacctccacagaggagggaaccagcaccgagcccagcgaaggcagcgccccaggcaccagcaccgagcctagtgagggcggctctggcggcggcagcgcccaggagattaaacggatcaacaagatcagaagaagacttgtgaaagacagcaacaccaagaaggccggcaagacaggccccatgaaaaccctgctggttagagtgatgacacccgatctgagagagcggctggaaaacctgagaaagaagcctgaaaatatcccccagcccatcagcaatacatctagagccaacctgaataagctgctgaccgattacaccgaaatgaagaaggcgatcctgcatgtgtactgggaagagttccagaaggaccctgtgggcctgatgagccgggtggcccagcctgccagcaagaagatcgatcagaacaagctgaaacctgagatggacgagaagggcaacctgaccaccgccggctttgcctgctctcagtgtggccagcccctgttcgtgtacaagctggagcaggtgtctgagaagggcaaggcttacaccaactacttcggacggtgcaatgtggccgagcacgaaaagctgatcctgctggcccagctgaagcccgagaaggatagcgacgaagccgtgacatatagcctgggaaagtttgggcagagggccctggatttctacagcattcatgtgaccaaggagtccacccaccccgtgaagcccctggcccagatcgccggaaacagatacgcctccggacctgtgggaaaggccctgagcgacgcatgtatgggcacaatcgcctccttcctgtctaagtaccaggacatcatcatcgaacaccagaaggtggtgaagggcaaccagaagagactggagagcctgcgggagctggccggcaaggaaaacctggaataccctagcgtgaccctgccacctcagcctcacaccaaggagggcgttgatgcctacaacgaagtgatcgcccgggtgcgaatgtgggtgaacctgaacctgtggcagaagctgaagctaagcagagatgatgccaagcctctgctgagactgaagggattcccttcctttcctctggtcgagagacaggccaacgaagtggactggtgggacatggtgtgtaacgtgaagaagctgatcaacgagaaaaaggaggatggcaaggtgttttggcagaatctggctggctacaagagacaggaagccctgagaccatacctgagcagcgaggaagatcggaagaagggaaagaaattcgctcggtaccagctgggcgacctgctgctgcacctggaaaagaagcacggcgaggactggggaaaggtgtacgacgaggcctgggagcggattgacaagaaagtggaaggcctgagcaagcacatcaagctggaagaggaacggagaagcgaggacgcccagagcaaggccgccctgaccgactggctgcgggctaaggccagcttcgtgatcgagggcctgaaggaggccgacaaggacgagttctgcagatgcgagctgaagctgcagaagtggtacggggacctgcggggaaagcccttcgccatcgaagccgagaacagcatcctggacatcagcggcttcagcaagcagtacaactgtgccttcatctggcagaaggacggcgtgaagaagctgaacctgtacctgatcatcaactacttcaagggcggcaagctgcggttcaagaagatcaaacctgaagccttcgaagccaacagattctacaccgtgatcaacaaaaagagcggcgagatcgtgcccatggaggtgaacttcaacttcgacgaccccaacctgatcatcctgcctctggcctttggcaagagacagggcagagaattcatctggaacgacctgctgtccctggaaaccggcagcctgaagctggccaacggaagagtgatcgagaagacactgtacaacagaagaacccggcaggatgagcctgccctgttcgtggccctgaccttcgagcggcgggaggtcctggactcctccaatatcaaaccaatgaacctgatcggcgtggcaagaggcgaaaacatccccgccgtgatcgccctgaccgaccccgagggctgcccactgagccggtttaaggatagcctgggaaacccaacccacatcctgagaatcggcgagagctataaggagaagcagcggaccatccaggccaagaaggaggtggagcagcggagagccggcggctacagccggaagtacgccagcaaagccaagaatctggcagacgatatggtgagaaacaccgctagagatctgctgtactacgccgtgacccaggatgccatgctgatcttcgccaacctgagccggggcttcggccggcagggcaagcggaccttcatggccgagagacagtacacacggatggaggactggctgaccgccaagctggcctacgagggcctgagcaagacctacctgtccaagacactggcccagtacacctccaagacatgcagcaactgtgggtttaccatcaccagcgccgactacgacagggtgctggagaagctgaagaagacagcaacaggctggatgaccacaattaacggcaaggagctgaaggtggagggccagattacctactacaacagatacaagagacagaacgtagtcaaggacctgtccgtcgagctggatagactgagcgaagaatctgtgaacaacgacatctcctcctggacaaagggcagaagcggagaagctctgagcctcctgaagaaaagattctcccatagacccgtgcaggagaagttcgtgtgcctgaactgcggcttcgagacacacgcagccgagcaagccgccctgaacatcgccagatcctggctgttcctgcggagccaggagtacaagaaataccagacaaacaagacaaccggcaacaccgataagagagccttcgtcgagacctggcagtccttttaccggaagaagcttaaggaggtgtggaaacctgccgtgcggtctggcggatctggcggaggctccacaagcaaggagctgcccagcgtgttcgaggacgtggccgtgtacttcaccagggaggagtggggcatgctggacaagaggcagaaggagctgtacagggacgtgatgaggatgaactacgagctgctggccagcctgggccccgccgccgccaagcccgacctgatcagcaagctggagaggagggccgccccctggatcaaggaccccaacggccccaagtggggcgagggccacccccccggcaagaccagccccaagaaaaagagaaaagtctaagctgccttctgcggggcttgccttctggccatgcccttcttctctcccttgcacctgtacctcttggtctttgaataaagcctgagtaggaaggctagcaaaaaaaaaaaaaaaaaaaaaaaaaaaaaaaaaaaaaaaaaaaaaaaaaaaaaaaaaaaaaaaaaaaaaaaaaaaaaaaa

SEQ ID NO: 6239 - RNA, 5797 nt, synthetic construct
  source 1..5797: mol_type = other RNA
aggaaataagagagaaaagaagagtaagaagaaatataagagccaccatggcccctaagaagaagcgtaaagtgagccggatggaacgcctcgtctacgaggtgcggcagaagtgcagaaacatcgaggacatctgcatctcctgcggatctctgaacgtgaccctggagcacccactgttcatcggcggcatgtgccagaactgtaaaaactgttttctggagtgtgcctatcaatacgacgatgacggctaccagagctactgcaccatctgttgcggcggaagagaggtgctgatgtgtggaaataacaactgctgccggtgcttctgcgtggaatgcgtggacctgctggtgggccccggcgccgcccaggccgctattaaggaagatccttggaactgctacatgtgcggccacaagggcacatacggcctgctgagacggagagaggactggcctagcagactgcagatgttcttcgccaataaccacgaccaggagttcgacccccctaaggtgtaccctcccgtccccgccgagaagagaaagcccatccgggtcctgagcctgttcgatggcatcgccaccggtctgctggtgctgaaggacctgggcatccaggtggataggtacattgcctccgaggtgtgcgaggactccatcaccgtgggaatggtgcgtcatcagggcaagatcatgtacgtgggcgacgtgcggagcgtgacacagaagcatatccaggagtggggccctttcgacctggtgatcggcggcagcccttgcaatgacctgagcatcgtgaacccagcccggaagggcctgtacgagggaaccggcagactgttcttcgagttttacagactgctgcacgacgcccggcctaaggaaggcgacgaccggcccttcttttggctgttcgagaatgtggtggccatgggagtcagcgacaagcgggatattagccggttcctggagagcaaccccgtgatgatcgatgccaaggaagtgagcgccgcccaccgggccagatacttctggggcaatctgcctggcatgaacagacccctggccagcaccgtgaacgacaagctggagctgcaggagtgcctggagcacggccggatcgccaagttcagcaaggtgagaaccatcaccacccgaagcaacagcatcaaacaaggcaaggaccagcactttcctgtgttcatgaacgagaaggaggacatcctgtggtgtaccgagatggagagagtgttcgggttcccagtccactacacagatgtcagcaacatgtctagactggccagacagagactgctgggaagaagctggtccgtccctgtgatcagacacctgttcgcccctctgaaggagtacttcgcctgcgtgagcagcggcaacagcaacgccaacagccggggccccagcttctctagcggcctggtgccactgtccctgagagggagccacatgggccccatggagatctacaaaaccgtgagcgcctggaagcggcagcctgtgcgcgtgctgagcctgtttcggaatatcgataaagtcctgaaaagcctgggattcctggagagcggctctggctccggcggtggcaccctgaagtacgtggaggatgtgacaaacgtggtcagacgggatgtggagaagtggggccccttcgatctggtgtacggcagcacccaacccctgggcagctcttgtgaccggtgccctggctggtacatgtttcagttccaccggatcctgcagtacgccctgccgagacaggagtcccagcggccattcttttggattttcatggacaacttgctgctgaccgaggatgaccaggaaactaccactcggttcctgcagaccgaagccgtgaccctgcaggacgtgagaggccgggactaccagaacgccatgcgggtgtggtccaacatccctggactgaaaagcaagcacgcacctctgacccctaaagaagaggagtacctgcaggcccaggtgcggagcagaagcaagctggacgcccctaaggtggatctgctggtgaagaattgcctcctgcccctgagagagtacttcaagtatttcagccagaatagtctgcccctgggcggcccaagcagcggcgcccctcctcccagcggcggcagcccagccggctccccaacctctaccgaggagggcacctctgagtccgccacccccgagagcggccctggcacctccaccgagcccagcgagggcagcgcacccggcagccctgccggcagccccacctccacagaggagggaaccagcaccgagcccagcgaaggcagcgccccaggcaccagcaccgagcctagtgagggcggctctggcggcggcagcgcccaggagattaaacggatcaacaagatcagaagaagacttgtgaaagacagcaacaccaagaaggccggcaagacaggccccatgaaaaccctgctggttagagtgatgacacccgatctgagagagcggctggaaaacctgagaaagaagcctgaaaatatcccccagcccatcagcaatacatctagagccaacctgaataagctgctgaccgattacaccgaaatgaagaaggcgatcctgcatgtgtactgggaagagttccagaaggaccctgtgggcctgatgagccgggtggcccagcctgccagcaagaagatcgatcagaacaagctgaaacctgagatggacgagaagggcaacctgaccaccgccggctttgcctgctctcagtgtggccagcccctgttcgtgtacaagctggagcaggtgtctgagaagggcaaggcttacaccaactacttcggacggtgcaatgtggccgagcacgaaaagctgatcctgctggcccagctgaagcccgagaaggatagcgacgaagccgtgacatatagcctgggaaagtttgggcagagggccctggatttctacagcattcatgtgaccaaggagtccacccaccccgtgaagcccctggcccagatcgccggaaacagatacgcctccggacctgtgggaaaggccctgagcgacgcatgtatgggcacaatcgcctccttcctgtctaagtaccaggacatcatcatcgaacaccagaaggtggtgaagggcaaccagaagagactggagagcctgcgggagctggccggcaaggaaaacctggaataccctagcgtgaccctgccacctcagcctcacaccaaggagggcgttgatgcctacaacgaagtgatcgcccgggtgcgaatgtgggtgaacctgaacctgtggcagaagctgaagctaagcagagatgatgccaagcctctgctgagactgaagggattcccttcctttcctctggtcgagagacaggccaacgaagtggactggtgggacatggtgtgtaacgtgaagaagctgatcaacgagaaaaaggaggatggcaaggtgttttggcagaatctggctggctacaagagacaggaagccctgagaccatacctgagcagcgaggaagatcggaagaagggaaagaaattcgctcggtaccagctgggcgacctgctgctgcacctggaaaagaagcacggcgaggactggggaaaggtgtacgacgaggcctgggagcggattgacaagaaagtggaaggcctgagcaagcacatcaagctggaagaggaacggagaagcgaggacgcccagagcaaggccgccctgaccgactggctgcgggctaaggccagcttcgtgatcgagggcctgaaggaggccgacaaggacgagttctgcagatgcgagctgaagctgcagaagtggtacggggacctgcggggaaagcccttcgccatcgaagccgagaacagcatcctggacatcagcggcttcagcaagcagtacaactgtgccttcatctggcagaaggacggcgtgaagaagctgaacctgtacctgatcatcaactacttcaagggcggcaagctgcggttcaagaagatcaaacctgaagccttcgaagccaacagattctacaccgtgatcaacaaaaagagcggcgagatcgtgcccatggaggtgaacttcaacttcgacgaccccaacctgatcatcctgcctctggcctttggcaagagacagggcagagaattcatctggaacgacctgctgtccctggaaaccggcagcctgaagctggccaacggaagagtgatcgagaagacactgtacaacagaagaacccggcaggatgagcctgccctgttcgtggccctgaccttcgagcggcgggaggtcctggactcctccaatatcaaaccaatgaacctgatcggcgtggcaagaggcgaaaacatccccgccgtgatcgccctgaccgaccccgagggctgcccactgagccggtttaaggatagcctgggaaacccaacccacatcctgagaatcggcgagagctataaggagaagcagcggaccatccaggccaagaaggaggtggagcagcggagagccggcggctacagccggaagtacgccagcaaagccaagaatctggcagacgatatggtgagaaacaccgctagagatctgctgtactacgccgtgacccaggatgccatgctgatcttcgccaacctgagccggggcttcggccggcagggcaagcggaccttcatggccgagagacagtacacacggatggaggactggctgaccgccaagctggcctacgagggcctgagcaagacctacctgtccaagacactggcccagtacacctccaagacatgcagcaactgtgggtttaccatcaccagcgccgactacgacagggtgctggagaagctgaagaagacagcaacaggctggatgaccacaattaacggcaaggagctgaaggtggagggccagattacctactacaacagatacaagagacagaacgtagtcaaggacctgtccgtcgagctggatagactgagcgaagaatctgtgaacaacgacatctcctcctggacaaagggcagaagcggagaagctctgagcctcctgaagaaaagattctcccatagacccgtgcaggagaagttcgtgtgcctgaactgcggcttcgagacacacgcagccgagcaagccgccctgaacatcgccagatcctggctgttcctgcggagccaggagtacaagaaataccagacaaacaagacaaccggcaacaccgataagagagccttcgtcgagacctggcagtccttttaccggaagaagcttaaggaggtgtggaaacctgccgtgcggtctggcggatctggcggaggctccacaagcggcaaggagctgctgagcttcgaggacgtggccatgtacttcaccagggaggagtggggcaggctggactggggccagaaggacctgtacagggacgtgatgctggagaactacaggaacatggtgctgctgggcttccagttccccaagcccgaggtgatctgccagctggagaactgggacgagcagtggatcctggacctgcccagggccggcagcaggaaggccagcggcagcgcctgcaccagccccaagaaaaagagaaaagtctaagctgccttctgcggggcttgccttctggccatgcccttcttctctcccttgcacctgtacctcttggtctttgaataaagcctgagtaggaaggctagcaaaaaaaaaaaaaaaaaaaaaaaaaaaaaaaaaaaaaaaaaaaaaaaaaaaaaaaaaaaaaaaaaaaaaaaaaaaaaaaa

SEQ ID NO: 6240 - RNA, 5797 nt, synthetic construct
  source 1..5797: mol_type = other RNA
aggaaataagagagaaaagaagagtaagaagaaatataagagccaccatggcccctaagaagaagcgtaaagtgagccggatggaacgcctcgtctacgaggtgcggcagaagtgcagaaacatcgaggacatctgcatctcctgcggatctctgaacgtgaccctggagcacccactgttcatcggcggcatgtgccagaactgtaaaaactgttttctggagtgtgcctatcaatacgacgatgacggctaccagagctactgcaccatctgttgcggcggaagagaggtgctgatgtgtggaaataacaactgctgccggtgcttctgcgtggaatgcgtggacctgctggtgggccccggcgccgcccaggccgctattaaggaagatccttggaactgctacatgtgcggccacaagggcacatacggcctgctgagacggagagaggactggcctagcagactgcagatgttcttcgccaataaccacgaccaggagttcgacccccctaaggtgtaccctcccgtccccgccgagaagagaaagcccatccgggtcctgagcctgttcgatggcatcgccaccggtctgctggtgctgaaggacctgggcatccaggtggataggtacattgcctccgaggtgtgcgaggactccatcaccgtgggaatggtgcgtcatcagggcaagatcatgtacgtgggcgacgtgcggagcgtgacacagaagcatatccaggagtggggccctttcgacctggtgatcggcggcagcccttgcaatgacctgagcatcgtgaacccagcccggaagggcctgtacgagggaaccggcagactgttcttcgagttttacagactgctgcacgacgcccggcctaaggaaggcgacgaccggcccttcttttggctgttcgagaatgtggtggccatgggagtcagcgacaagcgggatattagccggttcctggagagcaaccccgtgatgatcgatgccaaggaagtgagcgccgcccaccgggccagatacttctggggcaatctgcctggcatgaacagacccctggccagcaccgtgaacgacaagctggagctgcaggagtgcctggagcacggccggatcgccaagttcagcaaggtgagaaccatcaccacccgaagcaacagcatcaaacaaggcaaggaccagcactttcctgtgttcatgaacgagaaggaggacatcctgtggtgtaccgagatggagagagtgttcgggttcccagtccactacacagatgtcagcaacatgtctagactggccagacagagactgctgggaagaagctggtccgtccctgtgatcagacacctgttcgcccctctgaaggagtacttcgcctgcgtgagcagcggcaacagcaacgccaacagccggggccccagcttctctagcggcctggtgccactgtccctgagagggagccacatgggccccatggagatctacaaaaccgtgagcgcctggaagcggcagcctgtgcgcgtgctgagcctgtttcggaatatcgataaagtcctgaaaagcctgggattcctggagagcggctctggctccggcggtggcaccctgaagtacgtggaggatgtgacaaacgtggtcagacgggatgtggagaagtggggccccttcgatctggtgtacggcagcacccaacccctgggcagctcttgtgaccggtgccctggctggtacatgtttcagttccaccggatcctgcagtacgccctgccgagacaggagtcccagcggccattcttttggattttcatggacaacttgctgctgaccgaggatgaccaggaaactaccactcggttcctgcagaccgaagccgtgaccctgcaggacgtgagaggccgggactaccagaacgccatgcgggtgtggtccaacatccctggactgaaaagcaagcacgcacctctgacccctaaagaagaggagtacctgcaggcccaggtgcggagcagaagcaagctggacgcccctaaggtggatctgctggtgaagaattgcctcctgcccctgagagagtacttcaagtatttcagccagaatagtctgcccctgggcggcccaagcagcggcgcccctcctcccagcggcggcagcccagccggctccccaacctctaccgaggagggcacctctgagtccgccacccccgagagcggccctggcacctccaccgagcccagcgagggcagcgcacccggcagccctgccggcagccccacctccacagaggagggaaccagcaccgagcccagcgaaggcagcgccccaggcaccagcaccgagcctagtgagggcggctctggcggcggcagcgcccaggagattaaacggatcaacaagatcagaagaagacttgtgaaagacagcaacaccaagaaggccggcaagacaggccccatgaaaaccctgctggttagagtgatgacacccgatctgagagagcggctggaaaacctgagaaagaagcctgaaaatatcccccagcccatcagcaatacatctagagccaacctgaataagctgctgaccgattacaccgaaatgaagaaggcgatcctgcatgtgtactgggaagagttccagaaggaccctgtgggcctgatgagccgggtggcccagcctgccagcaagaagatcgatcagaacaagctgaaacctgagatggacgagaagggcaacctgaccaccgccggctttgcctgctctcagtgtggccagcccctgttcgtgtacaagctggagcaggtgtctgagaagggcaaggcttacaccaactacttcggacggtgcaatgtggccgagcacgaaaagctgatcctgctggcccagctgaagcccgagaaggatagcgacgaagccgtgacatatagcctgggaaagtttgggcagagggccctggatttctacagcattcatgtgaccaaggagtccacccaccccgtgaagcccctggcccagatcgccggaaacagatacgcctccggacctgtgggaaaggccctgagcgacgcatgtatgggcacaatcgcctccttcctgtctaagtaccaggacatcatcatcgaacaccagaaggtggtgaagggcaaccagaagagactggagagcctgcgggagctggccggcaaggaaaacctggaataccctagcgtgaccctgccacctcagcctcacaccaaggagggcgttgatgcctacaacgaagtgatcgcccgggtgcgaatgtgggtgaacctgaacctgtggcagaagctgaagctaagcagagatgatgccaagcctctgctgagactgaagggattcccttcctttcctctggtcgagagacaggccaacgaagtggactggtgggacatggtgtgtaacgtgaagaagctgatcaacgagaaaaaggaggatggcaaggtgttttggcagaatctggctggctacaagagacaggaagccctgagaccatacctgagcagcgaggaagatcggaagaagggaaagaaattcgctcggtaccagctgggcgacctgctgctgcacctggaaaagaagcacggcgaggactggggaaaggtgtacgacgaggcctgggagcggattgacaagaaagtggaaggcctgagcaagcacatcaagctggaagaggaacggagaagcgaggacgcccagagcaaggccgccctgaccgactggctgcgggctaaggccagcttcgtgatcgagggcctgaaggaggccgacaaggacgagttctgcagatgcgagctgaagctgcagaagtggtacggggacctgcggggaaagcccttcgccatcgaagccgagaacagcatcctggacatcagcggcttcagcaagcagtacaactgtgccttcatctggcagaaggacggcgtgaagaagctgaacctgtacctgatcatcaactacttcaagggcggcaagctgcggttcaagaagatcaaacctgaagccttcgaagccaacagattctacaccgtgatcaacaaaaagagcggcgagatcgtgcccatggaggtgaacttcaacttcgacgaccccaacctgatcatcctgcctctggcctttggcaagagacagggcagagaattcatctggaacgacctgctgtccctggaaaccggcagcctgaagctggccaacggaagagtgatcgagaagacactgtacaacagaagaacccggcaggatgagcctgccctgttcgtggccctgaccttcgagcggcgggaggtcctggactcctccaatatcaaaccaatgaacctgatcggcgtggcaagaggcgaaaacatccccgccgtgatcgccctgaccgaccccgagggctgcccactgagccggtttaaggatagcctgggaaacccaacccacatcctgagaatcggcgagagctataaggagaagcagcggaccatccaggccaagaaggaggtggagcagcggagagccggcggctacagccggaagtacgccagcaaagccaagaatctggcagacgatatggtgagaaacaccgctagagatctgctgtactacgccgtgacccaggatgccatgctgatcttcgccaacctgagccggggcttcggccggcagggcaagcggaccttcatggccgagagacagtacacacggatggaggactggctgaccgccaagctggcctacgagggcctgagcaagacctacctgtccaagacactggcccagtacacctccaagacatgcagcaactgtgggtttaccatcaccagcgccgactacgacagggtgctggagaagctgaagaagacagcaacaggctggatgaccacaattaacggcaaggagctgaaggtggagggccagattacctactacaacagatacaagagacagaacgtagtcaaggacctgtccgtcgagctggatagactgagcgaagaatctgtgaacaacgacatctcctcctggacaaagggcagaagcggagaagctctgagcctcctgaagaaaagattctcccatagacccgtgcaggagaagttcgtgtgcctgaactgcggcttcgagacacacgcagccgagcaagccgccctgaacatcgccagatcctggctgttcctgcggagccaggagtacaagaaataccagacaaacaagacaaccggcaacaccgataagagagccttcgtcgagacctggcagtccttttaccggaagaagcttaaggaggtgtggaaacctgccgtgcggtctggcggatctggcggaggctccacaagcgtgtggggccccctgagcttcatggacgtgttcgtggacttcacctgggaggagtggcagctgctggaccccgcccagaagtgcctgtacaggagcgtgatgctggagaactacagcaacctggtgagcctgggctaccagcacaccaagcccgacatcatcttcaagctggagcagggcgaggagctgtgcatggtgcaggcccccatccccaaccagtgctgccccaacaaggtgtggaagaccagccccaagaaaaagagaaaagtctaagctgccttctgcggggcttgccttctggccatgcccttcttctctcccttgcacctgtacctcttggtctttgaataaagcctgagtaggaaggctagcaaaaaaaaaaaaaaaaaaaaaaaaaaaaaaaaaaaaaaaaaaaaaaaaaaaaaaaaaaaaaaaaaaaaaaaaaaaaaaaa

SEQ ID NO: 6241 - RNA, 5797 nt, synthetic construct
  source 1..5797: mol_type = other RNA
aggaaataagagagaaaagaagagtaagaagaaatataagagccaccatggcccctaagaagaagcgtaaagtgagccggatggaacgcctcgtctacgaggtgcggcagaagtgcagaaacatcgaggacatctgcatctcctgcggatctctgaacgtgaccctggagcacccactgttcatcggcggcatgtgccagaactgtaaaaactgttttctggagtgtgcctatcaatacgacgatgacggctaccagagctactgcaccatctgttgcggcggaagagaggtgctgatgtgtggaaataacaactgctgccggtgcttctgcgtggaatgcgtggacctgctggtgggccccggcgccgcccaggccgctattaaggaagatccttggaactgctacatgtgcggccacaagggcacatacggcctgctgagacggagagaggactggcctagcagactgcagatgttcttcgccaataaccacgaccaggagttcgacccccctaaggtgtaccctcccgtccccgccgagaagagaaagcccatccgggtcctgagcctgttcgatggcatcgccaccggtctgctggtgctgaaggacctgggcatccaggtggataggtacattgcctccgaggtgtgcgaggactccatcaccgtgggaatggtgcgtcatcagggcaagatcatgtacgtgggcgacgtgcggagcgtgacacagaagcatatccaggagtggggccctttcgacctggtgatcggcggcagcccttgcaatgacctgagcatcgtgaacccagcccggaagggcctgtacgagggaaccggcagactgttcttcgagttttacagactgctgcacgacgcccggcctaaggaaggcgacgaccggcccttcttttggctgttcgagaatgtggtggccatgggagtcagcgacaagcgggatattagccggttcctggagagcaaccccgtgatgatcgatgccaaggaagtgagcgccgcccaccgggccagatacttctggggcaatctgcctggcatgaacagacccctggccagcaccgtgaacgacaagctggagctgcaggagtgcctggagcacggccggatcgccaagttcagcaaggtgagaaccatcaccacccgaagcaacagcatcaaacaaggcaaggaccagcactttcctgtgttcatgaacgagaaggaggacatcctgtggtgtaccgagatggagagagtgttcgggttcccagtccactacacagatgtcagcaacatgtctagactggccagacagagactgctgggaagaagctggtccgtccctgtgatcagacacctgttcgcccctctgaaggagtacttcgcctgcgtgagcagcggcaacagcaacgccaacagccggggccccagcttctctagcggcctggtgccactgtccctgagagggagccacatgggccccatggagatctacaaaaccgtgagcgcctggaagcggcagcctgtgcgcgtgctgagcctgtttcggaatatcgataaagtcctgaaaagcctgggattcctggagagcggctctggctccggcggtggcaccctgaagtacgtggaggatgtgacaaacgtggtcagacgggatgtggagaagtggggccccttcgatctggtgtacggcagcacccaacccctgggcagctcttgtgaccggtgccctggctggtacatgtttcagttccaccggatcctgcagtacgccctgccgagacaggagtcccagcggccattcttttggattttcatggacaacttgctgctgaccgaggatgaccaggaaactaccactcggttcctgcagaccgaagccgtgaccctgcaggacgtgagaggccgggactaccagaacgccatgcgggtgtggtccaacatccctggactgaaaagcaagcacgcacctctgacccctaaagaagaggagtacctgcaggcccaggtgcggagcagaagcaagctggacgcccctaaggtggatctgctggtgaagaattgcctcctgcccctgagagagtacttcaagtatttcagccagaatagtctgcccctgggcggcccaagcagcggcgcccctcctcccagcggcggcagcccagccggctccccaacctctaccgaggagggcacctctgagtccgccacccccgagagcggccctggcacctccaccgagcccagcgagggcagcgcacccggcagccctgccggcagccccacctccacagaggagggaaccagcaccgagcccagcgaaggcagcgccccaggcaccagcaccgagcctagtgagggcggctctggcggcggcagcgcccaggagattaaacggatcaacaagatcagaagaagacttgtgaaagacagcaacaccaagaaggccggcaagacaggccccatgaaaaccctgctggttagagtgatgacacccgatctgagagagcggctggaaaacctgagaaagaagcctgaaaatatcccccagcccatcagcaatacatctagagccaacctgaataagctgctgaccgattacaccgaaatgaagaaggcgatcctgcatgtgtactgggaagagttccagaaggaccctgtgggcctgatgagccgggtggcccagcctgccagcaagaagatcgatcagaacaagctgaaacctgagatggacgagaagggcaacctgaccaccgccggctttgcctgctctcagtgtggccagcccctgttcgtgtacaagctggagcaggtgtctgagaagggcaaggcttacaccaactacttcggacggtgcaatgtggccgagcacgaaaagctgatcctgctggcccagctgaagcccgagaaggatagcgacgaagccgtgacatatagcctgggaaagtttgggcagagggccctggatttctacagcattcatgtgaccaaggagtccacccaccccgtgaagcccctggcccagatcgccggaaacagatacgcctccggacctgtgggaaaggccctgagcgacgcatgtatgggcacaatcgcctccttcctgtctaagtaccaggacatcatcatcgaacaccagaaggtggtgaagggcaaccagaagagactggagagcctgcgggagctggccggcaaggaaaacctggaataccctagcgtgaccctgccacctcagcctcacaccaaggagggcgttgatgcctacaacgaagtgatcgcccgggtgcgaatgtgggtgaacctgaacctgtggcagaagctgaagctaagcagagatgatgccaagcctctgctgagactgaagggattcccttcctttcctctggtcgagagacaggccaacgaagtggactggtgggacatggtgtgtaacgtgaagaagctgatcaacgagaaaaaggaggatggcaaggtgttttggcagaatctggctggctacaagagacaggaagccctgagaccatacctgagcagcgaggaagatcggaagaagggaaagaaattcgctcggtaccagctgggcgacctgctgctgcacctggaaaagaagcacggcgaggactggggaaaggtgtacgacgaggcctgggagcggattgacaagaaagtggaaggcctgagcaagcacatcaagctggaagaggaacggagaagcgaggacgcccagagcaaggccgccctgaccgactggctgcgggctaaggccagcttcgtgatcgagggcctgaaggaggccgacaaggacgagttctgcagatgcgagctgaagctgcagaagtggtacggggacctgcggggaaagcccttcgccatcgaagccgagaacagcatcctggacatcagcggcttcagcaagcagtacaactgtgccttcatctggcagaaggacggcgtgaagaagctgaacctgtacctgatcatcaactacttcaagggcggcaagctgcggttcaagaagatcaaacctgaagccttcgaagccaacagattctacaccgtgatcaacaaaaagagcggcgagatcgtgcccatggaggtgaacttcaacttcgacgaccccaacctgatcatcctgcctctggcctttggcaagagacagggcagagaattcatctggaacgacctgctgtccctggaaaccggcagcctgaagctggccaacggaagagtgatcgagaagacactgtacaacagaagaacccggcaggatgagcctgccctgttcgtggccctgaccttcgagcggcgggaggtcctggactcctccaatatcaaaccaatgaacctgatcggcgtggcaagaggcgaaaacatccccgccgtgatcgccctgaccgaccccgagggctgcccactgagccggtttaaggatagcctgggaaacccaacccacatcctgagaatcggcgagagctataaggagaagcagcggaccatccaggccaagaaggaggtggagcagcggagagccggcggctacagccggaagtacgccagcaaagccaagaatctggcagacgatatggtgagaaacaccgctagagatctgctgtactacgccgtgacccaggatgccatgctgatcttcgccaacctgagccggggcttcggccggcagggcaagcggaccttcatggccgagagacagtacacacggatggaggactggctgaccgccaagctggcctacgagggcctgagcaagacctacctgtccaagacactggcccagtacacctccaagacatgcagcaactgtgggtttaccatcaccagcgccgactacgacagggtgctggagaagctgaagaagacagcaacaggctggatgaccacaattaacggcaaggagctgaaggtggagggccagattacctactacaacagatacaagagacagaacgtagtcaaggacctgtccgtcgagctggatagactgagcgaagaatctgtgaacaacgacatctcctcctggacaaagggcagaagcggagaagctctgagcctcctgaagaaaagattctcccatagacccgtgcaggagaagttcgtgtgcctgaactgcggcttcgagacacacgcagccgagcaagccgccctgaacatcgccagatcctggctgttcctgcggagccaggagtacaagaaataccagacaaacaagacaaccggcaacaccgataagagagccttcgtcgagacctggcagtccttttaccggaagaagcttaaggaggtgtggaaacctgccgtgcggtctggcggatctggcggaggctccacaagcagctgcgagggcagcgtgagcttcagggacgtggccatcaacttcagcagggaggagtggcagcacctggaccccagccagaggaacctgtacagggacgtgatgctggagacctacagccacctgctgagcgtgggctaccaggtgcccgaggccgaggtggtgatgctggagcagggcaaggagccctgggccctgcagggcgagaggcccaggcagagctgccccggcgagaagctgtggaccagccccaagaaaaagagaaaagtctaagctgccttctgcggggcttgccttctggccatgcccttcttctctcccttgcacctgtacctcttggtctttgaataaagcctgagtaggaaggctagcaaaaaaaaaaaaaaaaaaaaaaaaaaaaaaaaaaaaaaaaaaaaaaaaaaaaaaaaaaaaaaaaaaaaaaaaaaaaaaaa

SEQ ID NO: 6242 - RNA, 5797 nt, synthetic construct
  source 1..5797: mol_type = other RNA
aggaaataagagagaaaagaagagtaagaagaaatataagagccaccatggcccctaagaagaagcgtaaagtgagccggatggaacgcctcgtctacgaggtgcggcagaagtgcagaaacatcgaggacatctgcatctcctgcggatctctgaacgtgaccctggagcacccactgttcatcggcggcatgtgccagaactgtaaaaactgttttctggagtgtgcctatcaatacgacgatgacggctaccagagctactgcaccatctgttgcggcggaagagaggtgctgatgtgtggaaataacaactgctgccggtgcttctgcgtggaatgcgtggacctgctggtgggccccggcgccgcccaggccgctattaaggaagatccttggaactgctacatgtgcggccacaagggcacatacggcctgctgagacggagagaggactggcctagcagactgcagatgttcttcgccaataaccacgaccaggagttcgacccccctaaggtgtaccctcccgtccccgccgagaagagaaagcccatccgggtcctgagcctgttcgatggcatcgccaccggtctgctggtgctgaaggacctgggcatccaggtggataggtacattgcctccgaggtgtgcgaggactccatcaccgtgggaatggtgcgtcatcagggcaagatcatgtacgtgggcgacgtgcggagcgtgacacagaagcatatccaggagtggggccctttcgacctggtgatcggcggcagcccttgcaatgacctgagcatcgtgaacccagcccggaagggcctgtacgagggaaccggcagactgttcttcgagttttacagactgctgcacgacgcccggcctaaggaaggcgacgaccggcccttcttttggctgttcgagaatgtggtggccatgggagtcagcgacaagcgggatattagccggttcctggagagcaaccccgtgatgatcgatgccaaggaagtgagcgccgcccaccgggccagatacttctggggcaatctgcctggcatgaacagacccctggccagcaccgtgaacgacaagctggagctgcaggagtgcctggagcacggccggatcgccaagttcagcaaggtgagaaccatcaccacccgaagcaacagcatcaaacaaggcaaggaccagcactttcctgtgttcatgaacgagaaggaggacatcctgtggtgtaccgagatggagagagtgttcgggttcccagtccactacacagatgtcagcaacatgtctagactggccagacagagactgctgggaagaagctggtccgtccctgtgatcagacacctgttcgcccctctgaaggagtacttcgcctgcgtgagcagcggcaacagcaacgccaacagccggggccccagcttctctagcggcctggtgccactgtccctgagagggagccacatgggccccatggagatctacaaaaccgtgagcgcctggaagcggcagcctgtgcgcgtgctgagcctgtttcggaatatcgataaagtcctgaaaagcctgggattcctggagagcggctctggctccggcggtggcaccctgaagtacgtggaggatgtgacaaacgtggtcagacgggatgtggagaagtggggccccttcgatctggtgtacggcagcacccaacccctgggcagctcttgtgaccggtgccctggctggtacatgtttcagttccaccggatcctgcagtacgccctgccgagacaggagtcccagcggccattcttttggattttcatggacaacttgctgctgaccgaggatgaccaggaaactaccactcggttcctgcagaccgaagccgtgaccctgcaggacgtgagaggccgggactaccagaacgccatgcgggtgtggtccaacatccctggactgaaaagcaagcacgcacctctgacccctaaagaagaggagtacctgcaggcccaggtgcggagcagaagcaagctggacgcccctaaggtggatctgctggtgaagaattgcctcctgcccctgagagagtacttcaagtatttcagccagaatagtctgcccctgggcggcccaagcagcggcgcccctcctcccagcggcggcagcccagccggctccccaacctctaccgaggagggcacctctgagtccgccacccccgagagcggccctggcacctccaccgagcccagcgagggcagcgcacccggcagccctgccggcagccccacctccacagaggagggaaccagcaccgagcccagcgaaggcagcgccccaggcaccagcaccgagcctagtgagggcggctctggcggcggcagcgcccaggagattaaacggatcaacaagatcagaagaagacttgtgaaagacagcaacaccaagaaggccggcaagacaggccccatgaaaaccctgctggttagagtgatgacacccgatctgagagagcggctggaaaacctgagaaagaagcctgaaaatatcccccagcccatcagcaatacatctagagccaacctgaataagctgctgaccgattacaccgaaatgaagaaggcgatcctgcatgtgtactgggaagagttccagaaggaccctgtgggcctgatgagccgggtggcccagcctgccagcaagaagatcgatcagaacaagctgaaacctgagatggacgagaagggcaacctgaccaccgccggctttgcctgctctcagtgtggccagcccctgttcgtgtacaagctggagcaggtgtctgagaagggcaaggcttacaccaactacttcggacggtgcaatgtggccgagcacgaaaagctgatcctgctggcccagctgaagcccgagaaggatagcgacgaagccgtgacatatagcctgggaaagtttgggcagagggccctggatttctacagcattcatgtgaccaaggagtccacccaccccgtgaagcccctggcccagatcgccggaaacagatacgcctccggacctgtgggaaaggccctgagcgacgcatgtatgggcacaatcgcctccttcctgtctaagtaccaggacatcatcatcgaacaccagaaggtggtgaagggcaaccagaagagactggagagcctgcgggagctggccggcaaggaaaacctggaataccctagcgtgaccctgccacctcagcctcacaccaaggagggcgttgatgcctacaacgaagtgatcgcccgggtgcgaatgtgggtgaacctgaacctgtggcagaagctgaagctaagcagagatgatgccaagcctctgctgagactgaagggattcccttcctttcctctggtcgagagacaggccaacgaagtggactggtgggacatggtgtgtaacgtgaagaagctgatcaacgagaaaaaggaggatggcaaggtgttttggcagaatctggctggctacaagagacaggaagccctgagaccatacctgagcagcgaggaagatcggaagaagggaaagaaattcgctcggtaccagctgggcgacctgctgctgcacctggaaaagaagcacggcgaggactggggaaaggtgtacgacgaggcctgggagcggattgacaagaaagtggaaggcctgagcaagcacatcaagctggaagaggaacggagaagcgaggacgcccagagcaaggccgccctgaccgactggctgcgggctaaggccagcttcgtgatcgagggcctgaaggaggccgacaaggacgagttctgcagatgcgagctgaagctgcagaagtggtacggggacctgcggggaaagcccttcgccatcgaagccgagaacagcatcctggacatcagcggcttcagcaagcagtacaactgtgccttcatctggcagaaggacggcgtgaagaagctgaacctgtacctgatcatcaactacttcaagggcggcaagctgcggttcaagaagatcaaacctgaagccttcgaagccaacagattctacaccgtgatcaacaaaaagagcggcgagatcgtgcccatggaggtgaacttcaacttcgacgaccccaacctgatcatcctgcctctggcctttggcaagagacagggcagagaattcatctggaacgacctgctgtccctggaaaccggcagcctgaagctggccaacggaagagtgatcgagaagacactgtacaacagaagaacccggcaggatgagcctgccctgttcgtggccctgaccttcgagcggcgggaggtcctggactcctccaatatcaaaccaatgaacctgatcggcgtggcaagaggcgaaaacatccccgccgtgatcgccctgaccgaccccgagggctgcccactgagccggtttaaggatagcctgggaaacccaacccacatcctgagaatcggcgagagctataaggagaagcagcggaccatccaggccaagaaggaggtggagcagcggagagccggcggctacagccggaagtacgccagcaaagccaagaatctggcagacgatatggtgagaaacaccgctagagatctgctgtactacgccgtgacccaggatgccatgctgatcttcgccaacctgagccggggcttcggccggcagggcaagcggaccttcatggccgagagacagtacacacggatggaggactggctgaccgccaagctggcctacgagggcctgagcaagacctacctgtccaagacactggcccagtacacctccaagacatgcagcaactgtgggtttaccatcaccagcgccgactacgacagggtgctggagaagctgaagaagacagcaacaggctggatgaccacaattaacggcaaggagctgaaggtggagggccagattacctactacaacagatacaagagacagaacgtagtcaaggacctgtccgtcgagctggatagactgagcgaagaatctgtgaacaacgacatctcctcctggacaaagggcagaagcggagaagctctgagcctcctgaagaaaagattctcccatagacccgtgcaggagaagttcgtgtgcctgaactgcggcttcgagacacacgcagccgagcaagccgccctgaacatcgccagatcctggctgttcctgcggagccaggagtacaagaaataccagacaaacaagacaaccggcaacaccgataagagagccttcgtcgagacctggcagtccttttaccggaagaagcttaaggaggtgtggaaacctgccgtgcggtctggcggatctggcggaggctccacaagctacaccctggagagcctgaccctggaggacgtggccgtggacttcacccaggaggagtggaggctgctggcccccgcccagaaggacctgtactgggacgtgatgctggagaacttcaggaacctggtgagcgtgggctacgtggccagcatgcccgccgccctgagcaggctggagaggggcggccagtggatgaccgaggacgagaccaggcactggatctgccccgagatcaagaaggacaccagccccaagaaaaagagaaaagtctaagctgccttctgcggggcttgccttctggccatgcccttcttctctcccttgcacctgtacctcttggtctttgaataaagcctgagtaggaaggctagcaaaaaaaaaaaaaaaaaaaaaaaaaaaaaaaaaaaaaaaaaaaaaaaaaaaaaaaaaaaaaaaaaaaaaaaaaaaaaaaa

SEQ ID NO: 6243 - RNA, 5797 nt, synthetic construct
  source 1..5797: mol_type = other RNA
aggaaataagagagaaaagaagagtaagaagaaatataagagccaccatggcccctaagaagaagcgtaaagtgagccggatggaacgcctcgtctacgaggtgcggcagaagtgcagaaacatcgaggacatctgcatctcctgcggatctctgaacgtgaccctggagcacccactgttcatcggcggcatgtgccagaactgtaaaaactgttttctggagtgtgcctatcaatacgacgatgacggctaccagagctactgcaccatctgttgcggcggaagagaggtgctgatgtgtggaaataacaactgctgccggtgcttctgcgtggaatgcgtggacctgctggtgggccccggcgccgcccaggccgctattaaggaagatccttggaactgctacatgtgcggccacaagggcacatacggcctgctgagacggagagaggactggcctagcagactgcagatgttcttcgccaataaccacgaccaggagttcgacccccctaaggtgtaccctcccgtccccgccgagaagagaaagcccatccgggtcctgagcctgttcgatggcatcgccaccggtctgctggtgctgaaggacctgggcatccaggtggataggtacattgcctccgaggtgtgcgaggactccatcaccgtgggaatggtgcgtcatcagggcaagatcatgtacgtgggcgacgtgcggagcgtgacacagaagcatatccaggagtggggccctttcgacctggtgatcggcggcagcccttgcaatgacctgagcatcgtgaacccagcccggaagggcctgtacgagggaaccggcagactgttcttcgagttttacagactgctgcacgacgcccggcctaaggaaggcgacgaccggcccttcttttggctgttcgagaatgtggtggccatgggagtcagcgacaagcgggatattagccggttcctggagagcaaccccgtgatgatcgatgccaaggaagtgagcgccgcccaccgggccagatacttctggggcaatctgcctggcatgaacagacccctggccagcaccgtgaacgacaagctggagctgcaggagtgcctggagcacggccggatcgccaagttcagcaaggtgagaaccatcaccacccgaagcaacagcatcaaacaaggcaaggaccagcactttcctgtgttcatgaacgagaaggaggacatcctgtggtgtaccgagatggagagagtgttcgggttcccagtccactacacagatgtcagcaacatgtctagactggccagacagagactgctgggaagaagctggtccgtccctgtgatcagacacctgttcgcccctctgaaggagtacttcgcctgcgtgagcagcggcaacagcaacgccaacagccggggccccagcttctctagcggcctggtgccactgtccctgagagggagccacatgggccccatggagatctacaaaaccgtgagcgcctggaagcggcagcctgtgcgcgtgctgagcctgtttcggaatatcgataaagtcctgaaaagcctgggattcctggagagcggctctggctccggcggtggcaccctgaagtacgtggaggatgtgacaaacgtggtcagacgggatgtggagaagtggggccccttcgatctggtgtacggcagcacccaacccctgggcagctcttgtgaccggtgccctggctggtacatgtttcagttccaccggatcctgcagtacgccctgccgagacaggagtcccagcggccattcttttggattttcatggacaacttgctgctgaccgaggatgaccaggaaactaccactcggttcctgcagaccgaagccgtgaccctgcaggacgtgagaggccgggactaccagaacgccatgcgggtgtggtccaacatccctggactgaaaagcaagcacgcacctctgacccctaaagaagaggagtacctgcaggcccaggtgcggagcagaagcaagctggacgcccctaaggtggatctgctggtgaagaattgcctcctgcccctgagagagtacttcaagtatttcagccagaatagtctgcccctgggcggcccaagcagcggcgcccctcctcccagcggcggcagcccagccggctccccaacctctaccgaggagggcacctctgagtccgccacccccgagagcggccctggcacctccaccgagcccagcgagggcagcgcacccggcagccctgccggcagccccacctccacagaggagggaaccagcaccgagcccagcgaaggcagcgccccaggcaccagcaccgagcctagtgagggcggctctggcggcggcagcgcccaggagattaaacggatcaacaagatcagaagaagacttgtgaaagacagcaacaccaagaaggccggcaagacaggccccatgaaaaccctgctggttagagtgatgacacccgatctgagagagcggctggaaaacctgagaaagaagcctgaaaatatcccccagcccatcagcaatacatctagagccaacctgaataagctgctgaccgattacaccgaaatgaagaaggcgatcctgcatgtgtactgggaagagttccagaaggaccctgtgggcctgatgagccgggtggcccagcctgccagcaagaagatcgatcagaacaagctgaaacctgagatggacgagaagggcaacctgaccaccgccggctttgcctgctctcagtgtggccagcccctgttcgtgtacaagctggagcaggtgtctgagaagggcaaggcttacaccaactacttcggacggtgcaatgtggccgagcacgaaaagctgatcctgctggcccagctgaagcccgagaaggatagcgacgaagccgtgacatatagcctgggaaagtttgggcagagggccctggatttctacagcattcatgtgaccaaggagtccacccaccccgtgaagcccctggcccagatcgccggaaacagatacgcctccggacctgtgggaaaggccctgagcgacgcatgtatgggcacaatcgcctccttcctgtctaagtaccaggacatcatcatcgaacaccagaaggtggtgaagggcaaccagaagagactggagagcctgcgggagctggccggcaaggaaaacctggaataccctagcgtgaccctgccacctcagcctcacaccaaggagggcgttgatgcctacaacgaagtgatcgcccgggtgcgaatgtgggtgaacctgaacctgtggcagaagctgaagctaagcagagatgatgccaagcctctgctgagactgaagggattcccttcctttcctctggtcgagagacaggccaacgaagtggactggtgggacatggtgtgtaacgtgaagaagctgatcaacgagaaaaaggaggatggcaaggtgttttggcagaatctggctggctacaagagacaggaagccctgagaccatacctgagcagcgaggaagatcggaagaagggaaagaaattcgctcggtaccagctgggcgacctgctgctgcacctggaaaagaagcacggcgaggactggggaaaggtgtacgacgaggcctgggagcggattgacaagaaagtggaaggcctgagcaagcacatcaagctggaagaggaacggagaagcgaggacgcccagagcaaggccgccctgaccgactggctgcgggctaaggccagcttcgtgatcgagggcctgaaggaggccgacaaggacgagttctgcagatgcgagctgaagctgcagaagtggtacggggacctgcggggaaagcccttcgccatcgaagccgagaacagcatcctggacatcagcggcttcagcaagcagtacaactgtgccttcatctggcagaaggacggcgtgaagaagctgaacctgtacctgatcatcaactacttcaagggcggcaagctgcggttcaagaagatcaaacctgaagccttcgaagccaacagattctacaccgtgatcaacaaaaagagcggcgagatcgtgcccatggaggtgaacttcaacttcgacgaccccaacctgatcatcctgcctctggcctttggcaagagacagggcagagaattcatctggaacgacctgctgtccctggaaaccggcagcctgaagctggccaacggaagagtgatcgagaagacactgtacaacagaagaacccggcaggatgagcctgccctgttcgtggccctgaccttcgagcggcgggaggtcctggactcctccaatatcaaaccaatgaacctgatcggcgtggcaagaggcgaaaacatccccgccgtgatcgccctgaccgaccccgagggctgcccactgagccggtttaaggatagcctgggaaacccaacccacatcctgagaatcggcgagagctataaggagaagcagcggaccatccaggccaagaaggaggtggagcagcggagagccggcggctacagccggaagtacgccagcaaagccaagaatctggcagacgatatggtgagaaacaccgctagagatctgctgtactacgccgtgacccaggatgccatgctgatcttcgccaacctgagccggggcttcggccggcagggcaagcggaccttcatggccgagagacagtacacacggatggaggactggctgaccgccaagctggcctacgagggcctgagcaagacctacctgtccaagacactggcccagtacacctccaagacatgcagcaactgtgggtttaccatcaccagcgccgactacgacagggtgctggagaagctgaagaagacagcaacaggctggatgaccacaattaacggcaaggagctgaaggtggagggccagattacctactacaacagatacaagagacagaacgtagtcaaggacctgtccgtcgagctggatagactgagcgaagaatctgtgaacaacgacatctcctcctggacaaagggcagaagcggagaagctctgagcctcctgaagaaaagattctcccatagacccgtgcaggagaagttcgtgtgcctgaactgcggcttcgagacacacgcagccgagcaagccgccctgaacatcgccagatcctggctgttcctgcggagccaggagtacaagaaataccagacaaacaagacaaccggcaacaccgataagagagccttcgtcgagacctggcagtccttttaccggaagaagcttaaggaggtgtggaaacctgccgtgcggtctggcggatctggcggaggctccacaagcctgcaggtgagcgtgagcttcgaggacgtgaccgtggacttcagcagggaggagtggcagcacctggaccccgcccagaggaggctgtacagggacgtgaccctggagaactacagccacctgtgcagcgtgggctaccaggtgcccaagcccgaggtgatcttcaagctggagcagggcgagggcccctggatgctggagggcgaggccccccaccagagctgcagcgacgacgacatcggcaccagccccaagaaaaagagaaaagtctaagctgccttctgcggggcttgccttctggccatgcccttcttctctcccttgcacctgtacctcttggtctttgaataaagcctgagtaggaaggctagcaaaaaaaaaaaaaaaaaaaaaaaaaaaaaaaaaaaaaaaaaaaaaaaaaaaaaaaaaaaaaaaaaaaaaaaaaaaaaaaa

SEQ ID NO: 6244 - RNA, 5797 nt, synthetic construct
  source 1..5797: mol_type = other RNA
aggaaataagagagaaaagaagagtaagaagaaatataagagccaccatggcccctaagaagaagcgtaaagtgagccggatggaacgcctcgtctacgaggtgcggcagaagtgcagaaacatcgaggacatctgcatctcctgcggatctctgaacgtgaccctggagcacccactgttcatcggcggcatgtgccagaactgtaaaaactgttttctggagtgtgcctatcaatacgacgatgacggctaccagagctactgcaccatctgttgcggcggaagagaggtgctgatgtgtggaaataacaactgctgccggtgcttctgcgtggaatgcgtggacctgctggtgggccccggcgccgcccaggccgctattaaggaagatccttggaactgctacatgtgcggccacaagggcacatacggcctgctgagacggagagaggactggcctagcagactgcagatgttcttcgccaataaccacgaccaggagttcgacccccctaaggtgtaccctcccgtccccgccgagaagagaaagcccatccgggtcctgagcctgttcgatggcatcgccaccggtctgctggtgctgaaggacctgggcatccaggtggataggtacattgcctccgaggtgtgcgaggactccatcaccgtgggaatggtgcgtcatcagggcaagatcatgtacgtgggcgacgtgcggagcgtgacacagaagcatatccaggagtggggccctttcgacctggtgatcggcggcagcccttgcaatgacctgagcatcgtgaacccagcccggaagggcctgtacgagggaaccggcagactgttcttcgagttttacagactgctgcacgacgcccggcctaaggaaggcgacgaccggcccttcttttggctgttcgagaatgtggtggccatgggagtcagcgacaagcgggatattagccggttcctggagagcaaccccgtgatgatcgatgccaaggaagtgagcgccgcccaccgggccagatacttctggggcaatctgcctggcatgaacagacccctggccagcaccgtgaacgacaagctggagctgcaggagtgcctggagcacggccggatcgccaagttcagcaaggtgagaaccatcaccacccgaagcaacagcatcaaacaaggcaaggaccagcactttcctgtgttcatgaacgagaaggaggacatcctgtggtgtaccgagatggagagagtgttcgggttcccagtccactacacagatgtcagcaacatgtctagactggccagacagagactgctgggaagaagctggtccgtccctgtgatcagacacctgttcgcccctctgaaggagtacttcgcctgcgtgagcagcggcaacagcaacgccaacagccggggccccagcttctctagcggcctggtgccactgtccctgagagggagccacatgggccccatggagatctacaaaaccgtgagcgcctggaagcggcagcctgtgcgcgtgctgagcctgtttcggaatatcgataaagtcctgaaaagcctgggattcctggagagcggctctggctccggcggtggcaccctgaagtacgtggaggatgtgacaaacgtggtcagacgggatgtggagaagtggggccccttcgatctggtgtacggcagcacccaacccctgggcagctcttgtgaccggtgccctggctggtacatgtttcagttccaccggatcctgcagtacgccctgccgagacaggagtcccagcggccattcttttggattttcatggacaacttgctgctgaccgaggatgaccaggaaactaccactcggttcctgcagaccgaagccgtgaccctgcaggacgtgagaggccgggactaccagaacgccatgcgggtgtggtccaacatccctggactgaaaagcaagcacgcacctctgacccctaaagaagaggagtacctgcaggcccaggtgcggagcagaagcaagctggacgcccctaaggtggatctgctggtgaagaattgcctcctgcccctgagagagtacttcaagtatttcagccagaatagtctgcccctgggcggcccaagcagcggcgcccctcctcccagcggcggcagcccagccggctccccaacctctaccgaggagggcacctctgagtccgccacccccgagagcggccctggcacctccaccgagcccagcgagggcagcgcacccggcagccctgccggcagccccacctccacagaggagggaaccagcaccgagcccagcgaaggcagcgccccaggcaccagcaccgagcctagtgagggcggctctggcggcggcagcgcccaggagattaaacggatcaacaagatcagaagaagacttgtgaaagacagcaacaccaagaaggccggcaagacaggccccatgaaaaccctgctggttagagtgatgacacccgatctgagagagcggctggaaaacctgagaaagaagcctgaaaatatcccccagcccatcagcaatacatctagagccaacctgaataagctgctgaccgattacaccgaaatgaagaaggcgatcctgcatgtgtactgggaagagttccagaaggaccctgtgggcctgatgagccgggtggcccagcctgccagcaagaagatcgatcagaacaagctgaaacctgagatggacgagaagggcaacctgaccaccgccggctttgcctgctctcagtgtggccagcccctgttcgtgtacaagctggagcaggtgtctgagaagggcaaggcttacaccaactacttcggacggtgcaatgtggccgagcacgaaaagctgatcctgctggcccagctgaagcccgagaaggatagcgacgaagccgtgacatatagcctgggaaagtttgggcagagggccctggatttctacagcattcatgtgaccaaggagtccacccaccccgtgaagcccctggcccagatcgccggaaacagatacgcctccggacctgtgggaaaggccctgagcgacgcatgtatgggcacaatcgcctccttcctgtctaagtaccaggacatcatcatcgaacaccagaaggtggtgaagggcaaccagaagagactggagagcctgcgggagctggccggcaaggaaaacctggaataccctagcgtgaccctgccacctcagcctcacaccaaggagggcgttgatgcctacaacgaagtgatcgcccgggtgcgaatgtgggtgaacctgaacctgtggcagaagctgaagctaagcagagatgatgccaagcctctgctgagactgaagggattcccttcctttcctctggtcgagagacaggccaacgaagtggactggtgggacatggtgtgtaacgtgaagaagctgatcaacgagaaaaaggaggatggcaaggtgttttggcagaatctggctggctacaagagacaggaagccctgagaccatacctgagcagcgaggaagatcggaagaagggaaagaaattcgctcggtaccagctgggcgacctgctgctgcacctggaaaagaagcacggcgaggactggggaaaggtgtacgacgaggcctgggagcggattgacaagaaagtggaaggcctgagcaagcacatcaagctggaagaggaacggagaagcgaggacgcccagagcaaggccgccctgaccgactggctgcgggctaaggccagcttcgtgatcgagggcctgaaggaggccgacaaggacgagttctgcagatgcgagctgaagctgcagaagtggtacggggacctgcggggaaagcccttcgccatcgaagccgagaacagcatcctggacatcagcggcttcagcaagcagtacaactgtgccttcatctggcagaaggacggcgtgaagaagctgaacctgtacctgatcatcaactacttcaagggcggcaagctgcggttcaagaagatcaaacctgaagccttcgaagccaacagattctacaccgtgatcaacaaaaagagcggcgagatcgtgcccatggaggtgaacttcaacttcgacgaccccaacctgatcatcctgcctctggcctttggcaagagacagggcagagaattcatctggaacgacctgctgtccctggaaaccggcagcctgaagctggccaacggaagagtgatcgagaagacactgtacaacagaagaacccggcaggatgagcctgccctgttcgtggccctgaccttcgagcggcgggaggtcctggactcctccaatatcaaaccaatgaacctgatcggcgtggcaagaggcgaaaacatccccgccgtgatcgccctgaccgaccccgagggctgcccactgagccggtttaaggatagcctgggaaacccaacccacatcctgagaatcggcgagagctataaggagaagcagcggaccatccaggccaagaaggaggtggagcagcggagagccggcggctacagccggaagtacgccagcaaagccaagaatctggcagacgatatggtgagaaacaccgctagagatctgctgtactacgccgtgacccaggatgccatgctgatcttcgccaacctgagccggggcttcggccggcagggcaagcggaccttcatggccgagagacagtacacacggatggaggactggctgaccgccaagctggcctacgagggcctgagcaagacctacctgtccaagacactggcccagtacacctccaagacatgcagcaactgtgggtttaccatcaccagcgccgactacgacagggtgctggagaagctgaagaagacagcaacaggctggatgaccacaattaacggcaaggagctgaaggtggagggccagattacctactacaacagatacaagagacagaacgtagtcaaggacctgtccgtcgagctggatagactgagcgaagaatctgtgaacaacgacatctcctcctggacaaagggcagaagcggagaagctctgagcctcctgaagaaaagattctcccatagacccgtgcaggagaagttcgtgtgcctgaactgcggcttcgagacacacgcagccgagcaagccgccctgaacatcgccagatcctggctgttcctgcggagccaggagtacaagaaataccagacaaacaagacaaccggcaacaccgataagagagccttcgtcgagacctggcagtccttttaccggaagaagcttaaggaggtgtggaaacctgccgtgcggtctggcggatctggcggaggctccacaagcggcagcctgaccttcagggacgtggccatcgagttcagcctggaggagtggcagtgcctggacaccgcccagcagaacctgtacaggaacgtgatgctggagaactacaggaacctggtgttcctgggcatcgccgcccccaagcccgacctgatcatcttcctggagcagggcaaggagccctggaacgtgaagaggcacgagatggtggaggagccccccgtgatctgcagccacttcgccaccagccccaagaaaaagagaaaagtctaagctgccttctgcggggcttgccttctggccatgcccttcttctctcccttgcacctgtacctcttggtctttgaataaagcctgagtaggaaggctagcaaaaaaaaaaaaaaaaaaaaaaaaaaaaaaaaaaaaaaaaaaaaaaaaaaaaaaaaaaaaaaaaaaaaaaaaaaaaaaaa

SEQ ID NO: 6245 - RNA, 5797 nt, synthetic construct
  source 1..5797: mol_type = other RNA
aggaaataagagagaaaagaagagtaagaagaaatataagagccaccatggcccctaagaagaagcgtaaagtgagccggatggaacgcctcgtctacgaggtgcggcagaagtgcagaaacatcgaggacatctgcatctcctgcggatctctgaacgtgaccctggagcacccactgttcatcggcggcatgtgccagaactgtaaaaactgttttctggagtgtgcctatcaatacgacgatgacggctaccagagctactgcaccatctgttgcggcggaagagaggtgctgatgtgtggaaataacaactgctgccggtgcttctgcgtggaatgcgtggacctgctggtgggccccggcgccgcccaggccgctattaaggaagatccttggaactgctacatgtgcggccacaagggcacatacggcctgctgagacggagagaggactggcctagcagactgcagatgttcttcgccaataaccacgaccaggagttcgacccccctaaggtgtaccctcccgtccccgccgagaagagaaagcccatccgggtcctgagcctgttcgatggcatcgccaccggtctgctggtgctgaaggacctgggcatccaggtggataggtacattgcctccgaggtgtgcgaggactccatcaccgtgggaatggtgcgtcatcagggcaagatcatgtacgtgggcgacgtgcggagcgtgacacagaagcatatccaggagtggggccctttcgacctggtgatcggcggcagcccttgcaatgacctgagcatcgtgaacccagcccggaagggcctgtacgagggaaccggcagactgttcttcgagttttacagactgctgcacgacgcccggcctaaggaaggcgacgaccggcccttcttttggctgttcgagaatgtggtggccatgggagtcagcgacaagcgggatattagccggttcctggagagcaaccccgtgatgatcgatgccaaggaagtgagcgccgcccaccgggccagatacttctggggcaatctgcctggcatgaacagacccctggccagcaccgtgaacgacaagctggagctgcaggagtgcctggagcacggccggatcgccaagttcagcaaggtgagaaccatcaccacccgaagcaacagcatcaaacaaggcaaggaccagcactttcctgtgttcatgaacgagaaggaggacatcctgtggtgtaccgagatggagagagtgttcgggttcccagtccactacacagatgtcagcaacatgtctagactggccagacagagactgctgggaagaagctggtccgtccctgtgatcagacacctgttcgcccctctgaaggagtacttcgcctgcgtgagcagcggcaacagcaacgccaacagccggggccccagcttctctagcggcctggtgccactgtccctgagagggagccacatgggccccatggagatctacaaaaccgtgagcgcctggaagcggcagcctgtgcgcgtgctgagcctgtttcggaatatcgataaagtcctgaaaagcctgggattcctggagagcggctctggctccggcggtggcaccctgaagtacgtggaggatgtgacaaacgtggtcagacgggatgtggagaagtggggccccttcgatctggtgtacggcagcacccaacccctgggcagctcttgtgaccggtgccctggctggtacatgtttcagttccaccggatcctgcagtacgccctgccgagacaggagtcccagcggccattcttttggattttcatggacaacttgctgctgaccgaggatgaccaggaaactaccactcggttcctgcagaccgaagccgtgaccctgcaggacgtgagaggccgggactaccagaacgccatgcgggtgtggtccaacatccctggactgaaaagcaagcacgcacctctgacccctaaagaagaggagtacctgcaggcccaggtgcggagcagaagcaagctggacgcccctaaggtggatctgctggtgaagaattgcctcctgcccctgagagagtacttcaagtatttcagccagaatagtctgcccctgggcggcccaagcagcggcgcccctcctcccagcggcggcagcccagccggctccccaacctctaccgaggagggcacctctgagtccgccacccccgagagcggccctggcacctccaccgagcccagcgagggcagcgcacccggcagccctgccggcagccccacctccacagaggagggaaccagcaccgagcccagcgaaggcagcgccccaggcaccagcaccgagcctagtgagggcggctctggcggcggcagcgcccaggagattaaacggatcaacaagatcagaagaagacttgtgaaagacagcaacaccaagaaggccggcaagacaggccccatgaaaaccctgctggttagagtgatgacacccgatctgagagagcggctggaaaacctgagaaagaagcctgaaaatatcccccagcccatcagcaatacatctagagccaacctgaataagctgctgaccgattacaccgaaatgaagaaggcgatcctgcatgtgtactgggaagagttccagaaggaccctgtgggcctgatgagccgggtggcccagcctgccagcaagaagatcgatcagaacaagctgaaacctgagatggacgagaagggcaacctgaccaccgccggctttgcctgctctcagtgtggccagcccctgttcgtgtacaagctggagcaggtgtctgagaagggcaaggcttacaccaactacttcggacggtgcaatgtggccgagcacgaaaagctgatcctgctggcccagctgaagcccgagaaggatagcgacgaagccgtgacatatagcctgggaaagtttgggcagagggccctggatttctacagcattcatgtgaccaaggagtccacccaccccgtgaagcccctggcccagatcgccggaaacagatacgcctccggacctgtgggaaaggccctgagcgacgcatgtatgggcacaatcgcctccttcctgtctaagtaccaggacatcatcatcgaacaccagaaggtggtgaagggcaaccagaagagactggagagcctgcgggagctggccggcaaggaaaacctggaataccctagcgtgaccctgccacctcagcctcacaccaaggagggcgttgatgcctacaacgaagtgatcgcccgggtgcgaatgtgggtgaacctgaacctgtggcagaagctgaagctaagcagagatgatgccaagcctctgctgagactgaagggattcccttcctttcctctggtcgagagacaggccaacgaagtggactggtgggacatggtgtgtaacgtgaagaagctgatcaacgagaaaaaggaggatggcaaggtgttttggcagaatctggctggctacaagagacaggaagccctgagaccatacctgagcagcgaggaagatcggaagaagggaaagaaattcgctcggtaccagctgggcgacctgctgctgcacctggaaaagaagcacggcgaggactggggaaaggtgtacgacgaggcctgggagcggattgacaagaaagtggaaggcctgagcaagcacatcaagctggaagaggaacggagaagcgaggacgcccagagcaaggccgccctgaccgactggctgcgggctaaggccagcttcgtgatcgagggcctgaaggaggccgacaaggacgagttctgcagatgcgagctgaagctgcagaagtggtacggggacctgcggggaaagcccttcgccatcgaagccgagaacagcatcctggacatcagcggcttcagcaagcagtacaactgtgccttcatctggcagaaggacggcgtgaagaagctgaacctgtacctgatcatcaactacttcaagggcggcaagctgcggttcaagaagatcaaacctgaagccttcgaagccaacagattctacaccgtgatcaacaaaaagagcggcgagatcgtgcccatggaggtgaacttcaacttcgacgaccccaacctgatcatcctgcctctggcctttggcaagagacagggcagagaattcatctggaacgacctgctgtccctggaaaccggcagcctgaagctggccaacggaagagtgatcgagaagacactgtacaacagaagaacccggcaggatgagcctgccctgttcgtggccctgaccttcgagcggcgggaggtcctggactcctccaatatcaaaccaatgaacctgatcggcgtggcaagaggcgaaaacatccccgccgtgatcgccctgaccgaccccgagggctgcccactgagccggtttaaggatagcctgggaaacccaacccacatcctgagaatcggcgagagctataaggagaagcagcggaccatccaggccaagaaggaggtggagcagcggagagccggcggctacagccggaagtacgccagcaaagccaagaatctggcagacgatatggtgagaaacaccgctagagatctgctgtactacgccgtgacccaggatgccatgctgatcttcgccaacctgagccggggcttcggccggcagggcaagcggaccttcatggccgagagacagtacacacggatggaggactggctgaccgccaagctggcctacgagggcctgagcaagacctacctgtccaagacactggcccagtacacctccaagacatgcagcaactgtgggtttaccatcaccagcgccgactacgacagggtgctggagaagctgaagaagacagcaacaggctggatgaccacaattaacggcaaggagctgaaggtggagggccagattacctactacaacagatacaagagacagaacgtagtcaaggacctgtccgtcgagctggatagactgagcgaagaatctgtgaacaacgacatctcctcctggacaaagggcagaagcggagaagctctgagcctcctgaagaaaagattctcccatagacccgtgcaggagaagttcgtgtgcctgaactgcggcttcgagacacacgcagccgagcaagccgccctgaacatcgccagatcctggctgttcctgcggagccaggagtacaagaaataccagacaaacaagacaaccggcaacaccgataagagagccttcgtcgagacctggcagtccttttaccggaagaagcttaaggaggtgtggaaacctgccgtgcggtctggcggatctggcggaggctccacaagcatggccgccgccgccctgagggaccccgcccagcagggctacgtgaccttcgaggacgtggccgtgtacttcagccaggaggagtggaggctgctggacgaggcccagaagctgctgtacaggaacgtgatgctggagaacttcagcctgctggccagcctgggcctggccagcagcaagacccacgagatcacccagctggagagctgggaggagcccttcatgcccgcctgggaggccgtgaccagccccaagaaaaagagaaaagtctaagctgccttctgcggggcttgccttctggccatgcccttcttctctcccttgcacctgtacctcttggtctttgaataaagcctgagtaggaaggctagcaaaaaaaaaaaaaaaaaaaaaaaaaaaaaaaaaaaaaaaaaaaaaaaaaaaaaaaaaaaaaaaaaaaaaaaaaaaaaaaa

SEQ ID NO: 6246 - RNA, 5797 nt, synthetic construct
  source 1..5797: mol_type = other RNA
aggaaataagagagaaaagaagagtaagaagaaatataagagccaccatggcccctaagaagaagcgtaaagtgagccggatggaacgcctcgtctacgaggtgcggcagaagtgcagaaacatcgaggacatctgcatctcctgcggatctctgaacgtgaccctggagcacccactgttcatcggcggcatgtgccagaactgtaaaaactgttttctggagtgtgcctatcaatacgacgatgacggctaccagagctactgcaccatctgttgcggcggaagagaggtgctgatgtgtggaaataacaactgctgccggtgcttctgcgtggaatgcgtggacctgctggtgggccccggcgccgcccaggccgctattaaggaagatccttggaactgctacatgtgcggccacaagggcacatacggcctgctgagacggagagaggactggcctagcagactgcagatgttcttcgccaataaccacgaccaggagttcgacccccctaaggtgtaccctcccgtccccgccgagaagagaaagcccatccgggtcctgagcctgttcgatggcatcgccaccggtctgctggtgctgaaggacctgggcatccaggtggataggtacattgcctccgaggtgtgcgaggactccatcaccgtgggaatggtgcgtcatcagggcaagatcatgtacgtgggcgacgtgcggagcgtgacacagaagcatatccaggagtggggccctttcgacctggtgatcggcggcagcccttgcaatgacctgagcatcgtgaacccagcccggaagggcctgtacgagggaaccggcagactgttcttcgagttttacagactgctgcacgacgcccggcctaaggaaggcgacgaccggcccttcttttggctgttcgagaatgtggtggccatgggagtcagcgacaagcgggatattagccggttcctggagagcaaccccgtgatgatcgatgccaaggaagtgagcgccgcccaccgggccagatacttctggggcaatctgcctggcatgaacagacccctggccagcaccgtgaacgacaagctggagctgcaggagtgcctggagcacggccggatcgccaagttcagcaaggtgagaaccatcaccacccgaagcaacagcatcaaacaaggcaaggaccagcactttcctgtgttcatgaacgagaaggaggacatcctgtggtgtaccgagatggagagagtgttcgggttcccagtccactacacagatgtcagcaacatgtctagactggccagacagagactgctgggaagaagctggtccgtccctgtgatcagacacctgttcgcccctctgaaggagtacttcgcctgcgtgagcagcggcaacagcaacgccaacagccggggccccagcttctctagcggcctggtgccactgtccctgagagggagccacatgggccccatggagatctacaaaaccgtgagcgcctggaagcggcagcctgtgcgcgtgctgagcctgtttcggaatatcgataaagtcctgaaaagcctgggattcctggagagcggctctggctccggcggtggcaccctgaagtacgtggaggatgtgacaaacgtggtcagacgggatgtggagaagtggggccccttcgatctggtgtacggcagcacccaacccctgggcagctcttgtgaccggtgccctggctggtacatgtttcagttccaccggatcctgcagtacgccctgccgagacaggagtcccagcggccattcttttggattttcatggacaacttgctgctgaccgaggatgaccaggaaactaccactcggttcctgcagaccgaagccgtgaccctgcaggacgtgagaggccgggactaccagaacgccatgcgggtgtggtccaacatccctggactgaaaagcaagcacgcacctctgacccctaaagaagaggagtacctgcaggcccaggtgcggagcagaagcaagctggacgcccctaaggtggatctgctggtgaagaattgcctcctgcccctgagagagtacttcaagtatttcagccagaatagtctgcccctgggcggcccaagcagcggcgcccctcctcccagcggcggcagcccagccggctccccaacctctaccgaggagggcacctctgagtccgccacccccgagagcggccctggcacctccaccgagcccagcgagggcagcgcacccggcagccctgccggcagccccacctccacagaggagggaaccagcaccgagcccagcgaaggcagcgccccaggcaccagcaccgagcctagtgagggcggctctggcggcggcagcgcccaggagattaaacggatcaacaagatcagaagaagacttgtgaaagacagcaacaccaagaaggccggcaagacaggccccatgaaaaccctgctggttagagtgatgacacccgatctgagagagcggctggaaaacctgagaaagaagcctgaaaatatcccccagcccatcagcaatacatctagagccaacctgaataagctgctgaccgattacaccgaaatgaagaaggcgatcctgcatgtgtactgggaagagttccagaaggaccctgtgggcctgatgagccgggtggcccagcctgccagcaagaagatcgatcagaacaagctgaaacctgagatggacgagaagggcaacctgaccaccgccggctttgcctgctctcagtgtggccagcccctgttcgtgtacaagctggagcaggtgtctgagaagggcaaggcttacaccaactacttcggacggtgcaatgtggccgagcacgaaaagctgatcctgctggcccagctgaagcccgagaaggatagcgacgaagccgtgacatatagcctgggaaagtttgggcagagggccctggatttctacagcattcatgtgaccaaggagtccacccaccccgtgaagcccctggcccagatcgccggaaacagatacgcctccggacctgtgggaaaggccctgagcgacgcatgtatgggcacaatcgcctccttcctgtctaagtaccaggacatcatcatcgaacaccagaaggtggtgaagggcaaccagaagagactggagagcctgcgggagctggccggcaaggaaaacctggaataccctagcgtgaccctgccacctcagcctcacaccaaggagggcgttgatgcctacaacgaagtgatcgcccgggtgcgaatgtgggtgaacctgaacctgtggcagaagctgaagctaagcagagatgatgccaagcctctgctgagactgaagggattcccttcctttcctctggtcgagagacaggccaacgaagtggactggtgggacatggtgtgtaacgtgaagaagctgatcaacgagaaaaaggaggatggcaaggtgttttggcagaatctggctggctacaagagacaggaagccctgagaccatacctgagcagcgaggaagatcggaagaagggaaagaaattcgctcggtaccagctgggcgacctgctgctgcacctggaaaagaagcacggcgaggactggggaaaggtgtacgacgaggcctgggagcggattgacaagaaagtggaaggcctgagcaagcacatcaagctggaagaggaacggagaagcgaggacgcccagagcaaggccgccctgaccgactggctgcgggctaaggccagcttcgtgatcgagggcctgaaggaggccgacaaggacgagttctgcagatgcgagctgaagctgcagaagtggtacggggacctgcggggaaagcccttcgccatcgaagccgagaacagcatcctggacatcagcggcttcagcaagcagtacaactgtgccttcatctggcagaaggacggcgtgaagaagctgaacctgtacctgatcatcaactacttcaagggcggcaagctgcggttcaagaagatcaaacctgaagccttcgaagccaacagattctacaccgtgatcaacaaaaagagcggcgagatcgtgcccatggaggtgaacttcaacttcgacgaccccaacctgatcatcctgcctctggcctttggcaagagacagggcagagaattcatctggaacgacctgctgtccctggaaaccggcagcctgaagctggccaacggaagagtgatcgagaagacactgtacaacagaagaacccggcaggatgagcctgccctgttcgtggccctgaccttcgagcggcgggaggtcctggactcctccaatatcaaaccaatgaacctgatcggcgtggcaagaggcgaaaacatccccgccgtgatcgccctgaccgaccccgagggctgcccactgagccggtttaaggatagcctgggaaacccaacccacatcctgagaatcggcgagagctataaggagaagcagcggaccatccaggccaagaaggaggtggagcagcggagagccggcggctacagccggaagtacgccagcaaagccaagaatctggcagacgatatggtgagaaacaccgctagagatctgctgtactacgccgtgacccaggatgccatgctgatcttcgccaacctgagccggggcttcggccggcagggcaagcggaccttcatggccgagagacagtacacacggatggaggactggctgaccgccaagctggcctacgagggcctgagcaagacctacctgtccaagacactggcccagtacacctccaagacatgcagcaactgtgggtttaccatcaccagcgccgactacgacagggtgctggagaagctgaagaagacagcaacaggctggatgaccacaattaacggcaaggagctgaaggtggagggccagattacctactacaacagatacaagagacagaacgtagtcaaggacctgtccgtcgagctggatagactgagcgaagaatctgtgaacaacgacatctcctcctggacaaagggcagaagcggagaagctctgagcctcctgaagaaaagattctcccatagacccgtgcaggagaagttcgtgtgcctgaactgcggcttcgagacacacgcagccgagcaagccgccctgaacatcgccagatcctggctgttcctgcggagccaggagtacaagaaataccagacaaacaagacaaccggcaacaccgataagagagccttcgtcgagacctggcagtccttttaccggaagaagcttaaggaggtgtggaaacctgccgtgcggtctggcggatctggcggaggctccacaagcttccaggagagcgtgaccttcgaggacgtggccgtgtacttcagcgagaacgagtggaccggcctggcccccgcccagagggtgctgtacagggacgtgatgctggagaactacggcgccgtggccagcctggccgccttccccttccccaagcccgccctgatcagccagctggagaggggcgaggccccctggtgcaaggccccccagggcgccctggacggcgagggccccaggggcgtgaccagccccaagaaaaagagaaaagtctaagctgccttctgcggggcttgccttctggccatgcccttcttctctcccttgcacctgtacctcttggtctttgaataaagcctgagtaggaaggctagcaaaaaaaaaaaaaaaaaaaaaaaaaaaaaaaaaaaaaaaaaaaaaaaaaaaaaaaaaaaaaaaaaaaaaaaaaaaaaaaa

SEQ ID NO: 6247 - RNA, 5797 nt, synthetic construct
  source 1..5797: mol_type = other RNA
aggaaataagagagaaaagaagagtaagaagaaatataagagccaccatggcccctaagaagaagcgtaaagtgagccggatggaacgcctcgtctacgaggtgcggcagaagtgcagaaacatcgaggacatctgcatctcctgcggatctctgaacgtgaccctggagcacccactgttcatcggcggcatgtgccagaactgtaaaaactgttttctggagtgtgcctatcaatacgacgatgacggctaccagagctactgcaccatctgttgcggcggaagagaggtgctgatgtgtggaaataacaactgctgccggtgcttctgcgtggaatgcgtggacctgctggtgggccccggcgccgcccaggccgctattaaggaagatccttggaactgctacatgtgcggccacaagggcacatacggcctgctgagacggagagaggactggcctagcagactgcagatgttcttcgccaataaccacgaccaggagttcgacccccctaaggtgtaccctcccgtccccgccgagaagagaaagcccatccgggtcctgagcctgttcgatggcatcgccaccggtctgctggtgctgaaggacctgggcatccaggtggataggtacattgcctccgaggtgtgcgaggactccatcaccgtgggaatggtgcgtcatcagggcaagatcatgtacgtgggcgacgtgcggagcgtgacacagaagcatatccaggagtggggccctttcgacctggtgatcggcggcagcccttgcaatgacctgagcatcgtgaacccagcccggaagggcctgtacgagggaaccggcagactgttcttcgagttttacagactgctgcacgacgcccggcctaaggaaggcgacgaccggcccttcttttggctgttcgagaatgtggtggccatgggagtcagcgacaagcgggatattagccggttcctggagagcaaccccgtgatgatcgatgccaaggaagtgagcgccgcccaccgggccagatacttctggggcaatctgcctggcatgaacagacccctggccagcaccgtgaacgacaagctggagctgcaggagtgcctggagcacggccggatcgccaagttcagcaaggtgagaaccatcaccacccgaagcaacagcatcaaacaaggcaaggaccagcactttcctgtgttcatgaacgagaaggaggacatcctgtggtgtaccgagatggagagagtgttcgggttcccagtccactacacagatgtcagcaacatgtctagactggccagacagagactgctgggaagaagctggtccgtccctgtgatcagacacctgttcgcccctctgaaggagtacttcgcctgcgtgagcagcggcaacagcaacgccaacagccggggccccagcttctctagcggcctggtgccactgtccctgagagggagccacatgggccccatggagatctacaaaaccgtgagcgcctggaagcggcagcctgtgcgcgtgctgagcctgtttcggaatatcgataaagtcctgaaaagcctgggattcctggagagcggctctggctccggcggtggcaccctgaagtacgtggaggatgtgacaaacgtggtcagacgggatgtggagaagtggggccccttcgatctggtgtacggcagcacccaacccctgggcagctcttgtgaccggtgccctggctggtacatgtttcagttccaccggatcctgcagtacgccctgccgagacaggagtcccagcggccattcttttggattttcatggacaacttgctgctgaccgaggatgaccaggaaactaccactcggttcctgcagaccgaagccgtgaccctgcaggacgtgagaggccgggactaccagaacgccatgcgggtgtggtccaacatccctggactgaaaagcaagcacgcacctctgacccctaaagaagaggagtacctgcaggcccaggtgcggagcagaagcaagctggacgcccctaaggtggatctgctggtgaagaattgcctcctgcccctgagagagtacttcaagtatttcagccagaatagtctgcccctgggcggcccaagcagcggcgcccctcctcccagcggcggcagcccagccggctccccaacctctaccgaggagggcacctctgagtccgccacccccgagagcggccctggcacctccaccgagcccagcgagggcagcgcacccggcagccctgccggcagccccacctccacagaggagggaaccagcaccgagcccagcgaaggcagcgccccaggcaccagcaccgagcctagtgagggcggctctggcggcggcagcgcccaggagattaaacggatcaacaagatcagaagaagacttgtgaaagacagcaacaccaagaaggccggcaagacaggccccatgaaaaccctgctggttagagtgatgacacccgatctgagagagcggctggaaaacctgagaaagaagcctgaaaatatcccccagcccatcagcaatacatctagagccaacctgaataagctgctgaccgattacaccgaaatgaagaaggcgatcctgcatgtgtactgggaagagttccagaaggaccctgtgggcctgatgagccgggtggcccagcctgccagcaagaagatcgatcagaacaagctgaaacctgagatggacgagaagggcaacctgaccaccgccggctttgcctgctctcagtgtggccagcccctgttcgtgtacaagctggagcaggtgtctgagaagggcaaggcttacaccaactacttcggacggtgcaatgtggccgagcacgaaaagctgatcctgctggcccagctgaagcccgagaaggatagcgacgaagccgtgacatatagcctgggaaagtttgggcagagggccctggatttctacagcattcatgtgaccaaggagtccacccaccccgtgaagcccctggcccagatcgccggaaacagatacgcctccggacctgtgggaaaggccctgagcgacgcatgtatgggcacaatcgcctccttcctgtctaagtaccaggacatcatcatcgaacaccagaaggtggtgaagggcaaccagaagagactggagagcctgcgggagctggccggcaaggaaaacctggaataccctagcgtgaccctgccacctcagcctcacaccaaggagggcgttgatgcctacaacgaagtgatcgcccgggtgcgaatgtgggtgaacctgaacctgtggcagaagctgaagctaagcagagatgatgccaagcctctgctgagactgaagggattcccttcctttcctctggtcgagagacaggccaacgaagtggactggtgggacatggtgtgtaacgtgaagaagctgatcaacgagaaaaaggaggatggcaaggtgttttggcagaatctggctggctacaagagacaggaagccctgagaccatacctgagcagcgaggaagatcggaagaagggaaagaaattcgctcggtaccagctgggcgacctgctgctgcacctggaaaagaagcacggcgaggactggggaaaggtgtacgacgaggcctgggagcggattgacaagaaagtggaaggcctgagcaagcacatcaagctggaagaggaacggagaagcgaggacgcccagagcaaggccgccctgaccgactggctgcgggctaaggccagcttcgtgatcgagggcctgaaggaggccgacaaggacgagttctgcagatgcgagctgaagctgcagaagtggtacggggacctgcggggaaagcccttcgccatcgaagccgagaacagcatcctggacatcagcggcttcagcaagcagtacaactgtgccttcatctggcagaaggacggcgtgaagaagctgaacctgtacctgatcatcaactacttcaagggcggcaagctgcggttcaagaagatcaaacctgaagccttcgaagccaacagattctacaccgtgatcaacaaaaagagcggcgagatcgtgcccatggaggtgaacttcaacttcgacgaccccaacctgatcatcctgcctctggcctttggcaagagacagggcagagaattcatctggaacgacctgctgtccctggaaaccggcagcctgaagctggccaacggaagagtgatcgagaagacactgtacaacagaagaacccggcaggatgagcctgccctgttcgtggccctgaccttcgagcggcgggaggtcctggactcctccaatatcaaaccaatgaacctgatcggcgtggcaagaggcgaaaacatccccgccgtgatcgccctgaccgaccccgagggctgcccactgagccggtttaaggatagcctgggaaacccaacccacatcctgagaatcggcgagagctataaggagaagcagcggaccatccaggccaagaaggaggtggagcagcggagagccggcggctacagccggaagtacgccagcaaagccaagaatctggcagacgatatggtgagaaacaccgctagagatctgctgtactacgccgtgacccaggatgccatgctgatcttcgccaacctgagccggggcttcggccggcagggcaagcggaccttcatggccgagagacagtacacacggatggaggactggctgaccgccaagctggcctacgagggcctgagcaagacctacctgtccaagacactggcccagtacacctccaagacatgcagcaactgtgggtttaccatcaccagcgccgactacgacagggtgctggagaagctgaagaagacagcaacaggctggatgaccacaattaacggcaaggagctgaaggtggagggccagattacctactacaacagatacaagagacagaacgtagtcaaggacctgtccgtcgagctggatagactgagcgaagaatctgtgaacaacgacatctcctcctggacaaagggcagaagcggagaagctctgagcctcctgaagaaaagattctcccatagacccgtgcaggagaagttcgtgtgcctgaactgcggcttcgagacacacgcagccgagcaagccgccctgaacatcgccagatcctggctgttcctgcggagccaggagtacaagaaataccagacaaacaagacaaccggcaacaccgataagagagccttcgtcgagacctggcagtccttttaccggaagaagcttaaggaggtgtggaaacctgccgtgcggtctggcggatctggcggaggctccacaagcagcaaggcccccgtgaccttcggcgacctggccatctacttcagccaggaggagtgggagtggctgagccccatccagaaggacctgtacgaggacgtgatgctggagaactaccagaacctggtgctgctgggcctggcctgcaggaggcccaacatcatcaccctgctggagaagggcaaggccccctgggtggtggagcccagcaggaggaggaggggccccgagagcggcagcaagtgcaccagccccaagaaaaagagaaaagtctaagctgccttctgcggggcttgccttctggccatgcccttcttctctcccttgcacctgtacctcttggtctttgaataaagcctgagtaggaaggctagcaaaaaaaaaaaaaaaaaaaaaaaaaaaaaaaaaaaaaaaaaaaaaaaaaaaaaaaaaaaaaaaaaaaaaaaaaaaaaaaa

SEQ ID NO: 6248 - RNA, 5797 nt, synthetic construct
  source 1..5797: mol_type = other RNA
aggaaataagagagaaaagaagagtaagaagaaatataagagccaccatggcccctaagaagaagcgtaaagtgagccggatggaacgcctcgtctacgaggtgcggcagaagtgcagaaacatcgaggacatctgcatctcctgcggatctctgaacgtgaccctggagcacccactgttcatcggcggcatgtgccagaactgtaaaaactgttttctggagtgtgcctatcaatacgacgatgacggctaccagagctactgcaccatctgttgcggcggaagagaggtgctgatgtgtggaaataacaactgctgccggtgcttctgcgtggaatgcgtggacctgctggtgggccccggcgccgcccaggccgctattaaggaagatccttggaactgctacatgtgcggccacaagggcacatacggcctgctgagacggagagaggactggcctagcagactgcagatgttcttcgccaataaccacgaccaggagttcgacccccctaaggtgtaccctcccgtccccgccgagaagagaaagcccatccgggtcctgagcctgttcgatggcatcgccaccggtctgctggtgctgaaggacctgggcatccaggtggataggtacattgcctccgaggtgtgcgaggactccatcaccgtgggaatggtgcgtcatcagggcaagatcatgtacgtgggcgacgtgcggagcgtgacacagaagcatatccaggagtggggccctttcgacctggtgatcggcggcagcccttgcaatgacctgagcatcgtgaacccagcccggaagggcctgtacgagggaaccggcagactgttcttcgagttttacagactgctgcacgacgcccggcctaaggaaggcgacgaccggcccttcttttggctgttcgagaatgtggtggccatgggagtcagcgacaagcgggatattagccggttcctggagagcaaccccgtgatgatcgatgccaaggaagtgagcgccgcccaccgggccagatacttctggggcaatctgcctggcatgaacagacccctggccagcaccgtgaacgacaagctggagctgcaggagtgcctggagcacggccggatcgccaagttcagcaaggtgagaaccatcaccacccgaagcaacagcatcaaacaaggcaaggaccagcactttcctgtgttcatgaacgagaaggaggacatcctgtggtgtaccgagatggagagagtgttcgggttcccagtccactacacagatgtcagcaacatgtctagactggccagacagagactgctgggaagaagctggtccgtccctgtgatcagacacctgttcgcccctctgaaggagtacttcgcctgcgtgagcagcggcaacagcaacgccaacagccggggccccagcttctctagcggcctggtgccactgtccctgagagggagccacatgggccccatggagatctacaaaaccgtgagcgcctggaagcggcagcctgtgcgcgtgctgagcctgtttcggaatatcgataaagtcctgaaaagcctgggattcctggagagcggctctggctccggcggtggcaccctgaagtacgtggaggatgtgacaaacgtggtcagacgggatgtggagaagtggggccccttcgatctggtgtacggcagcacccaacccctgggcagctcttgtgaccggtgccctggctggtacatgtttcagttccaccggatcctgcagtacgccctgccgagacaggagtcccagcggccattcttttggattttcatggacaacttgctgctgaccgaggatgaccaggaaactaccactcggttcctgcagaccgaagccgtgaccctgcaggacgtgagaggccgggactaccagaacgccatgcgggtgtggtccaacatccctggactgaaaagcaagcacgcacctctgacccctaaagaagaggagtacctgcaggcccaggtgcggagcagaagcaagctggacgcccctaaggtggatctgctggtgaagaattgcctcctgcccctgagagagtacttcaagtatttcagccagaatagtctgcccctgggcggcccaagcagcggcgcccctcctcccagcggcggcagcccagccggctccccaacctctaccgaggagggcacctctgagtccgccacccccgagagcggccctggcacctccaccgagcccagcgagggcagcgcacccggcagccctgccggcagccccacctccacagaggagggaaccagcaccgagcccagcgaaggcagcgccccaggcaccagcaccgagcctagtgagggcggctctggcggcggcagcgcccaggagattaaacggatcaacaagatcagaagaagacttgtgaaagacagcaacaccaagaaggccggcaagacaggccccatgaaaaccctgctggttagagtgatgacacccgatctgagagagcggctggaaaacctgagaaagaagcctgaaaatatcccccagcccatcagcaatacatctagagccaacctgaataagctgctgaccgattacaccgaaatgaagaaggcgatcctgcatgtgtactgggaagagttccagaaggaccctgtgggcctgatgagccgggtggcccagcctgccagcaagaagatcgatcagaacaagctgaaacctgagatggacgagaagggcaacctgaccaccgccggctttgcctgctctcagtgtggccagcccctgttcgtgtacaagctggagcaggtgtctgagaagggcaaggcttacaccaactacttcggacggtgcaatgtggccgagcacgaaaagctgatcctgctggcccagctgaagcccgagaaggatagcgacgaagccgtgacatatagcctgggaaagtttgggcagagggccctggatttctacagcattcatgtgaccaaggagtccacccaccccgtgaagcccctggcccagatcgccggaaacagatacgcctccggacctgtgggaaaggccctgagcgacgcatgtatgggcacaatcgcctccttcctgtctaagtaccaggacatcatcatcgaacaccagaaggtggtgaagggcaaccagaagagactggagagcctgcgggagctggccggcaaggaaaacctggaataccctagcgtgaccctgccacctcagcctcacaccaaggagggcgttgatgcctacaacgaagtgatcgcccgggtgcgaatgtgggtgaacctgaacctgtggcagaagctgaagctaagcagagatgatgccaagcctctgctgagactgaagggattcccttcctttcctctggtcgagagacaggccaacgaagtggactggtgggacatggtgtgtaacgtgaagaagctgatcaacgagaaaaaggaggatggcaaggtgttttggcagaatctggctggctacaagagacaggaagccctgagaccatacctgagcagcgaggaagatcggaagaagggaaagaaattcgctcggtaccagctgggcgacctgctgctgcacctggaaaagaagcacggcgaggactggggaaaggtgtacgacgaggcctgggagcggattgacaagaaagtggaaggcctgagcaagcacatcaagctggaagaggaacggagaagcgaggacgcccagagcaaggccgccctgaccgactggctgcgggctaaggccagcttcgtgatcgagggcctgaaggaggccgacaaggacgagttctgcagatgcgagctgaagctgcagaagtggtacggggacctgcggggaaagcccttcgccatcgaagccgagaacagcatcctggacatcagcggcttcagcaagcagtacaactgtgccttcatctggcagaaggacggcgtgaagaagctgaacctgtacctgatcatcaactacttcaagggcggcaagctgcggttcaagaagatcaaacctgaagccttcgaagccaacagattctacaccgtgatcaacaaaaagagcggcgagatcgtgcccatggaggtgaacttcaacttcgacgaccccaacctgatcatcctgcctctggcctttggcaagagacagggcagagaattcatctggaacgacctgctgtccctggaaaccggcagcctgaagctggccaacggaagagtgatcgagaagacactgtacaacagaagaacccggcaggatgagcctgccctgttcgtggccctgaccttcgagcggcgggaggtcctggactcctccaatatcaaaccaatgaacctgatcggcgtggcaagaggcgaaaacatccccgccgtgatcgccctgaccgaccccgagggctgcccactgagccggtttaaggatagcctgggaaacccaacccacatcctgagaatcggcgagagctataaggagaagcagcggaccatccaggccaagaaggaggtggagcagcggagagccggcggctacagccggaagtacgccagcaaagccaagaatctggcagacgatatggtgagaaacaccgctagagatctgctgtactacgccgtgacccaggatgccatgctgatcttcgccaacctgagccggggcttcggccggcagggcaagcggaccttcatggccgagagacagtacacacggatggaggactggctgaccgccaagctggcctacgagggcctgagcaagacctacctgtccaagacactggcccagtacacctccaagacatgcagcaactgtgggtttaccatcaccagcgccgactacgacagggtgctggagaagctgaagaagacagcaacaggctggatgaccacaattaacggcaaggagctgaaggtggagggccagattacctactacaacagatacaagagacagaacgtagtcaaggacctgtccgtcgagctggatagactgagcgaagaatctgtgaacaacgacatctcctcctggacaaagggcagaagcggagaagctctgagcctcctgaagaaaagattctcccatagacccgtgcaggagaagttcgtgtgcctgaactgcggcttcgagacacacgcagccgagcaagccgccctgaacatcgccagatcctggctgttcctgcggagccaggagtacaagaaataccagacaaacaagacaaccggcaacaccgataagagagccttcgtcgagacctggcagtccttttaccggaagaagcttaaggaggtgtggaaacctgccgtgcggtctggcggatctggcggaggctccacaagcagcaacaagctggtgagcttcgacgacgtggccgtggagttcagctgggaggagtggcaggagctggacatcagccagaggaccctgtacagggacgtgatgctggagacctacagcatgctggtgagcctgggccacaccggccccaagccccagctgatcgtgaagctggagcaggacgaggagagctacatgagggaggccagcgacaagaacttcagcgacgtgcagaagatgaagcacaccagccccaagaaaaagagaaaagtctaagctgccttctgcggggcttgccttctggccatgcccttcttctctcccttgcacctgtacctcttggtctttgaataaagcctgagtaggaaggctagcaaaaaaaaaaaaaaaaaaaaaaaaaaaaaaaaaaaaaaaaaaaaaaaaaaaaaaaaaaaaaaaaaaaaaaaaaaaaaaaa

SEQ ID NO: 6249 - RNA, 5797 nt, synthetic construct
  source 1..5797: mol_type = other RNA
aggaaataagagagaaaagaagagtaagaagaaatataagagccaccatggcccctaagaagaagcgtaaagtgagccggatggaacgcctcgtctacgaggtgcggcagaagtgcagaaacatcgaggacatctgcatctcctgcggatctctgaacgtgaccctggagcacccactgttcatcggcggcatgtgccagaactgtaaaaactgttttctggagtgtgcctatcaatacgacgatgacggctaccagagctactgcaccatctgttgcggcggaagagaggtgctgatgtgtggaaataacaactgctgccggtgcttctgcgtggaatgcgtggacctgctggtgggccccggcgccgcccaggccgctattaaggaagatccttggaactgctacatgtgcggccacaagggcacatacggcctgctgagacggagagaggactggcctagcagactgcagatgttcttcgccaataaccacgaccaggagttcgacccccctaaggtgtaccctcccgtccccgccgagaagagaaagcccatccgggtcctgagcctgttcgatggcatcgccaccggtctgctggtgctgaaggacctgggcatccaggtggataggtacattgcctccgaggtgtgcgaggactccatcaccgtgggaatggtgcgtcatcagggcaagatcatgtacgtgggcgacgtgcggagcgtgacacagaagcatatccaggagtggggccctttcgacctggtgatcggcggcagcccttgcaatgacctgagcatcgtgaacccagcccggaagggcctgtacgagggaaccggcagactgttcttcgagttttacagactgctgcacgacgcccggcctaaggaaggcgacgaccggcccttcttttggctgttcgagaatgtggtggccatgggagtcagcgacaagcgggatattagccggttcctggagagcaaccccgtgatgatcgatgccaaggaagtgagcgccgcccaccgggccagatacttctggggcaatctgcctggcatgaacagacccctggccagcaccgtgaacgacaagctggagctgcaggagtgcctggagcacggccggatcgccaagttcagcaaggtgagaaccatcaccacccgaagcaacagcatcaaacaaggcaaggaccagcactttcctgtgttcatgaacgagaaggaggacatcctgtggtgtaccgagatggagagagtgttcgggttcccagtccactacacagatgtcagcaacatgtctagactggccagacagagactgctgggaagaagctggtccgtccctgtgatcagacacctgttcgcccctctgaaggagtacttcgcctgcgtgagcagcggcaacagcaacgccaacagccggggccccagcttctctagcggcctggtgccactgtccctgagagggagccacatgggccccatggagatctacaaaaccgtgagcgcctggaagcggcagcctgtgcgcgtgctgagcctgtttcggaatatcgataaagtcctgaaaagcctgggattcctggagagcggctctggctccggcggtggcaccctgaagtacgtggaggatgtgacaaacgtggtcagacgggatgtggagaagtggggccccttcgatctggtgtacggcagcacccaacccctgggcagctcttgtgaccggtgccctggctggtacatgtttcagttccaccggatcctgcagtacgccctgccgagacaggagtcccagcggccattcttttggattttcatggacaacttgctgctgaccgaggatgaccaggaaactaccactcggttcctgcagaccgaagccgtgaccctgcaggacgtgagaggccgggactaccagaacgccatgcgggtgtggtccaacatccctggactgaaaagcaagcacgcacctctgacccctaaagaagaggagtacctgcaggcccaggtgcggagcagaagcaagctggacgcccctaaggtggatctgctggtgaagaattgcctcctgcccctgagagagtacttcaagtatttcagccagaatagtctgcccctgggcggcccaagcagcggcgcccctcctcccagcggcggcagcccagccggctccccaacctctaccgaggagggcacctctgagtccgccacccccgagagcggccctggcacctccaccgagcccagcgagggcagcgcacccggcagccctgccggcagccccacctccacagaggagggaaccagcaccgagcccagcgaaggcagcgccccaggcaccagcaccgagcctagtgagggcggctctggcggcggcagcgcccaggagattaaacggatcaacaagatcagaagaagacttgtgaaagacagcaacaccaagaaggccggcaagacaggccccatgaaaaccctgctggttagagtgatgacacccgatctgagagagcggctggaaaacctgagaaagaagcctgaaaatatcccccagcccatcagcaatacatctagagccaacctgaataagctgctgaccgattacaccgaaatgaagaaggcgatcctgcatgtgtactgggaagagttccagaaggaccctgtgggcctgatgagccgggtggcccagcctgccagcaagaagatcgatcagaacaagctgaaacctgagatggacgagaagggcaacctgaccaccgccggctttgcctgctctcagtgtggccagcccctgttcgtgtacaagctggagcaggtgtctgagaagggcaaggcttacaccaactacttcggacggtgcaatgtggccgagcacgaaaagctgatcctgctggcccagctgaagcccgagaaggatagcgacgaagccgtgacatatagcctgggaaagtttgggcagagggccctggatttctacagcattcatgtgaccaaggagtccacccaccccgtgaagcccctggcccagatcgccggaaacagatacgcctccggacctgtgggaaaggccctgagcgacgcatgtatgggcacaatcgcctccttcctgtctaagtaccaggacatcatcatcgaacaccagaaggtggtgaagggcaaccagaagagactggagagcctgcgggagctggccggcaaggaaaacctggaataccctagcgtgaccctgccacctcagcctcacaccaaggagggcgttgatgcctacaacgaagtgatcgcccgggtgcgaatgtgggtgaacctgaacctgtggcagaagctgaagctaagcagagatgatgccaagcctctgctgagactgaagggattcccttcctttcctctggtcgagagacaggccaacgaagtggactggtgggacatggtgtgtaacgtgaagaagctgatcaacgagaaaaaggaggatggcaaggtgttttggcagaatctggctggctacaagagacaggaagccctgagaccatacctgagcagcgaggaagatcggaagaagggaaagaaattcgctcggtaccagctgggcgacctgctgctgcacctggaaaagaagcacggcgaggactggggaaaggtgtacgacgaggcctgggagcggattgacaagaaagtggaaggcctgagcaagcacatcaagctggaagaggaacggagaagcgaggacgcccagagcaaggccgccctgaccgactggctgcgggctaaggccagcttcgtgatcgagggcctgaaggaggccgacaaggacgagttctgcagatgcgagctgaagctgcagaagtggtacggggacctgcggggaaagcccttcgccatcgaagccgagaacagcatcctggacatcagcggcttcagcaagcagtacaactgtgccttcatctggcagaaggacggcgtgaagaagctgaacctgtacctgatcatcaactacttcaagggcggcaagctgcggttcaagaagatcaaacctgaagccttcgaagccaacagattctacaccgtgatcaacaaaaagagcggcgagatcgtgcccatggaggtgaacttcaacttcgacgaccccaacctgatcatcctgcctctggcctttggcaagagacagggcagagaattcatctggaacgacctgctgtccctggaaaccggcagcctgaagctggccaacggaagagtgatcgagaagacactgtacaacagaagaacccggcaggatgagcctgccctgttcgtggccctgaccttcgagcggcgggaggtcctggactcctccaatatcaaaccaatgaacctgatcggcgtggcaagaggcgaaaacatccccgccgtgatcgccctgaccgaccccgagggctgcccactgagccggtttaaggatagcctgggaaacccaacccacatcctgagaatcggcgagagctataaggagaagcagcggaccatccaggccaagaaggaggtggagcagcggagagccggcggctacagccggaagtacgccagcaaagccaagaatctggcagacgatatggtgagaaacaccgctagagatctgctgtactacgccgtgacccaggatgccatgctgatcttcgccaacctgagccggggcttcggccggcagggcaagcggaccttcatggccgagagacagtacacacggatggaggactggctgaccgccaagctggcctacgagggcctgagcaagacctacctgtccaagacactggcccagtacacctccaagacatgcagcaactgtgggtttaccatcaccagcgccgactacgacagggtgctggagaagctgaagaagacagcaacaggctggatgaccacaattaacggcaaggagctgaaggtggagggccagattacctactacaacagatacaagagacagaacgtagtcaaggacctgtccgtcgagctggatagactgagcgaagaatctgtgaacaacgacatctcctcctggacaaagggcagaagcggagaagctctgagcctcctgaagaaaagattctcccatagacccgtgcaggagaagttcgtgtgcctgaactgcggcttcgagacacacgcagccgagcaagccgccctgaacatcgccagatcctggctgttcctgcggagccaggagtacaagaaataccagacaaacaagacaaccggcaacaccgataagagagccttcgtcgagacctggcagtccttttaccggaagaagcttaaggaggtgtggaaacctgccgtgcggtctggcggatctggcggaggctccacaagcatgaccaagttccaggaggccgtgaccttcaaggacgtggccgtggccttcaccgaggaggagctgggcctgctggacagcgcccagaggaagctgtacagggacgtgatgctggagaacttcaggaacctggtgagcgtgggccaccagagcttcaagcccgacatgatcagccagctggagagggaggagaagctgtggatgaaggagctgcagacccagaggggcaagcacagcggcttcaccagccccaagaaaaagagaaaagtctaagctgccttctgcggggcttgccttctggccatgcccttcttctctcccttgcacctgtacctcttggtctttgaataaagcctgagtaggaaggctagcaaaaaaaaaaaaaaaaaaaaaaaaaaaaaaaaaaaaaaaaaaaaaaaaaaaaaaaaaaaaaaaaaaaaaaaaaaaaaaaa

SEQ ID NO: 6250 - RNA, 5797 nt, synthetic construct
  source 1..5797: mol_type = other RNA
aggaaataagagagaaaagaagagtaagaagaaatataagagccaccatggcccctaagaagaagcgtaaagtgagccggatggaacgcctcgtctacgaggtgcggcagaagtgcagaaacatcgaggacatctgcatctcctgcggatctctgaacgtgaccctggagcacccactgttcatcggcggcatgtgccagaactgtaaaaactgttttctggagtgtgcctatcaatacgacgatgacggctaccagagctactgcaccatctgttgcggcggaagagaggtgctgatgtgtggaaataacaactgctgccggtgcttctgcgtggaatgcgtggacctgctggtgggccccggcgccgcccaggccgctattaaggaagatccttggaactgctacatgtgcggccacaagggcacatacggcctgctgagacggagagaggactggcctagcagactgcagatgttcttcgccaataaccacgaccaggagttcgacccccctaaggtgtaccctcccgtccccgccgagaagagaaagcccatccgggtcctgagcctgttcgatggcatcgccaccggtctgctggtgctgaaggacctgggcatccaggtggataggtacattgcctccgaggtgtgcgaggactccatcaccgtgggaatggtgcgtcatcagggcaagatcatgtacgtgggcgacgtgcggagcgtgacacagaagcatatccaggagtggggccctttcgacctggtgatcggcggcagcccttgcaatgacctgagcatcgtgaacccagcccggaagggcctgtacgagggaaccggcagactgttcttcgagttttacagactgctgcacgacgcccggcctaaggaaggcgacgaccggcccttcttttggctgttcgagaatgtggtggccatgggagtcagcgacaagcgggatattagccggttcctggagagcaaccccgtgatgatcgatgccaaggaagtgagcgccgcccaccgggccagatacttctggggcaatctgcctggcatgaacagacccctggccagcaccgtgaacgacaagctggagctgcaggagtgcctggagcacggccggatcgccaagttcagcaaggtgagaaccatcaccacccgaagcaacagcatcaaacaaggcaaggaccagcactttcctgtgttcatgaacgagaaggaggacatcctgtggtgtaccgagatggagagagtgttcgggttcccagtccactacacagatgtcagcaacatgtctagactggccagacagagactgctgggaagaagctggtccgtccctgtgatcagacacctgttcgcccctctgaaggagtacttcgcctgcgtgagcagcggcaacagcaacgccaacagccggggccccagcttctctagcggcctggtgccactgtccctgagagggagccacatgggccccatggagatctacaaaaccgtgagcgcctggaagcggcagcctgtgcgcgtgctgagcctgtttcggaatatcgataaagtcctgaaaagcctgggattcctggagagcggctctggctccggcggtggcaccctgaagtacgtggaggatgtgacaaacgtggtcagacgggatgtggagaagtggggccccttcgatctggtgtacggcagcacccaacccctgggcagctcttgtgaccggtgccctggctggtacatgtttcagttccaccggatcctgcagtacgccctgccgagacaggagtcccagcggccattcttttggattttcatggacaacttgctgctgaccgaggatgaccaggaaactaccactcggttcctgcagaccgaagccgtgaccctgcaggacgtgagaggccgggactaccagaacgccatgcgggtgtggtccaacatccctggactgaaaagcaagcacgcacctctgacccctaaagaagaggagtacctgcaggcccaggtgcggagcagaagcaagctggacgcccctaaggtggatctgctggtgaagaattgcctcctgcccctgagagagtacttcaagtatttcagccagaatagtctgcccctgggcggcccaagcagcggcgcccctcctcccagcggcggcagcccagccggctccccaacctctaccgaggagggcacctctgagtccgccacccccgagagcggccctggcacctccaccgagcccagcgagggcagcgcacccggcagccctgccggcagccccacctccacagaggagggaaccagcaccgagcccagcgaaggcagcgccccaggcaccagcaccgagcctagtgagggcggctctggcggcggcagcgcccaggagattaaacggatcaacaagatcagaagaagacttgtgaaagacagcaacaccaagaaggccggcaagacaggccccatgaaaaccctgctggttagagtgatgacacccgatctgagagagcggctggaaaacctgagaaagaagcctgaaaatatcccccagcccatcagcaatacatctagagccaacctgaataagctgctgaccgattacaccgaaatgaagaaggcgatcctgcatgtgtactgggaagagttccagaaggaccctgtgggcctgatgagccgggtggcccagcctgccagcaagaagatcgatcagaacaagctgaaacctgagatggacgagaagggcaacctgaccaccgccggctttgcctgctctcagtgtggccagcccctgttcgtgtacaagctggagcaggtgtctgagaagggcaaggcttacaccaactacttcggacggtgcaatgtggccgagcacgaaaagctgatcctgctggcccagctgaagcccgagaaggatagcgacgaagccgtgacatatagcctgggaaagtttgggcagagggccctggatttctacagcattcatgtgaccaaggagtccacccaccccgtgaagcccctggcccagatcgccggaaacagatacgcctccggacctgtgggaaaggccctgagcgacgcatgtatgggcacaatcgcctccttcctgtctaagtaccaggacatcatcatcgaacaccagaaggtggtgaagggcaaccagaagagactggagagcctgcgggagctggccggcaaggaaaacctggaataccctagcgtgaccctgccacctcagcctcacaccaaggagggcgttgatgcctacaacgaagtgatcgcccgggtgcgaatgtgggtgaacctgaacctgtggcagaagctgaagctaagcagagatgatgccaagcctctgctgagactgaagggattcccttcctttcctctggtcgagagacaggccaacgaagtggactggtgggacatggtgtgtaacgtgaagaagctgatcaacgagaaaaaggaggatggcaaggtgttttggcagaatctggctggctacaagagacaggaagccctgagaccatacctgagcagcgaggaagatcggaagaagggaaagaaattcgctcggtaccagctgggcgacctgctgctgcacctggaaaagaagcacggcgaggactggggaaaggtgtacgacgaggcctgggagcggattgacaagaaagtggaaggcctgagcaagcacatcaagctggaagaggaacggagaagcgaggacgcccagagcaaggccgccctgaccgactggctgcgggctaaggccagcttcgtgatcgagggcctgaaggaggccgacaaggacgagttctgcagatgcgagctgaagctgcagaagtggtacggggacctgcggggaaagcccttcgccatcgaagccgagaacagcatcctggacatcagcggcttcagcaagcagtacaactgtgccttcatctggcagaaggacggcgtgaagaagctgaacctgtacctgatcatcaactacttcaagggcggcaagctgcggttcaagaagatcaaacctgaagccttcgaagccaacagattctacaccgtgatcaacaaaaagagcggcgagatcgtgcccatggaggtgaacttcaacttcgacgaccccaacctgatcatcctgcctctggcctttggcaagagacagggcagagaattcatctggaacgacctgctgtccctggaaaccggcagcctgaagctggccaacggaagagtgatcgagaagacactgtacaacagaagaacccggcaggatgagcctgccctgttcgtggccctgaccttcgagcggcgggaggtcctggactcctccaatatcaaaccaatgaacctgatcggcgtggcaagaggcgaaaacatccccgccgtgatcgccctgaccgaccccgagggctgcccactgagccggtttaaggatagcctgggaaacccaacccacatcctgagaatcggcgagagctataaggagaagcagcggaccatccaggccaagaaggaggtggagcagcggagagccggcggctacagccggaagtacgccagcaaagccaagaatctggcagacgatatggtgagaaacaccgctagagatctgctgtactacgccgtgacccaggatgccatgctgatcttcgccaacctgagccggggcttcggccggcagggcaagcggaccttcatggccgagagacagtacacacggatggaggactggctgaccgccaagctggcctacgagggcctgagcaagacctacctgtccaagacactggcccagtacacctccaagacatgcagcaactgtgggtttaccatcaccagcgccgactacgacagggtgctggagaagctgaagaagacagcaacaggctggatgaccacaattaacggcaaggagctgaaggtggagggccagattacctactacaacagatacaagagacagaacgtagtcaaggacctgtccgtcgagctggatagactgagcgaagaatctgtgaacaacgacatctcctcctggacaaagggcagaagcggagaagctctgagcctcctgaagaaaagattctcccatagacccgtgcaggagaagttcgtgtgcctgaactgcggcttcgagacacacgcagccgagcaagccgccctgaacatcgccagatcctggctgttcctgcggagccaggagtacaagaaataccagacaaacaagacaaccggcaacaccgataagagagccttcgtcgagacctggcagtccttttaccggaagaagcttaaggaggtgtggaaacctgccgtgcggtctggcggatctggcggaggctccacaagcttccagggcagcctgagcatcgaggacgtgaccgtgggcttcacccaggaggagtggcagcacctggaccccgcccagaggaccctgtacagggacgtgatgctggagaactacagccacctggtgagcgtgggctactgcatccccaagcccgaggtgatcttcaagctggagaggggcgagcagctgtggatcctggaggaggagagcagcagccagagccaccccgaggtgtgcaaggtgaccagccccaagaaaaagagaaaagtctaagctgccttctgcggggcttgccttctggccatgcccttcttctctcccttgcacctgtacctcttggtctttgaataaagcctgagtaggaaggctagcaaaaaaaaaaaaaaaaaaaaaaaaaaaaaaaaaaaaaaaaaaaaaaaaaaaaaaaaaaaaaaaaaaaaaaaaaaaaaaaa

SEQ ID NO: 6251 - RNA, 5797 nt, synthetic construct
  source 1..5797: mol_type = other RNA
aggaaataagagagaaaagaagagtaagaagaaatataagagccaccatggcccctaagaagaagcgtaaagtgagccggatggaacgcctcgtctacgaggtgcggcagaagtgcagaaacatcgaggacatctgcatctcctgcggatctctgaacgtgaccctggagcacccactgttcatcggcggcatgtgccagaactgtaaaaactgttttctggagtgtgcctatcaatacgacgatgacggctaccagagctactgcaccatctgttgcggcggaagagaggtgctgatgtgtggaaataacaactgctgccggtgcttctgcgtggaatgcgtggacctgctggtgggccccggcgccgcccaggccgctattaaggaagatccttggaactgctacatgtgcggccacaagggcacatacggcctgctgagacggagagaggactggcctagcagactgcagatgttcttcgccaataaccacgaccaggagttcgacccccctaaggtgtaccctcccgtccccgccgagaagagaaagcccatccgggtcctgagcctgttcgatggcatcgccaccggtctgctggtgctgaaggacctgggcatccaggtggataggtacattgcctccgaggtgtgcgaggactccatcaccgtgggaatggtgcgtcatcagggcaagatcatgtacgtgggcgacgtgcggagcgtgacacagaagcatatccaggagtggggccctttcgacctggtgatcggcggcagcccttgcaatgacctgagcatcgtgaacccagcccggaagggcctgtacgagggaaccggcagactgttcttcgagttttacagactgctgcacgacgcccggcctaaggaaggcgacgaccggcccttcttttggctgttcgagaatgtggtggccatgggagtcagcgacaagcgggatattagccggttcctggagagcaaccccgtgatgatcgatgccaaggaagtgagcgccgcccaccgggccagatacttctggggcaatctgcctggcatgaacagacccctggccagcaccgtgaacgacaagctggagctgcaggagtgcctggagcacggccggatcgccaagttcagcaaggtgagaaccatcaccacccgaagcaacagcatcaaacaaggcaaggaccagcactttcctgtgttcatgaacgagaaggaggacatcctgtggtgtaccgagatggagagagtgttcgggttcccagtccactacacagatgtcagcaacatgtctagactggccagacagagactgctgggaagaagctggtccgtccctgtgatcagacacctgttcgcccctctgaaggagtacttcgcctgcgtgagcagcggcaacagcaacgccaacagccggggccccagcttctctagcggcctggtgccactgtccctgagagggagccacatgggccccatggagatctacaaaaccgtgagcgcctggaagcggcagcctgtgcgcgtgctgagcctgtttcggaatatcgataaagtcctgaaaagcctgggattcctggagagcggctctggctccggcggtggcaccctgaagtacgtggaggatgtgacaaacgtggtcagacgggatgtggagaagtggggccccttcgatctggtgtacggcagcacccaacccctgggcagctcttgtgaccggtgccctggctggtacatgtttcagttccaccggatcctgcagtacgccctgccgagacaggagtcccagcggccattcttttggattttcatggacaacttgctgctgaccgaggatgaccaggaaactaccactcggttcctgcagaccgaagccgtgaccctgcaggacgtgagaggccgggactaccagaacgccatgcgggtgtggtccaacatccctggactgaaaagcaagcacgcacctctgacccctaaagaagaggagtacctgcaggcccaggtgcggagcagaagcaagctggacgcccctaaggtggatctgctggtgaagaattgcctcctgcccctgagagagtacttcaagtatttcagccagaatagtctgcccctgggcggcccaagcagcggcgcccctcctcccagcggcggcagcccagccggctccccaacctctaccgaggagggcacctctgagtccgccacccccgagagcggccctggcacctccaccgagcccagcgagggcagcgcacccggcagccctgccggcagccccacctccacagaggagggaaccagcaccgagcccagcgaaggcagcgccccaggcaccagcaccgagcctagtgagggcggctctggcggcggcagcgcccaggagattaaacggatcaacaagatcagaagaagacttgtgaaagacagcaacaccaagaaggccggcaagacaggccccatgaaaaccctgctggttagagtgatgacacccgatctgagagagcggctggaaaacctgagaaagaagcctgaaaatatcccccagcccatcagcaatacatctagagccaacctgaataagctgctgaccgattacaccgaaatgaagaaggcgatcctgcatgtgtactgggaagagttccagaaggaccctgtgggcctgatgagccgggtggcccagcctgccagcaagaagatcgatcagaacaagctgaaacctgagatggacgagaagggcaacctgaccaccgccggctttgcctgctctcagtgtggccagcccctgttcgtgtacaagctggagcaggtgtctgagaagggcaaggcttacaccaactacttcggacggtgcaatgtggccgagcacgaaaagctgatcctgctggcccagctgaagcccgagaaggatagcgacgaagccgtgacatatagcctgggaaagtttgggcagagggccctggatttctacagcattcatgtgaccaaggagtccacccaccccgtgaagcccctggcccagatcgccggaaacagatacgcctccggacctgtgggaaaggccctgagcgacgcatgtatgggcacaatcgcctccttcctgtctaagtaccaggacatcatcatcgaacaccagaaggtggtgaagggcaaccagaagagactggagagcctgcgggagctggccggcaaggaaaacctggaataccctagcgtgaccctgccacctcagcctcacaccaaggagggcgttgatgcctacaacgaagtgatcgcccgggtgcgaatgtgggtgaacctgaacctgtggcagaagctgaagctaagcagagatgatgccaagcctctgctgagactgaagggattcccttcctttcctctggtcgagagacaggccaacgaagtggactggtgggacatggtgtgtaacgtgaagaagctgatcaacgagaaaaaggaggatggcaaggtgttttggcagaatctggctggctacaagagacaggaagccctgagaccatacctgagcagcgaggaagatcggaagaagggaaagaaattcgctcggtaccagctgggcgacctgctgctgcacctggaaaagaagcacggcgaggactggggaaaggtgtacgacgaggcctgggagcggattgacaagaaagtggaaggcctgagcaagcacatcaagctggaagaggaacggagaagcgaggacgcccagagcaaggccgccctgaccgactggctgcgggctaaggccagcttcgtgatcgagggcctgaaggaggccgacaaggacgagttctgcagatgcgagctgaagctgcagaagtggtacggggacctgcggggaaagcccttcgccatcgaagccgagaacagcatcctggacatcagcggcttcagcaagcagtacaactgtgccttcatctggcagaaggacggcgtgaagaagctgaacctgtacctgatcatcaactacttcaagggcggcaagctgcggttcaagaagatcaaacctgaagccttcgaagccaacagattctacaccgtgatcaacaaaaagagcggcgagatcgtgcccatggaggtgaacttcaacttcgacgaccccaacctgatcatcctgcctctggcctttggcaagagacagggcagagaattcatctggaacgacctgctgtccctggaaaccggcagcctgaagctggccaacggaagagtgatcgagaagacactgtacaacagaagaacccggcaggatgagcctgccctgttcgtggccctgaccttcgagcggcgggaggtcctggactcctccaatatcaaaccaatgaacctgatcggcgtggcaagaggcgaaaacatccccgccgtgatcgccctgaccgaccccgagggctgcccactgagccggtttaaggatagcctgggaaacccaacccacatcctgagaatcggcgagagctataaggagaagcagcggaccatccaggccaagaaggaggtggagcagcggagagccggcggctacagccggaagtacgccagcaaagccaagaatctggcagacgatatggtgagaaacaccgctagagatctgctgtactacgccgtgacccaggatgccatgctgatcttcgccaacctgagccggggcttcggccggcagggcaagcggaccttcatggccgagagacagtacacacggatggaggactggctgaccgccaagctggcctacgagggcctgagcaagacctacctgtccaagacactggcccagtacacctccaagacatgcagcaactgtgggtttaccatcaccagcgccgactacgacagggtgctggagaagctgaagaagacagcaacaggctggatgaccacaattaacggcaaggagctgaaggtggagggccagattacctactacaacagatacaagagacagaacgtagtcaaggacctgtccgtcgagctggatagactgagcgaagaatctgtgaacaacgacatctcctcctggacaaagggcagaagcggagaagctctgagcctcctgaagaaaagattctcccatagacccgtgcaggagaagttcgtgtgcctgaactgcggcttcgagacacacgcagccgagcaagccgccctgaacatcgccagatcctggctgttcctgcggagccaggagtacaagaaataccagacaaacaagacaaccggcaacaccgataagagagccttcgtcgagacctggcagtccttttaccggaagaagcttaaggaggtgtggaaacctgccgtgcggtctggcggatctggcggaggctccacaagcagccagggcagcatcaccttcaaggacgtggccgtggacttcacccaggaggagtggtgcctgctggaccacagccagaaggccctgcacctggaggtgatgctggagaacgtgcagaacctgctgagcgtgggcctgcccgtgcccagggagaacttcatcagctgcttccagcagggcaaggccccctacctgctgcagcagaacgaccccaagagcagcagccccgaggccgagaccaacaccagccccaagaaaaagagaaaagtctaagctgccttctgcggggcttgccttctggccatgcccttcttctctcccttgcacctgtacctcttggtctttgaataaagcctgagtaggaaggctagcaaaaaaaaaaaaaaaaaaaaaaaaaaaaaaaaaaaaaaaaaaaaaaaaaaaaaaaaaaaaaaaaaaaaaaaaaaaaaaaa

SEQ ID NO: 6252 - RNA, 5797 nt, synthetic construct
  source 1..5797: mol_type = other RNA
aggaaataagagagaaaagaagagtaagaagaaatataagagccaccatggcccctaagaagaagcgtaaagtgagccggatggaacgcctcgtctacgaggtgcggcagaagtgcagaaacatcgaggacatctgcatctcctgcggatctctgaacgtgaccctggagcacccactgttcatcggcggcatgtgccagaactgtaaaaactgttttctggagtgtgcctatcaatacgacgatgacggctaccagagctactgcaccatctgttgcggcggaagagaggtgctgatgtgtggaaataacaactgctgccggtgcttctgcgtggaatgcgtggacctgctggtgggccccggcgccgcccaggccgctattaaggaagatccttggaactgctacatgtgcggccacaagggcacatacggcctgctgagacggagagaggactggcctagcagactgcagatgttcttcgccaataaccacgaccaggagttcgacccccctaaggtgtaccctcccgtccccgccgagaagagaaagcccatccgggtcctgagcctgttcgatggcatcgccaccggtctgctggtgctgaaggacctgggcatccaggtggataggtacattgcctccgaggtgtgcgaggactccatcaccgtgggaatggtgcgtcatcagggcaagatcatgtacgtgggcgacgtgcggagcgtgacacagaagcatatccaggagtggggccctttcgacctggtgatcggcggcagcccttgcaatgacctgagcatcgtgaacccagcccggaagggcctgtacgagggaaccggcagactgttcttcgagttttacagactgctgcacgacgcccggcctaaggaaggcgacgaccggcccttcttttggctgttcgagaatgtggtggccatgggagtcagcgacaagcgggatattagccggttcctggagagcaaccccgtgatgatcgatgccaaggaagtgagcgccgcccaccgggccagatacttctggggcaatctgcctggcatgaacagacccctggccagcaccgtgaacgacaagctggagctgcaggagtgcctggagcacggccggatcgccaagttcagcaaggtgagaaccatcaccacccgaagcaacagcatcaaacaaggcaaggaccagcactttcctgtgttcatgaacgagaaggaggacatcctgtggtgtaccgagatggagagagtgttcgggttcccagtccactacacagatgtcagcaacatgtctagactggccagacagagactgctgggaagaagctggtccgtccctgtgatcagacacctgttcgcccctctgaaggagtacttcgcctgcgtgagcagcggcaacagcaacgccaacagccggggccccagcttctctagcggcctggtgccactgtccctgagagggagccacatgggccccatggagatctacaaaaccgtgagcgcctggaagcggcagcctgtgcgcgtgctgagcctgtttcggaatatcgataaagtcctgaaaagcctgggattcctggagagcggctctggctccggcggtggcaccctgaagtacgtggaggatgtgacaaacgtggtcagacgggatgtggagaagtggggccccttcgatctggtgtacggcagcacccaacccctgggcagctcttgtgaccggtgccctggctggtacatgtttcagttccaccggatcctgcagtacgccctgccgagacaggagtcccagcggccattcttttggattttcatggacaacttgctgctgaccgaggatgaccaggaaactaccactcggttcctgcagaccgaagccgtgaccctgcaggacgtgagaggccgggactaccagaacgccatgcgggtgtggtccaacatccctggactgaaaagcaagcacgcacctctgacccctaaagaagaggagtacctgcaggcccaggtgcggagcagaagcaagctggacgcccctaaggtggatctgctggtgaagaattgcctcctgcccctgagagagtacttcaagtatttcagccagaatagtctgcccctgggcggcccaagcagcggcgcccctcctcccagcggcggcagcccagccggctccccaacctctaccgaggagggcacctctgagtccgccacccccgagagcggccctggcacctccaccgagcccagcgagggcagcgcacccggcagccctgccggcagccccacctccacagaggagggaaccagcaccgagcccagcgaaggcagcgccccaggcaccagcaccgagcctagtgagggcggctctggcggcggcagcgcccaggagattaaacggatcaacaagatcagaagaagacttgtgaaagacagcaacaccaagaaggccggcaagacaggccccatgaaaaccctgctggttagagtgatgacacccgatctgagagagcggctggaaaacctgagaaagaagcctgaaaatatcccccagcccatcagcaatacatctagagccaacctgaataagctgctgaccgattacaccgaaatgaagaaggcgatcctgcatgtgtactgggaagagttccagaaggaccctgtgggcctgatgagccgggtggcccagcctgccagcaagaagatcgatcagaacaagctgaaacctgagatggacgagaagggcaacctgaccaccgccggctttgcctgctctcagtgtggccagcccctgttcgtgtacaagctggagcaggtgtctgagaagggcaaggcttacaccaactacttcggacggtgcaatgtggccgagcacgaaaagctgatcctgctggcccagctgaagcccgagaaggatagcgacgaagccgtgacatatagcctgggaaagtttgggcagagggccctggatttctacagcattcatgtgaccaaggagtccacccaccccgtgaagcccctggcccagatcgccggaaacagatacgcctccggacctgtgggaaaggccctgagcgacgcatgtatgggcacaatcgcctccttcctgtctaagtaccaggacatcatcatcgaacaccagaaggtggtgaagggcaaccagaagagactggagagcctgcgggagctggccggcaaggaaaacctggaataccctagcgtgaccctgccacctcagcctcacaccaaggagggcgttgatgcctacaacgaagtgatcgcccgggtgcgaatgtgggtgaacctgaacctgtggcagaagctgaagctaagcagagatgatgccaagcctctgctgagactgaagggattcccttcctttcctctggtcgagagacaggccaacgaagtggactggtgggacatggtgtgtaacgtgaagaagctgatcaacgagaaaaaggaggatggcaaggtgttttggcagaatctggctggctacaagagacaggaagccctgagaccatacctgagcagcgaggaagatcggaagaagggaaagaaattcgctcggtaccagctgggcgacctgctgctgcacctggaaaagaagcacggcgaggactggggaaaggtgtacgacgaggcctgggagcggattgacaagaaagtggaaggcctgagcaagcacatcaagctggaagaggaacggagaagcgaggacgcccagagcaaggccgccctgaccgactggctgcgggctaaggccagcttcgtgatcgagggcctgaaggaggccgacaaggacgagttctgcagatgcgagctgaagctgcagaagtggtacggggacctgcggggaaagcccttcgccatcgaagccgagaacagcatcctggacatcagcggcttcagcaagcagtacaactgtgccttcatctggcagaaggacggcgtgaagaagctgaacctgtacctgatcatcaactacttcaagggcggcaagctgcggttcaagaagatcaaacctgaagccttcgaagccaacagattctacaccgtgatcaacaaaaagagcggcgagatcgtgcccatggaggtgaacttcaacttcgacgaccccaacctgatcatcctgcctctggcctttggcaagagacagggcagagaattcatctggaacgacctgctgtccctggaaaccggcagcctgaagctggccaacggaagagtgatcgagaagacactgtacaacagaagaacccggcaggatgagcctgccctgttcgtggccctgaccttcgagcggcgggaggtcctggactcctccaatatcaaaccaatgaacctgatcggcgtggcaagaggcgaaaacatccccgccgtgatcgccctgaccgaccccgagggctgcccactgagccggtttaaggatagcctgggaaacccaacccacatcctgagaatcggcgagagctataaggagaagcagcggaccatccaggccaagaaggaggtggagcagcggagagccggcggctacagccggaagtacgccagcaaagccaagaatctggcagacgatatggtgagaaacaccgctagagatctgctgtactacgccgtgacccaggatgccatgctgatcttcgccaacctgagccggggcttcggccggcagggcaagcggaccttcatggccgagagacagtacacacggatggaggactggctgaccgccaagctggcctacgagggcctgagcaagacctacctgtccaagacactggcccagtacacctccaagacatgcagcaactgtgggtttaccatcaccagcgccgactacgacagggtgctggagaagctgaagaagacagcaacaggctggatgaccacaattaacggcaaggagctgaaggtggagggccagattacctactacaacagatacaagagacagaacgtagtcaaggacctgtccgtcgagctggatagactgagcgaagaatctgtgaacaacgacatctcctcctggacaaagggcagaagcggagaagctctgagcctcctgaagaaaagattctcccatagacccgtgcaggagaagttcgtgtgcctgaactgcggcttcgagacacacgcagccgagcaagccgccctgaacatcgccagatcctggctgttcctgcggagccaggagtacaagaaataccagacaaacaagacaaccggcaacaccgataagagagccttcgtcgagacctggcagtccttttaccggaagaagcttaaggaggtgtggaaacctgccgtgcggtctggcggatctggcggaggctccacaagcgcccaggagagcgtgaccttcagggacgtggccgtggtgttcagcagggacgagtggctgtgcctggaccccgcccagaggagcctgtacagggaggtgatgctggagaactacggcaccctggtgagcctgggcatcctgttcagcaagcccaaggtgatcttccagctgcagcagggcgaggacccctggatggtggagagcggcgtgagccagggcccctgcgtgggctgggagagcatgaccagccccaagaaaaagagaaaagtctaagctgccttctgcggggcttgccttctggccatgcccttcttctctcccttgcacctgtacctcttggtctttgaataaagcctgagtaggaaggctagcaaaaaaaaaaaaaaaaaaaaaaaaaaaaaaaaaaaaaaaaaaaaaaaaaaaaaaaaaaaaaaaaaaaaaaaaaaaaaaaa

SEQ ID NO: 6253 - RNA, 5797 nt, synthetic construct
  source 1..5797: mol_type = other RNA
aggaaataagagagaaaagaagagtaagaagaaatataagagccaccatggcccctaagaagaagcgtaaagtgagccggatggaacgcctcgtctacgaggtgcggcagaagtgcagaaacatcgaggacatctgcatctcctgcggatctctgaacgtgaccctggagcacccactgttcatcggcggcatgtgccagaactgtaaaaactgttttctggagtgtgcctatcaatacgacgatgacggctaccagagctactgcaccatctgttgcggcggaagagaggtgctgatgtgtggaaataacaactgctgccggtgcttctgcgtggaatgcgtggacctgctggtgggccccggcgccgcccaggccgctattaaggaagatccttggaactgctacatgtgcggccacaagggcacatacggcctgctgagacggagagaggactggcctagcagactgcagatgttcttcgccaataaccacgaccaggagttcgacccccctaaggtgtaccctcccgtccccgccgagaagagaaagcccatccgggtcctgagcctgttcgatggcatcgccaccggtctgctggtgctgaaggacctgggcatccaggtggataggtacattgcctccgaggtgtgcgaggactccatcaccgtgggaatggtgcgtcatcagggcaagatcatgtacgtgggcgacgtgcggagcgtgacacagaagcatatccaggagtggggccctttcgacctggtgatcggcggcagcccttgcaatgacctgagcatcgtgaacccagcccggaagggcctgtacgagggaaccggcagactgttcttcgagttttacagactgctgcacgacgcccggcctaaggaaggcgacgaccggcccttcttttggctgttcgagaatgtggtggccatgggagtcagcgacaagcgggatattagccggttcctggagagcaaccccgtgatgatcgatgccaaggaagtgagcgccgcccaccgggccagatacttctggggcaatctgcctggcatgaacagacccctggccagcaccgtgaacgacaagctggagctgcaggagtgcctggagcacggccggatcgccaagttcagcaaggtgagaaccatcaccacccgaagcaacagcatcaaacaaggcaaggaccagcactttcctgtgttcatgaacgagaaggaggacatcctgtggtgtaccgagatggagagagtgttcgggttcccagtccactacacagatgtcagcaacatgtctagactggccagacagagactgctgggaagaagctggtccgtccctgtgatcagacacctgttcgcccctctgaaggagtacttcgcctgcgtgagcagcggcaacagcaacgccaacagccggggccccagcttctctagcggcctggtgccactgtccctgagagggagccacatgggccccatggagatctacaaaaccgtgagcgcctggaagcggcagcctgtgcgcgtgctgagcctgtttcggaatatcgataaagtcctgaaaagcctgggattcctggagagcggctctggctccggcggtggcaccctgaagtacgtggaggatgtgacaaacgtggtcagacgggatgtggagaagtggggccccttcgatctggtgtacggcagcacccaacccctgggcagctcttgtgaccggtgccctggctggtacatgtttcagttccaccggatcctgcagtacgccctgccgagacaggagtcccagcggccattcttttggattttcatggacaacttgctgctgaccgaggatgaccaggaaactaccactcggttcctgcagaccgaagccgtgaccctgcaggacgtgagaggccgggactaccagaacgccatgcgggtgtggtccaacatccctggactgaaaagcaagcacgcacctctgacccctaaagaagaggagtacctgcaggcccaggtgcggagcagaagcaagctggacgcccctaaggtggatctgctggtgaagaattgcctcctgcccctgagagagtacttcaagtatttcagccagaatagtctgcccctgggcggcccaagcagcggcgcccctcctcccagcggcggcagcccagccggctccccaacctctaccgaggagggcacctctgagtccgccacccccgagagcggccctggcacctccaccgagcccagcgagggcagcgcacccggcagccctgccggcagccccacctccacagaggagggaaccagcaccgagcccagcgaaggcagcgccccaggcaccagcaccgagcctagtgagggcggctctggcggcggcagcgcccaggagattaaacggatcaacaagatcagaagaagacttgtgaaagacagcaacaccaagaaggccggcaagacaggccccatgaaaaccctgctggttagagtgatgacacccgatctgagagagcggctggaaaacctgagaaagaagcctgaaaatatcccccagcccatcagcaatacatctagagccaacctgaataagctgctgaccgattacaccgaaatgaagaaggcgatcctgcatgtgtactgggaagagttccagaaggaccctgtgggcctgatgagccgggtggcccagcctgccagcaagaagatcgatcagaacaagctgaaacctgagatggacgagaagggcaacctgaccaccgccggctttgcctgctctcagtgtggccagcccctgttcgtgtacaagctggagcaggtgtctgagaagggcaaggcttacaccaactacttcggacggtgcaatgtggccgagcacgaaaagctgatcctgctggcccagctgaagcccgagaaggatagcgacgaagccgtgacatatagcctgggaaagtttgggcagagggccctggatttctacagcattcatgtgaccaaggagtccacccaccccgtgaagcccctggcccagatcgccggaaacagatacgcctccggacctgtgggaaaggccctgagcgacgcatgtatgggcacaatcgcctccttcctgtctaagtaccaggacatcatcatcgaacaccagaaggtggtgaagggcaaccagaagagactggagagcctgcgggagctggccggcaaggaaaacctggaataccctagcgtgaccctgccacctcagcctcacaccaaggagggcgttgatgcctacaacgaagtgatcgcccgggtgcgaatgtgggtgaacctgaacctgtggcagaagctgaagctaagcagagatgatgccaagcctctgctgagactgaagggattcccttcctttcctctggtcgagagacaggccaacgaagtggactggtgggacatggtgtgtaacgtgaagaagctgatcaacgagaaaaaggaggatggcaaggtgttttggcagaatctggctggctacaagagacaggaagccctgagaccatacctgagcagcgaggaagatcggaagaagggaaagaaattcgctcggtaccagctgggcgacctgctgctgcacctggaaaagaagcacggcgaggactggggaaaggtgtacgacgaggcctgggagcggattgacaagaaagtggaaggcctgagcaagcacatcaagctggaagaggaacggagaagcgaggacgcccagagcaaggccgccctgaccgactggctgcgggctaaggccagcttcgtgatcgagggcctgaaggaggccgacaaggacgagttctgcagatgcgagctgaagctgcagaagtggtacggggacctgcggggaaagcccttcgccatcgaagccgagaacagcatcctggacatcagcggcttcagcaagcagtacaactgtgccttcatctggcagaaggacggcgtgaagaagctgaacctgtacctgatcatcaactacttcaagggcggcaagctgcggttcaagaagatcaaacctgaagccttcgaagccaacagattctacaccgtgatcaacaaaaagagcggcgagatcgtgcccatggaggtgaacttcaacttcgacgaccccaacctgatcatcctgcctctggcctttggcaagagacagggcagagaattcatctggaacgacctgctgtccctggaaaccggcagcctgaagctggccaacggaagagtgatcgagaagacactgtacaacagaagaacccggcaggatgagcctgccctgttcgtggccctgaccttcgagcggcgggaggtcctggactcctccaatatcaaaccaatgaacctgatcggcgtggcaagaggcgaaaacatccccgccgtgatcgccctgaccgaccccgagggctgcccactgagccggtttaaggatagcctgggaaacccaacccacatcctgagaatcggcgagagctataaggagaagcagcggaccatccaggccaagaaggaggtggagcagcggagagccggcggctacagccggaagtacgccagcaaagccaagaatctggcagacgatatggtgagaaacaccgctagagatctgctgtactacgccgtgacccaggatgccatgctgatcttcgccaacctgagccggggcttcggccggcagggcaagcggaccttcatggccgagagacagtacacacggatggaggactggctgaccgccaagctggcctacgagggcctgagcaagacctacctgtccaagacactggcccagtacacctccaagacatgcagcaactgtgggtttaccatcaccagcgccgactacgacagggtgctggagaagctgaagaagacagcaacaggctggatgaccacaattaacggcaaggagctgaaggtggagggccagattacctactacaacagatacaagagacagaacgtagtcaaggacctgtccgtcgagctggatagactgagcgaagaatctgtgaacaacgacatctcctcctggacaaagggcagaagcggagaagctctgagcctcctgaagaaaagattctcccatagacccgtgcaggagaagttcgtgtgcctgaactgcggcttcgagacacacgcagccgagcaagccgccctgaacatcgccagatcctggctgttcctgcggagccaggagtacaagaaataccagacaaacaagacaaccggcaacaccgataagagagccttcgtcgagacctggcagtccttttaccggaagaagcttaaggaggtgtggaaacctgccgtgcggtctggcggatctggcggaggctccacaagcatgagggtgctgaccttcagggacgtggccgtggagttcagccccgaggagtgggagtgcctggacagcgcccagcagcacctgtacagggacgtgatgctggagaactacggcaacctgttcagcctgggcctggccatcttcaagcccgacctgatcacctacctggagcagaggaaggagccctggaacgccaggaggcagaagaccgtggccaagcaccccgccggcagcctgcacttcaccagccccaagaaaaagagaaaagtctaagctgccttctgcggggcttgccttctggccatgcccttcttctctcccttgcacctgtacctcttggtctttgaataaagcctgagtaggaaggctagcaaaaaaaaaaaaaaaaaaaaaaaaaaaaaaaaaaaaaaaaaaaaaaaaaaaaaaaaaaaaaaaaaaaaaaaaaaaaaaaa

SEQ ID NO: 6254 - RNA, 5797 nt, synthetic construct
  source 1..5797: mol_type = other RNA
aggaaataagagagaaaagaagagtaagaagaaatataagagccaccatggcccctaagaagaagcgtaaagtgagccggatggaacgcctcgtctacgaggtgcggcagaagtgcagaaacatcgaggacatctgcatctcctgcggatctctgaacgtgaccctggagcacccactgttcatcggcggcatgtgccagaactgtaaaaactgttttctggagtgtgcctatcaatacgacgatgacggctaccagagctactgcaccatctgttgcggcggaagagaggtgctgatgtgtggaaataacaactgctgccggtgcttctgcgtggaatgcgtggacctgctggtgggccccggcgccgcccaggccgctattaaggaagatccttggaactgctacatgtgcggccacaagggcacatacggcctgctgagacggagagaggactggcctagcagactgcagatgttcttcgccaataaccacgaccaggagttcgacccccctaaggtgtaccctcccgtccccgccgagaagagaaagcccatccgggtcctgagcctgttcgatggcatcgccaccggtctgctggtgctgaaggacctgggcatccaggtggataggtacattgcctccgaggtgtgcgaggactccatcaccgtgggaatggtgcgtcatcagggcaagatcatgtacgtgggcgacgtgcggagcgtgacacagaagcatatccaggagtggggccctttcgacctggtgatcggcggcagcccttgcaatgacctgagcatcgtgaacccagcccggaagggcctgtacgagggaaccggcagactgttcttcgagttttacagactgctgcacgacgcccggcctaaggaaggcgacgaccggcccttcttttggctgttcgagaatgtggtggccatgggagtcagcgacaagcgggatattagccggttcctggagagcaaccccgtgatgatcgatgccaaggaagtgagcgccgcccaccgggccagatacttctggggcaatctgcctggcatgaacagacccctggccagcaccgtgaacgacaagctggagctgcaggagtgcctggagcacggccggatcgccaagttcagcaaggtgagaaccatcaccacccgaagcaacagcatcaaacaaggcaaggaccagcactttcctgtgttcatgaacgagaaggaggacatcctgtggtgtaccgagatggagagagtgttcgggttcccagtccactacacagatgtcagcaacatgtctagactggccagacagagactgctgggaagaagctggtccgtccctgtgatcagacacctgttcgcccctctgaaggagtacttcgcctgcgtgagcagcggcaacagcaacgccaacagccggggccccagcttctctagcggcctggtgccactgtccctgagagggagccacatgggccccatggagatctacaaaaccgtgagcgcctggaagcggcagcctgtgcgcgtgctgagcctgtttcggaatatcgataaagtcctgaaaagcctgggattcctggagagcggctctggctccggcggtggcaccctgaagtacgtggaggatgtgacaaacgtggtcagacgggatgtggagaagtggggccccttcgatctggtgtacggcagcacccaacccctgggcagctcttgtgaccggtgccctggctggtacatgtttcagttccaccggatcctgcagtacgccctgccgagacaggagtcccagcggccattcttttggattttcatggacaacttgctgctgaccgaggatgaccaggaaactaccactcggttcctgcagaccgaagccgtgaccctgcaggacgtgagaggccgggactaccagaacgccatgcgggtgtggtccaacatccctggactgaaaagcaagcacgcacctctgacccctaaagaagaggagtacctgcaggcccaggtgcggagcagaagcaagctggacgcccctaaggtggatctgctggtgaagaattgcctcctgcccctgagagagtacttcaagtatttcagccagaatagtctgcccctgggcggcccaagcagcggcgcccctcctcccagcggcggcagcccagccggctccccaacctctaccgaggagggcacctctgagtccgccacccccgagagcggccctggcacctccaccgagcccagcgagggcagcgcacccggcagccctgccggcagccccacctccacagaggagggaaccagcaccgagcccagcgaaggcagcgccccaggcaccagcaccgagcctagtgagggcggctctggcggcggcagcgcccaggagattaaacggatcaacaagatcagaagaagacttgtgaaagacagcaacaccaagaaggccggcaagacaggccccatgaaaaccctgctggttagagtgatgacacccgatctgagagagcggctggaaaacctgagaaagaagcctgaaaatatcccccagcccatcagcaatacatctagagccaacctgaataagctgctgaccgattacaccgaaatgaagaaggcgatcctgcatgtgtactgggaagagttccagaaggaccctgtgggcctgatgagccgggtggcccagcctgccagcaagaagatcgatcagaacaagctgaaacctgagatggacgagaagggcaacctgaccaccgccggctttgcctgctctcagtgtggccagcccctgttcgtgtacaagctggagcaggtgtctgagaagggcaaggcttacaccaactacttcggacggtgcaatgtggccgagcacgaaaagctgatcctgctggcccagctgaagcccgagaaggatagcgacgaagccgtgacatatagcctgggaaagtttgggcagagggccctggatttctacagcattcatgtgaccaaggagtccacccaccccgtgaagcccctggcccagatcgccggaaacagatacgcctccggacctgtgggaaaggccctgagcgacgcatgtatgggcacaatcgcctccttcctgtctaagtaccaggacatcatcatcgaacaccagaaggtggtgaagggcaaccagaagagactggagagcctgcgggagctggccggcaaggaaaacctggaataccctagcgtgaccctgccacctcagcctcacaccaaggagggcgttgatgcctacaacgaagtgatcgcccgggtgcgaatgtgggtgaacctgaacctgtggcagaagctgaagctaagcagagatgatgccaagcctctgctgagactgaagggattcccttcctttcctctggtcgagagacaggccaacgaagtggactggtgggacatggtgtgtaacgtgaagaagctgatcaacgagaaaaaggaggatggcaaggtgttttggcagaatctggctggctacaagagacaggaagccctgagaccatacctgagcagcgaggaagatcggaagaagggaaagaaattcgctcggtaccagctgggcgacctgctgctgcacctggaaaagaagcacggcgaggactggggaaaggtgtacgacgaggcctgggagcggattgacaagaaagtggaaggcctgagcaagcacatcaagctggaagaggaacggagaagcgaggacgcccagagcaaggccgccctgaccgactggctgcgggctaaggccagcttcgtgatcgagggcctgaaggaggccgacaaggacgagttctgcagatgcgagctgaagctgcagaagtggtacggggacctgcggggaaagcccttcgccatcgaagccgagaacagcatcctggacatcagcggcttcagcaagcagtacaactgtgccttcatctggcagaaggacggcgtgaagaagctgaacctgtacctgatcatcaactacttcaagggcggcaagctgcggttcaagaagatcaaacctgaagccttcgaagccaacagattctacaccgtgatcaacaaaaagagcggcgagatcgtgcccatggaggtgaacttcaacttcgacgaccccaacctgatcatcctgcctctggcctttggcaagagacagggcagagaattcatctggaacgacctgctgtccctggaaaccggcagcctgaagctggccaacggaagagtgatcgagaagacactgtacaacagaagaacccggcaggatgagcctgccctgttcgtggccctgaccttcgagcggcgggaggtcctggactcctccaatatcaaaccaatgaacctgatcggcgtggcaagaggcgaaaacatccccgccgtgatcgccctgaccgaccccgagggctgcccactgagccggtttaaggatagcctgggaaacccaacccacatcctgagaatcggcgagagctataaggagaagcagcggaccatccaggccaagaaggaggtggagcagcggagagccggcggctacagccggaagtacgccagcaaagccaagaatctggcagacgatatggtgagaaacaccgctagagatctgctgtactacgccgtgacccaggatgccatgctgatcttcgccaacctgagccggggcttcggccggcagggcaagcggaccttcatggccgagagacagtacacacggatggaggactggctgaccgccaagctggcctacgagggcctgagcaagacctacctgtccaagacactggcccagtacacctccaagacatgcagcaactgtgggtttaccatcaccagcgccgactacgacagggtgctggagaagctgaagaagacagcaacaggctggatgaccacaattaacggcaaggagctgaaggtggagggccagattacctactacaacagatacaagagacagaacgtagtcaaggacctgtccgtcgagctggatagactgagcgaagaatctgtgaacaacgacatctcctcctggacaaagggcagaagcggagaagctctgagcctcctgaagaaaagattctcccatagacccgtgcaggagaagttcgtgtgcctgaactgcggcttcgagacacacgcagccgagcaagccgccctgaacatcgccagatcctggctgttcctgcggagccaggagtacaagaaataccagacaaacaagacaaccggcaacaccgataagagagccttcgtcgagacctggcagtccttttaccggaagaagcttaaggaggtgtggaaacctgccgtgcggtctggcggatctggcggaggctccacaagcagccaggagagcctgaccttcaaggacgtggccgtggacttcacccccgaggagtggggccagctgtaccccgcccagagggacctgtacagggaggtgatgctggagaactacaggaacctggtgagcctgggccaccaggtgagcaagccccacctgatcagccagctggagcagaggaaggagccctggatgatggagaggaagatccccaggggcaacttccccgactgggagaccaggaccagccccaagaaaaagagaaaagtctaagctgccttctgcggggcttgccttctggccatgcccttcttctctcccttgcacctgtacctcttggtctttgaataaagcctgagtaggaaggctagcaaaaaaaaaaaaaaaaaaaaaaaaaaaaaaaaaaaaaaaaaaaaaaaaaaaaaaaaaaaaaaaaaaaaaaaaaaaaaaaa

SEQ ID NO: 6255 - RNA, 5797 nt, synthetic construct
  source 1..5797: mol_type = other RNA
aggaaataagagagaaaagaagagtaagaagaaatataagagccaccatggcccctaagaagaagcgtaaagtgagccggatggaacgcctcgtctacgaggtgcggcagaagtgcagaaacatcgaggacatctgcatctcctgcggatctctgaacgtgaccctggagcacccactgttcatcggcggcatgtgccagaactgtaaaaactgttttctggagtgtgcctatcaatacgacgatgacggctaccagagctactgcaccatctgttgcggcggaagagaggtgctgatgtgtggaaataacaactgctgccggtgcttctgcgtggaatgcgtggacctgctggtgggccccggcgccgcccaggccgctattaaggaagatccttggaactgctacatgtgcggccacaagggcacatacggcctgctgagacggagagaggactggcctagcagactgcagatgttcttcgccaataaccacgaccaggagttcgacccccctaaggtgtaccctcccgtccccgccgagaagagaaagcccatccgggtcctgagcctgttcgatggcatcgccaccggtctgctggtgctgaaggacctgggcatccaggtggataggtacattgcctccgaggtgtgcgaggactccatcaccgtgggaatggtgcgtcatcagggcaagatcatgtacgtgggcgacgtgcggagcgtgacacagaagcatatccaggagtggggccctttcgacctggtgatcggcggcagcccttgcaatgacctgagcatcgtgaacccagcccggaagggcctgtacgagggaaccggcagactgttcttcgagttttacagactgctgcacgacgcccggcctaaggaaggcgacgaccggcccttcttttggctgttcgagaatgtggtggccatgggagtcagcgacaagcgggatattagccggttcctggagagcaaccccgtgatgatcgatgccaaggaagtgagcgccgcccaccgggccagatacttctggggcaatctgcctggcatgaacagacccctggccagcaccgtgaacgacaagctggagctgcaggagtgcctggagcacggccggatcgccaagttcagcaaggtgagaaccatcaccacccgaagcaacagcatcaaacaaggcaaggaccagcactttcctgtgttcatgaacgagaaggaggacatcctgtggtgtaccgagatggagagagtgttcgggttcccagtccactacacagatgtcagcaacatgtctagactggccagacagagactgctgggaagaagctggtccgtccctgtgatcagacacctgttcgcccctctgaaggagtacttcgcctgcgtgagcagcggcaacagcaacgccaacagccggggccccagcttctctagcggcctggtgccactgtccctgagagggagccacatgggccccatggagatctacaaaaccgtgagcgcctggaagcggcagcctgtgcgcgtgctgagcctgtttcggaatatcgataaagtcctgaaaagcctgggattcctggagagcggctctggctccggcggtggcaccctgaagtacgtggaggatgtgacaaacgtggtcagacgggatgtggagaagtggggccccttcgatctggtgtacggcagcacccaacccctgggcagctcttgtgaccggtgccctggctggtacatgtttcagttccaccggatcctgcagtacgccctgccgagacaggagtcccagcggccattcttttggattttcatggacaacttgctgctgaccgaggatgaccaggaaactaccactcggttcctgcagaccgaagccgtgaccctgcaggacgtgagaggccgggactaccagaacgccatgcgggtgtggtccaacatccctggactgaaaagcaagcacgcacctctgacccctaaagaagaggagtacctgcaggcccaggtgcggagcagaagcaagctggacgcccctaaggtggatctgctggtgaagaattgcctcctgcccctgagagagtacttcaagtatttcagccagaatagtctgcccctgggcggcccaagcagcggcgcccctcctcccagcggcggcagcccagccggctccccaacctctaccgaggagggcacctctgagtccgccacccccgagagcggccctggcacctccaccgagcccagcgagggcagcgcacccggcagccctgccggcagccccacctccacagaggagggaaccagcaccgagcccagcgaaggcagcgccccaggcaccagcaccgagcctagtgagggcggctctggcggcggcagcgcccaggagattaaacggatcaacaagatcagaagaagacttgtgaaagacagcaacaccaagaaggccggcaagacaggccccatgaaaaccctgctggttagagtgatgacacccgatctgagagagcggctggaaaacctgagaaagaagcctgaaaatatcccccagcccatcagcaatacatctagagccaacctgaataagctgctgaccgattacaccgaaatgaagaaggcgatcctgcatgtgtactgggaagagttccagaaggaccctgtgggcctgatgagccgggtggcccagcctgccagcaagaagatcgatcagaacaagctgaaacctgagatggacgagaagggcaacctgaccaccgccggctttgcctgctctcagtgtggccagcccctgttcgtgtacaagctggagcaggtgtctgagaagggcaaggcttacaccaactacttcggacggtgcaatgtggccgagcacgaaaagctgatcctgctggcccagctgaagcccgagaaggatagcgacgaagccgtgacatatagcctgggaaagtttgggcagagggccctggatttctacagcattcatgtgaccaaggagtccacccaccccgtgaagcccctggcccagatcgccggaaacagatacgcctccggacctgtgggaaaggccctgagcgacgcatgtatgggcacaatcgcctccttcctgtctaagtaccaggacatcatcatcgaacaccagaaggtggtgaagggcaaccagaagagactggagagcctgcgggagctggccggcaaggaaaacctggaataccctagcgtgaccctgccacctcagcctcacaccaaggagggcgttgatgcctacaacgaagtgatcgcccgggtgcgaatgtgggtgaacctgaacctgtggcagaagctgaagctaagcagagatgatgccaagcctctgctgagactgaagggattcccttcctttcctctggtcgagagacaggccaacgaagtggactggtgggacatggtgtgtaacgtgaagaagctgatcaacgagaaaaaggaggatggcaaggtgttttggcagaatctggctggctacaagagacaggaagccctgagaccatacctgagcagcgaggaagatcggaagaagggaaagaaattcgctcggtaccagctgggcgacctgctgctgcacctggaaaagaagcacggcgaggactggggaaaggtgtacgacgaggcctgggagcggattgacaagaaagtggaaggcctgagcaagcacatcaagctggaagaggaacggagaagcgaggacgcccagagcaaggccgccctgaccgactggctgcgggctaaggccagcttcgtgatcgagggcctgaaggaggccgacaaggacgagttctgcagatgcgagctgaagctgcagaagtggtacggggacctgcggggaaagcccttcgccatcgaagccgagaacagcatcctggacatcagcggcttcagcaagcagtacaactgtgccttcatctggcagaaggacggcgtgaagaagctgaacctgtacctgatcatcaactacttcaagggcggcaagctgcggttcaagaagatcaaacctgaagccttcgaagccaacagattctacaccgtgatcaacaaaaagagcggcgagatcgtgcccatggaggtgaacttcaacttcgacgaccccaacctgatcatcctgcctctggcctttggcaagagacagggcagagaattcatctggaacgacctgctgtccctggaaaccggcagcctgaagctggccaacggaagagtgatcgagaagacactgtacaacagaagaacccggcaggatgagcctgccctgttcgtggccctgaccttcgagcggcgggaggtcctggactcctccaatatcaaaccaatgaacctgatcggcgtggcaagaggcgaaaacatccccgccgtgatcgccctgaccgaccccgagggctgcccactgagccggtttaaggatagcctgggaaacccaacccacatcctgagaatcggcgagagctataaggagaagcagcggaccatccaggccaagaaggaggtggagcagcggagagccggcggctacagccggaagtacgccagcaaagccaagaatctggcagacgatatggtgagaaacaccgctagagatctgctgtactacgccgtgacccaggatgccatgctgatcttcgccaacctgagccggggcttcggccggcagggcaagcggaccttcatggccgagagacagtacacacggatggaggactggctgaccgccaagctggcctacgagggcctgagcaagacctacctgtccaagacactggcccagtacacctccaagacatgcagcaactgtgggtttaccatcaccagcgccgactacgacagggtgctggagaagctgaagaagacagcaacaggctggatgaccacaattaacggcaaggagctgaaggtggagggccagattacctactacaacagatacaagagacagaacgtagtcaaggacctgtccgtcgagctggatagactgagcgaagaatctgtgaacaacgacatctcctcctggacaaagggcagaagcggagaagctctgagcctcctgaagaaaagattctcccatagacccgtgcaggagaagttcgtgtgcctgaactgcggcttcgagacacacgcagccgagcaagccgccctgaacatcgccagatcctggctgttcctgcggagccaggagtacaagaaataccagacaaacaagacaaccggcaacaccgataagagagccttcgtcgagacctggcagtccttttaccggaagaagcttaaggaggtgtggaaacctgccgtgcggtctggcggatctggcggaggctccacaagcccccagggcctggtgaccttcggcgacgtggccgtggacttcagccaggaggagtgggagtggctggactgcgcccagaggaccctgtacaggagcgtgatgctggagaactacaggagcctggtgagcctgggcctgtgcgtgagcaagcccgagatgatcagcagcctggagcagaggaaggagccctggaccgtgaagaggaagtgcaccaggggccagtgccccgacagcgaggccgtgaccagccccaagaaaaagagaaaagtctaagctgccttctgcggggcttgccttctggccatgcccttcttctctcccttgcacctgtacctcttggtctttgaataaagcctgagtaggaaggctagcaaaaaaaaaaaaaaaaaaaaaaaaaaaaaaaaaaaaaaaaaaaaaaaaaaaaaaaaaaaaaaaaaaaaaaaaaaaaaaaa

SEQ ID NO: 6256 - RNA, 5797 nt, synthetic construct
  source 1..5797: mol_type = other RNA
aggaaataagagagaaaagaagagtaagaagaaatataagagccaccatggcccctaagaagaagcgtaaagtgagccggatggaacgcctcgtctacgaggtgcggcagaagtgcagaaacatcgaggacatctgcatctcctgcggatctctgaacgtgaccctggagcacccactgttcatcggcggcatgtgccagaactgtaaaaactgttttctggagtgtgcctatcaatacgacgatgacggctaccagagctactgcaccatctgttgcggcggaagagaggtgctgatgtgtggaaataacaactgctgccggtgcttctgcgtggaatgcgtggacctgctggtgggccccggcgccgcccaggccgctattaaggaagatccttggaactgctacatgtgcggccacaagggcacatacggcctgctgagacggagagaggactggcctagcagactgcagatgttcttcgccaataaccacgaccaggagttcgacccccctaaggtgtaccctcccgtccccgccgagaagagaaagcccatccgggtcctgagcctgttcgatggcatcgccaccggtctgctggtgctgaaggacctgggcatccaggtggataggtacattgcctccgaggtgtgcgaggactccatcaccgtgggaatggtgcgtcatcagggcaagatcatgtacgtgggcgacgtgcggagcgtgacacagaagcatatccaggagtggggccctttcgacctggtgatcggcggcagcccttgcaatgacctgagcatcgtgaacccagcccggaagggcctgtacgagggaaccggcagactgttcttcgagttttacagactgctgcacgacgcccggcctaaggaaggcgacgaccggcccttcttttggctgttcgagaatgtggtggccatgggagtcagcgacaagcgggatattagccggttcctggagagcaaccccgtgatgatcgatgccaaggaagtgagcgccgcccaccgggccagatacttctggggcaatctgcctggcatgaacagacccctggccagcaccgtgaacgacaagctggagctgcaggagtgcctggagcacggccggatcgccaagttcagcaaggtgagaaccatcaccacccgaagcaacagcatcaaacaaggcaaggaccagcactttcctgtgttcatgaacgagaaggaggacatcctgtggtgtaccgagatggagagagtgttcgggttcccagtccactacacagatgtcagcaacatgtctagactggccagacagagactgctgggaagaagctggtccgtccctgtgatcagacacctgttcgcccctctgaaggagtacttcgcctgcgtgagcagcggcaacagcaacgccaacagccggggccccagcttctctagcggcctggtgccactgtccctgagagggagccacatgggccccatggagatctacaaaaccgtgagcgcctggaagcggcagcctgtgcgcgtgctgagcctgtttcggaatatcgataaagtcctgaaaagcctgggattcctggagagcggctctggctccggcggtggcaccctgaagtacgtggaggatgtgacaaacgtggtcagacgggatgtggagaagtggggccccttcgatctggtgtacggcagcacccaacccctgggcagctcttgtgaccggtgccctggctggtacatgtttcagttccaccggatcctgcagtacgccctgccgagacaggagtcccagcggccattcttttggattttcatggacaacttgctgctgaccgaggatgaccaggaaactaccactcggttcctgcagaccgaagccgtgaccctgcaggacgtgagaggccgggactaccagaacgccatgcgggtgtggtccaacatccctggactgaaaagcaagcacgcacctctgacccctaaagaagaggagtacctgcaggcccaggtgcggagcagaagcaagctggacgcccctaaggtggatctgctggtgaagaattgcctcctgcccctgagagagtacttcaagtatttcagccagaatagtctgcccctgggcggcccaagcagcggcgcccctcctcccagcggcggcagcccagccggctccccaacctctaccgaggagggcacctctgagtccgccacccccgagagcggccctggcacctccaccgagcccagcgagggcagcgcacccggcagccctgccggcagccccacctccacagaggagggaaccagcaccgagcccagcgaaggcagcgccccaggcaccagcaccgagcctagtgagggcggctctggcggcggcagcgcccaggagattaaacggatcaacaagatcagaagaagacttgtgaaagacagcaacaccaagaaggccggcaagacaggccccatgaaaaccctgctggttagagtgatgacacccgatctgagagagcggctggaaaacctgagaaagaagcctgaaaatatcccccagcccatcagcaatacatctagagccaacctgaataagctgctgaccgattacaccgaaatgaagaaggcgatcctgcatgtgtactgggaagagttccagaaggaccctgtgggcctgatgagccgggtggcccagcctgccagcaagaagatcgatcagaacaagctgaaacctgagatggacgagaagggcaacctgaccaccgccggctttgcctgctctcagtgtggccagcccctgttcgtgtacaagctggagcaggtgtctgagaagggcaaggcttacaccaactacttcggacggtgcaatgtggccgagcacgaaaagctgatcctgctggcccagctgaagcccgagaaggatagcgacgaagccgtgacatatagcctgggaaagtttgggcagagggccctggatttctacagcattcatgtgaccaaggagtccacccaccccgtgaagcccctggcccagatcgccggaaacagatacgcctccggacctgtgggaaaggccctgagcgacgcatgtatgggcacaatcgcctccttcctgtctaagtaccaggacatcatcatcgaacaccagaaggtggtgaagggcaaccagaagagactggagagcctgcgggagctggccggcaaggaaaacctggaataccctagcgtgaccctgccacctcagcctcacaccaaggagggcgttgatgcctacaacgaagtgatcgcccgggtgcgaatgtgggtgaacctgaacctgtggcagaagctgaagctaagcagagatgatgccaagcctctgctgagactgaagggattcccttcctttcctctggtcgagagacaggccaacgaagtggactggtgggacatggtgtgtaacgtgaagaagctgatcaacgagaaaaaggaggatggcaaggtgttttggcagaatctggctggctacaagagacaggaagccctgagaccatacctgagcagcgaggaagatcggaagaagggaaagaaattcgctcggtaccagctgggcgacctgctgctgcacctggaaaagaagcacggcgaggactggggaaaggtgtacgacgaggcctgggagcggattgacaagaaagtggaaggcctgagcaagcacatcaagctggaagaggaacggagaagcgaggacgcccagagcaaggccgccctgaccgactggctgcgggctaaggccagcttcgtgatcgagggcctgaaggaggccgacaaggacgagttctgcagatgcgagctgaagctgcagaagtggtacggggacctgcggggaaagcccttcgccatcgaagccgagaacagcatcctggacatcagcggcttcagcaagcagtacaactgtgccttcatctggcagaaggacggcgtgaagaagctgaacctgtacctgatcatcaactacttcaagggcggcaagctgcggttcaagaagatcaaacctgaagccttcgaagccaacagattctacaccgtgatcaacaaaaagagcggcgagatcgtgcccatggaggtgaacttcaacttcgacgaccccaacctgatcatcctgcctctggcctttggcaagagacagggcagagaattcatctggaacgacctgctgtccctggaaaccggcagcctgaagctggccaacggaagagtgatcgagaagacactgtacaacagaagaacccggcaggatgagcctgccctgttcgtggccctgaccttcgagcggcgggaggtcctggactcctccaatatcaaaccaatgaacctgatcggcgtggcaagaggcgaaaacatccccgccgtgatcgccctgaccgaccccgagggctgcccactgagccggtttaaggatagcctgggaaacccaacccacatcctgagaatcggcgagagctataaggagaagcagcggaccatccaggccaagaaggaggtggagcagcggagagccggcggctacagccggaagtacgccagcaaagccaagaatctggcagacgatatggtgagaaacaccgctagagatctgctgtactacgccgtgacccaggatgccatgctgatcttcgccaacctgagccggggcttcggccggcagggcaagcggaccttcatggccgagagacagtacacacggatggaggactggctgaccgccaagctggcctacgagggcctgagcaagacctacctgtccaagacactggcccagtacacctccaagacatgcagcaactgtgggtttaccatcaccagcgccgactacgacagggtgctggagaagctgaagaagacagcaacaggctggatgaccacaattaacggcaaggagctgaaggtggagggccagattacctactacaacagatacaagagacagaacgtagtcaaggacctgtccgtcgagctggatagactgagcgaagaatctgtgaacaacgacatctcctcctggacaaagggcagaagcggagaagctctgagcctcctgaagaaaagattctcccatagacccgtgcaggagaagttcgtgtgcctgaactgcggcttcgagacacacgcagccgagcaagccgccctgaacatcgccagatcctggctgttcctgcggagccaggagtacaagaaataccagacaaacaagacaaccggcaacaccgataagagagccttcgtcgagacctggcagtccttttaccggaagaagcttaaggaggtgtggaaacctgccgtgcggtctggcggatctggcggaggctccacaagctgcaacagctggatcagccccagcgacgtggccatcaacttcagcaaggaggagtgggagtgcctgcaccccagccagaaggacctgtacagggacgtgatgctggagaactacagcaacctggtgagcgtgggcctgagcgagagcaagcccgagctggtgacctgcctggaggagaacaaggagccctggatggtgaacatcgacgaggccgagggcctgggccagggcgtgttctgctacaccagccccaagaaaaagagaaaagtctaagctgccttctgcggggcttgccttctggccatgcccttcttctctcccttgcacctgtacctcttggtctttgaataaagcctgagtaggaaggctagcaaaaaaaaaaaaaaaaaaaaaaaaaaaaaaaaaaaaaaaaaaaaaaaaaaaaaaaaaaaaaaaaaaaaaaaaaaaaaaaa

SEQ ID NO: 6257 - RNA, 5797 nt, synthetic construct
  source 1..5797: mol_type = other RNA
aggaaataagagagaaaagaagagtaagaagaaatataagagccaccatggcccctaagaagaagcgtaaagtgagccggatggaacgcctcgtctacgaggtgcggcagaagtgcagaaacatcgaggacatctgcatctcctgcggatctctgaacgtgaccctggagcacccactgttcatcggcggcatgtgccagaactgtaaaaactgttttctggagtgtgcctatcaatacgacgatgacggctaccagagctactgcaccatctgttgcggcggaagagaggtgctgatgtgtggaaataacaactgctgccggtgcttctgcgtggaatgcgtggacctgctggtgggccccggcgccgcccaggccgctattaaggaagatccttggaactgctacatgtgcggccacaagggcacatacggcctgctgagacggagagaggactggcctagcagactgcagatgttcttcgccaataaccacgaccaggagttcgacccccctaaggtgtaccctcccgtccccgccgagaagagaaagcccatccgggtcctgagcctgttcgatggcatcgccaccggtctgctggtgctgaaggacctgggcatccaggtggataggtacattgcctccgaggtgtgcgaggactccatcaccgtgggaatggtgcgtcatcagggcaagatcatgtacgtgggcgacgtgcggagcgtgacacagaagcatatccaggagtggggccctttcgacctggtgatcggcggcagcccttgcaatgacctgagcatcgtgaacccagcccggaagggcctgtacgagggaaccggcagactgttcttcgagttttacagactgctgcacgacgcccggcctaaggaaggcgacgaccggcccttcttttggctgttcgagaatgtggtggccatgggagtcagcgacaagcgggatattagccggttcctggagagcaaccccgtgatgatcgatgccaaggaagtgagcgccgcccaccgggccagatacttctggggcaatctgcctggcatgaacagacccctggccagcaccgtgaacgacaagctggagctgcaggagtgcctggagcacggccggatcgccaagttcagcaaggtgagaaccatcaccacccgaagcaacagcatcaaacaaggcaaggaccagcactttcctgtgttcatgaacgagaaggaggacatcctgtggtgtaccgagatggagagagtgttcgggttcccagtccactacacagatgtcagcaacatgtctagactggccagacagagactgctgggaagaagctggtccgtccctgtgatcagacacctgttcgcccctctgaaggagtacttcgcctgcgtgagcagcggcaacagcaacgccaacagccggggccccagcttctctagcggcctggtgccactgtccctgagagggagccacatgggccccatggagatctacaaaaccgtgagcgcctggaagcggcagcctgtgcgcgtgctgagcctgtttcggaatatcgataaagtcctgaaaagcctgggattcctggagagcggctctggctccggcggtggcaccctgaagtacgtggaggatgtgacaaacgtggtcagacgggatgtggagaagtggggccccttcgatctggtgtacggcagcacccaacccctgggcagctcttgtgaccggtgccctggctggtacatgtttcagttccaccggatcctgcagtacgccctgccgagacaggagtcccagcggccattcttttggattttcatggacaacttgctgctgaccgaggatgaccaggaaactaccactcggttcctgcagaccgaagccgtgaccctgcaggacgtgagaggccgggactaccagaacgccatgcgggtgtggtccaacatccctggactgaaaagcaagcacgcacctctgacccctaaagaagaggagtacctgcaggcccaggtgcggagcagaagcaagctggacgcccctaaggtggatctgctggtgaagaattgcctcctgcccctgagagagtacttcaagtatttcagccagaatagtctgcccctgggcggcccaagcagcggcgcccctcctcccagcggcggcagcccagccggctccccaacctctaccgaggagggcacctctgagtccgccacccccgagagcggccctggcacctccaccgagcccagcgagggcagcgcacccggcagccctgccggcagccccacctccacagaggagggaaccagcaccgagcccagcgaaggcagcgccccaggcaccagcaccgagcctagtgagggcggctctggcggcggcagcgcccaggagattaaacggatcaacaagatcagaagaagacttgtgaaagacagcaacaccaagaaggccggcaagacaggccccatgaaaaccctgctggttagagtgatgacacccgatctgagagagcggctggaaaacctgagaaagaagcctgaaaatatcccccagcccatcagcaatacatctagagccaacctgaataagctgctgaccgattacaccgaaatgaagaaggcgatcctgcatgtgtactgggaagagttccagaaggaccctgtgggcctgatgagccgggtggcccagcctgccagcaagaagatcgatcagaacaagctgaaacctgagatggacgagaagggcaacctgaccaccgccggctttgcctgctctcagtgtggccagcccctgttcgtgtacaagctggagcaggtgtctgagaagggcaaggcttacaccaactacttcggacggtgcaatgtggccgagcacgaaaagctgatcctgctggcccagctgaagcccgagaaggatagcgacgaagccgtgacatatagcctgggaaagtttgggcagagggccctggatttctacagcattcatgtgaccaaggagtccacccaccccgtgaagcccctggcccagatcgccggaaacagatacgcctccggacctgtgggaaaggccctgagcgacgcatgtatgggcacaatcgcctccttcctgtctaagtaccaggacatcatcatcgaacaccagaaggtggtgaagggcaaccagaagagactggagagcctgcgggagctggccggcaaggaaaacctggaataccctagcgtgaccctgccacctcagcctcacaccaaggagggcgttgatgcctacaacgaagtgatcgcccgggtgcgaatgtgggtgaacctgaacctgtggcagaagctgaagctaagcagagatgatgccaagcctctgctgagactgaagggattcccttcctttcctctggtcgagagacaggccaacgaagtggactggtgggacatggtgtgtaacgtgaagaagctgatcaacgagaaaaaggaggatggcaaggtgttttggcagaatctggctggctacaagagacaggaagccctgagaccatacctgagcagcgaggaagatcggaagaagggaaagaaattcgctcggtaccagctgggcgacctgctgctgcacctggaaaagaagcacggcgaggactggggaaaggtgtacgacgaggcctgggagcggattgacaagaaagtggaaggcctgagcaagcacatcaagctggaagaggaacggagaagcgaggacgcccagagcaaggccgccctgaccgactggctgcgggctaaggccagcttcgtgatcgagggcctgaaggaggccgacaaggacgagttctgcagatgcgagctgaagctgcagaagtggtacggggacctgcggggaaagcccttcgccatcgaagccgagaacagcatcctggacatcagcggcttcagcaagcagtacaactgtgccttcatctggcagaaggacggcgtgaagaagctgaacctgtacctgatcatcaactacttcaagggcggcaagctgcggttcaagaagatcaaacctgaagccttcgaagccaacagattctacaccgtgatcaacaaaaagagcggcgagatcgtgcccatggaggtgaacttcaacttcgacgaccccaacctgatcatcctgcctctggcctttggcaagagacagggcagagaattcatctggaacgacctgctgtccctggaaaccggcagcctgaagctggccaacggaagagtgatcgagaagacactgtacaacagaagaacccggcaggatgagcctgccctgttcgtggccctgaccttcgagcggcgggaggtcctggactcctccaatatcaaaccaatgaacctgatcggcgtggcaagaggcgaaaacatccccgccgtgatcgccctgaccgaccccgagggctgcccactgagccggtttaaggatagcctgggaaacccaacccacatcctgagaatcggcgagagctataaggagaagcagcggaccatccaggccaagaaggaggtggagcagcggagagccggcggctacagccggaagtacgccagcaaagccaagaatctggcagacgatatggtgagaaacaccgctagagatctgctgtactacgccgtgacccaggatgccatgctgatcttcgccaacctgagccggggcttcggccggcagggcaagcggaccttcatggccgagagacagtacacacggatggaggactggctgaccgccaagctggcctacgagggcctgagcaagacctacctgtccaagacactggcccagtacacctccaagacatgcagcaactgtgggtttaccatcaccagcgccgactacgacagggtgctggagaagctgaagaagacagcaacaggctggatgaccacaattaacggcaaggagctgaaggtggagggccagattacctactacaacagatacaagagacagaacgtagtcaaggacctgtccgtcgagctggatagactgagcgaagaatctgtgaacaacgacatctcctcctggacaaagggcagaagcggagaagctctgagcctcctgaagaaaagattctcccatagacccgtgcaggagaagttcgtgtgcctgaactgcggcttcgagacacacgcagccgagcaagccgccctgaacatcgccagatcctggctgttcctgcggagccaggagtacaagaaataccagacaaacaagacaaccggcaacaccgataagagagccttcgtcgagacctggcagtccttttaccggaagaagcttaaggaggtgtggaaacctgccgtgcggtctggcggatctggcggaggctccacaagcgcccacgagagcctggccttcagggacgtggccatcgacctgagccaggaggagtgggagtgcctggacaccgcccagagggacctgtacagggaggtgatgctggagaactacagcaacctgatcagcctgggctgcatcatccccaagcccgacgtgatcgtgctgctggagcaggagaaggacccctggctggagaccagggaggagaccaggaggaggagcagcgacttcaccaagaagaccagccccaagaaaaagagaaaagtctaagctgccttctgcggggcttgccttctggccatgcccttcttctctcccttgcacctgtacctcttggtctttgaataaagcctgagtaggaaggctagcaaaaaaaaaaaaaaaaaaaaaaaaaaaaaaaaaaaaaaaaaaaaaaaaaaaaaaaaaaaaaaaaaaaaaaaaaaaaaaaa

SEQ ID NO: 6258 - RNA, 5797 nt, synthetic construct
  source 1..5797: mol_type = other RNA
aggaaataagagagaaaagaagagtaagaagaaatataagagccaccatggcccctaagaagaagcgtaaagtgagccggatggaacgcctcgtctacgaggtgcggcagaagtgcagaaacatcgaggacatctgcatctcctgcggatctctgaacgtgaccctggagcacccactgttcatcggcggcatgtgccagaactgtaaaaactgttttctggagtgtgcctatcaatacgacgatgacggctaccagagctactgcaccatctgttgcggcggaagagaggtgctgatgtgtggaaataacaactgctgccggtgcttctgcgtggaatgcgtggacctgctggtgggccccggcgccgcccaggccgctattaaggaagatccttggaactgctacatgtgcggccacaagggcacatacggcctgctgagacggagagaggactggcctagcagactgcagatgttcttcgccaataaccacgaccaggagttcgacccccctaaggtgtaccctcccgtccccgccgagaagagaaagcccatccgggtcctgagcctgttcgatggcatcgccaccggtctgctggtgctgaaggacctgggcatccaggtggataggtacattgcctccgaggtgtgcgaggactccatcaccgtgggaatggtgcgtcatcagggcaagatcatgtacgtgggcgacgtgcggagcgtgacacagaagcatatccaggagtggggccctttcgacctggtgatcggcggcagcccttgcaatgacctgagcatcgtgaacccagcccggaagggcctgtacgagggaaccggcagactgttcttcgagttttacagactgctgcacgacgcccggcctaaggaaggcgacgaccggcccttcttttggctgttcgagaatgtggtggccatgggagtcagcgacaagcgggatattagccggttcctggagagcaaccccgtgatgatcgatgccaaggaagtgagcgccgcccaccgggccagatacttctggggcaatctgcctggcatgaacagacccctggccagcaccgtgaacgacaagctggagctgcaggagtgcctggagcacggccggatcgccaagttcagcaaggtgagaaccatcaccacccgaagcaacagcatcaaacaaggcaaggaccagcactttcctgtgttcatgaacgagaaggaggacatcctgtggtgtaccgagatggagagagtgttcgggttcccagtccactacacagatgtcagcaacatgtctagactggccagacagagactgctgggaagaagctggtccgtccctgtgatcagacacctgttcgcccctctgaaggagtacttcgcctgcgtgagcagcggcaacagcaacgccaacagccggggccccagcttctctagcggcctggtgccactgtccctgagagggagccacatgggccccatggagatctacaaaaccgtgagcgcctggaagcggcagcctgtgcgcgtgctgagcctgtttcggaatatcgataaagtcctgaaaagcctgggattcctggagagcggctctggctccggcggtggcaccctgaagtacgtggaggatgtgacaaacgtggtcagacgggatgtggagaagtggggccccttcgatctggtgtacggcagcacccaacccctgggcagctcttgtgaccggtgccctggctggtacatgtttcagttccaccggatcctgcagtacgccctgccgagacaggagtcccagcggccattcttttggattttcatggacaacttgctgctgaccgaggatgaccaggaaactaccactcggttcctgcagaccgaagccgtgaccctgcaggacgtgagaggccgggactaccagaacgccatgcgggtgtggtccaacatccctggactgaaaagcaagcacgcacctctgacccctaaagaagaggagtacctgcaggcccaggtgcggagcagaagcaagctggacgcccctaaggtggatctgctggtgaagaattgcctcctgcccctgagagagtacttcaagtatttcagccagaatagtctgcccctgggcggcccaagcagcggcgcccctcctcccagcggcggcagcccagccggctccccaacctctaccgaggagggcacctctgagtccgccacccccgagagcggccctggcacctccaccgagcccagcgagggcagcgcacccggcagccctgccggcagccccacctccacagaggagggaaccagcaccgagcccagcgaaggcagcgccccaggcaccagcaccgagcctagtgagggcggctctggcggcggcagcgcccaggagattaaacggatcaacaagatcagaagaagacttgtgaaagacagcaacaccaagaaggccggcaagacaggccccatgaaaaccctgctggttagagtgatgacacccgatctgagagagcggctggaaaacctgagaaagaagcctgaaaatatcccccagcccatcagcaatacatctagagccaacctgaataagctgctgaccgattacaccgaaatgaagaaggcgatcctgcatgtgtactgggaagagttccagaaggaccctgtgggcctgatgagccgggtggcccagcctgccagcaagaagatcgatcagaacaagctgaaacctgagatggacgagaagggcaacctgaccaccgccggctttgcctgctctcagtgtggccagcccctgttcgtgtacaagctggagcaggtgtctgagaagggcaaggcttacaccaactacttcggacggtgcaatgtggccgagcacgaaaagctgatcctgctggcccagctgaagcccgagaaggatagcgacgaagccgtgacatatagcctgggaaagtttgggcagagggccctggatttctacagcattcatgtgaccaaggagtccacccaccccgtgaagcccctggcccagatcgccggaaacagatacgcctccggacctgtgggaaaggccctgagcgacgcatgtatgggcacaatcgcctccttcctgtctaagtaccaggacatcatcatcgaacaccagaaggtggtgaagggcaaccagaagagactggagagcctgcgggagctggccggcaaggaaaacctggaataccctagcgtgaccctgccacctcagcctcacaccaaggagggcgttgatgcctacaacgaagtgatcgcccgggtgcgaatgtgggtgaacctgaacctgtggcagaagctgaagctaagcagagatgatgccaagcctctgctgagactgaagggattcccttcctttcctctggtcgagagacaggccaacgaagtggactggtgggacatggtgtgtaacgtgaagaagctgatcaacgagaaaaaggaggatggcaaggtgttttggcagaatctggctggctacaagagacaggaagccctgagaccatacctgagcagcgaggaagatcggaagaagggaaagaaattcgctcggtaccagctgggcgacctgctgctgcacctggaaaagaagcacggcgaggactggggaaaggtgtacgacgaggcctgggagcggattgacaagaaagtggaaggcctgagcaagcacatcaagctggaagaggaacggagaagcgaggacgcccagagcaaggccgccctgaccgactggctgcgggctaaggccagcttcgtgatcgagggcctgaaggaggccgacaaggacgagttctgcagatgcgagctgaagctgcagaagtggtacggggacctgcggggaaagcccttcgccatcgaagccgagaacagcatcctggacatcagcggcttcagcaagcagtacaactgtgccttcatctggcagaaggacggcgtgaagaagctgaacctgtacctgatcatcaactacttcaagggcggcaagctgcggttcaagaagatcaaacctgaagccttcgaagccaacagattctacaccgtgatcaacaaaaagagcggcgagatcgtgcccatggaggtgaacttcaacttcgacgaccccaacctgatcatcctgcctctggcctttggcaagagacagggcagagaattcatctggaacgacctgctgtccctggaaaccggcagcctgaagctggccaacggaagagtgatcgagaagacactgtacaacagaagaacccggcaggatgagcctgccctgttcgtggccctgaccttcgagcggcgggaggtcctggactcctccaatatcaaaccaatgaacctgatcggcgtggcaagaggcgaaaacatccccgccgtgatcgccctgaccgaccccgagggctgcccactgagccggtttaaggatagcctgggaaacccaacccacatcctgagaatcggcgagagctataaggagaagcagcggaccatccaggccaagaaggaggtggagcagcggagagccggcggctacagccggaagtacgccagcaaagccaagaatctggcagacgatatggtgagaaacaccgctagagatctgctgtactacgccgtgacccaggatgccatgctgatcttcgccaacctgagccggggcttcggccggcagggcaagcggaccttcatggccgagagacagtacacacggatggaggactggctgaccgccaagctggcctacgagggcctgagcaagacctacctgtccaagacactggcccagtacacctccaagacatgcagcaactgtgggtttaccatcaccagcgccgactacgacagggtgctggagaagctgaagaagacagcaacaggctggatgaccacaattaacggcaaggagctgaaggtggagggccagattacctactacaacagatacaagagacagaacgtagtcaaggacctgtccgtcgagctggatagactgagcgaagaatctgtgaacaacgacatctcctcctggacaaagggcagaagcggagaagctctgagcctcctgaagaaaagattctcccatagacccgtgcaggagaagttcgtgtgcctgaactgcggcttcgagacacacgcagccgagcaagccgccctgaacatcgccagatcctggctgttcctgcggagccaggagtacaagaaataccagacaaacaagacaaccggcaacaccgataagagagccttcgtcgagacctggcagtccttttaccggaagaagcttaaggaggtgtggaaacctgccgtgcggtctggcggatctggcggaggctccacaagcaggcccggcgccgtgagcttcgccgacgtggccgtgtacttcagccccgaggagtggggctgcctgaggcccgcccagagggccctgtacagggaggtgatgagggagacctacggccacctgggcgccctgggcttccccggccccaagcccgccctgatcagctggatggagcaggagagcgaggcctggagccccgacgcccaggaccccgaggagggcgagagcctgggcggcgccctgaccagccccaagaaaaagagaaaagtctaagctgccttctgcggggcttgccttctggccatgcccttcttctctcccttgcacctgtacctcttggtctttgaataaagcctgagtaggaaggctagcaaaaaaaaaaaaaaaaaaaaaaaaaaaaaaaaaaaaaaaaaaaaaaaaaaaaaaaaaaaaaaaaaaaaaaaaaaaaaaaa

SEQ ID NO: 6259 - RNA, 5797 nt, synthetic construct
  source 1..5797: mol_type = other RNA
aggaaataagagagaaaagaagagtaagaagaaatataagagccaccatggcccctaagaagaagcgtaaagtgagccggatggaacgcctcgtctacgaggtgcggcagaagtgcagaaacatcgaggacatctgcatctcctgcggatctctgaacgtgaccctggagcacccactgttcatcggcggcatgtgccagaactgtaaaaactgttttctggagtgtgcctatcaatacgacgatgacggctaccagagctactgcaccatctgttgcggcggaagagaggtgctgatgtgtggaaataacaactgctgccggtgcttctgcgtggaatgcgtggacctgctggtgggccccggcgccgcccaggccgctattaaggaagatccttggaactgctacatgtgcggccacaagggcacatacggcctgctgagacggagagaggactggcctagcagactgcagatgttcttcgccaataaccacgaccaggagttcgacccccctaaggtgtaccctcccgtccccgccgagaagagaaagcccatccgggtcctgagcctgttcgatggcatcgccaccggtctgctggtgctgaaggacctgggcatccaggtggataggtacattgcctccgaggtgtgcgaggactccatcaccgtgggaatggtgcgtcatcagggcaagatcatgtacgtgggcgacgtgcggagcgtgacacagaagcatatccaggagtggggccctttcgacctggtgatcggcggcagcccttgcaatgacctgagcatcgtgaacccagcccggaagggcctgtacgagggaaccggcagactgttcttcgagttttacagactgctgcacgacgcccggcctaaggaaggcgacgaccggcccttcttttggctgttcgagaatgtggtggccatgggagtcagcgacaagcgggatattagccggttcctggagagcaaccccgtgatgatcgatgccaaggaagtgagcgccgcccaccgggccagatacttctggggcaatctgcctggcatgaacagacccctggccagcaccgtgaacgacaagctggagctgcaggagtgcctggagcacggccggatcgccaagttcagcaaggtgagaaccatcaccacccgaagcaacagcatcaaacaaggcaaggaccagcactttcctgtgttcatgaacgagaaggaggacatcctgtggtgtaccgagatggagagagtgttcgggttcccagtccactacacagatgtcagcaacatgtctagactggccagacagagactgctgggaagaagctggtccgtccctgtgatcagacacctgttcgcccctctgaaggagtacttcgcctgcgtgagcagcggcaacagcaacgccaacagccggggccccagcttctctagcggcctggtgccactgtccctgagagggagccacatgggccccatggagatctacaaaaccgtgagcgcctggaagcggcagcctgtgcgcgtgctgagcctgtttcggaatatcgataaagtcctgaaaagcctgggattcctggagagcggctctggctccggcggtggcaccctgaagtacgtggaggatgtgacaaacgtggtcagacgggatgtggagaagtggggccccttcgatctggtgtacggcagcacccaacccctgggcagctcttgtgaccggtgccctggctggtacatgtttcagttccaccggatcctgcagtacgccctgccgagacaggagtcccagcggccattcttttggattttcatggacaacttgctgctgaccgaggatgaccaggaaactaccactcggttcctgcagaccgaagccgtgaccctgcaggacgtgagaggccgggactaccagaacgccatgcgggtgtggtccaacatccctggactgaaaagcaagcacgcacctctgacccctaaagaagaggagtacctgcaggcccaggtgcggagcagaagcaagctggacgcccctaaggtggatctgctggtgaagaattgcctcctgcccctgagagagtacttcaagtatttcagccagaatagtctgcccctgggcggcccaagcagcggcgcccctcctcccagcggcggcagcccagccggctccccaacctctaccgaggagggcacctctgagtccgccacccccgagagcggccctggcacctccaccgagcccagcgagggcagcgcacccggcagccctgccggcagccccacctccacagaggagggaaccagcaccgagcccagcgaaggcagcgccccaggcaccagcaccgagcctagtgagggcggctctggcggcggcagcgcccaggagattaaacggatcaacaagatcagaagaagacttgtgaaagacagcaacaccaagaaggccggcaagacaggccccatgaaaaccctgctggttagagtgatgacacccgatctgagagagcggctggaaaacctgagaaagaagcctgaaaatatcccccagcccatcagcaatacatctagagccaacctgaataagctgctgaccgattacaccgaaatgaagaaggcgatcctgcatgtgtactgggaagagttccagaaggaccctgtgggcctgatgagccgggtggcccagcctgccagcaagaagatcgatcagaacaagctgaaacctgagatggacgagaagggcaacctgaccaccgccggctttgcctgctctcagtgtggccagcccctgttcgtgtacaagctggagcaggtgtctgagaagggcaaggcttacaccaactacttcggacggtgcaatgtggccgagcacgaaaagctgatcctgctggcccagctgaagcccgagaaggatagcgacgaagccgtgacatatagcctgggaaagtttgggcagagggccctggatttctacagcattcatgtgaccaaggagtccacccaccccgtgaagcccctggcccagatcgccggaaacagatacgcctccggacctgtgggaaaggccctgagcgacgcatgtatgggcacaatcgcctccttcctgtctaagtaccaggacatcatcatcgaacaccagaaggtggtgaagggcaaccagaagagactggagagcctgcgggagctggccggcaaggaaaacctggaataccctagcgtgaccctgccacctcagcctcacaccaaggagggcgttgatgcctacaacgaagtgatcgcccgggtgcgaatgtgggtgaacctgaacctgtggcagaagctgaagctaagcagagatgatgccaagcctctgctgagactgaagggattcccttcctttcctctggtcgagagacaggccaacgaagtggactggtgggacatggtgtgtaacgtgaagaagctgatcaacgagaaaaaggaggatggcaaggtgttttggcagaatctggctggctacaagagacaggaagccctgagaccatacctgagcagcgaggaagatcggaagaagggaaagaaattcgctcggtaccagctgggcgacctgctgctgcacctggaaaagaagcacggcgaggactggggaaaggtgtacgacgaggcctgggagcggattgacaagaaagtggaaggcctgagcaagcacatcaagctggaagaggaacggagaagcgaggacgcccagagcaaggccgccctgaccgactggctgcgggctaaggccagcttcgtgatcgagggcctgaaggaggccgacaaggacgagttctgcagatgcgagctgaagctgcagaagtggtacggggacctgcggggaaagcccttcgccatcgaagccgagaacagcatcctggacatcagcggcttcagcaagcagtacaactgtgccttcatctggcagaaggacggcgtgaagaagctgaacctgtacctgatcatcaactacttcaagggcggcaagctgcggttcaagaagatcaaacctgaagccttcgaagccaacagattctacaccgtgatcaacaaaaagagcggcgagatcgtgcccatggaggtgaacttcaacttcgacgaccccaacctgatcatcctgcctctggcctttggcaagagacagggcagagaattcatctggaacgacctgctgtccctggaaaccggcagcctgaagctggccaacggaagagtgatcgagaagacactgtacaacagaagaacccggcaggatgagcctgccctgttcgtggccctgaccttcgagcggcgggaggtcctggactcctccaatatcaaaccaatgaacctgatcggcgtggcaagaggcgaaaacatccccgccgtgatcgccctgaccgaccccgagggctgcccactgagccggtttaaggatagcctgggaaacccaacccacatcctgagaatcggcgagagctataaggagaagcagcggaccatccaggccaagaaggaggtggagcagcggagagccggcggctacagccggaagtacgccagcaaagccaagaatctggcagacgatatggtgagaaacaccgctagagatctgctgtactacgccgtgacccaggatgccatgctgatcttcgccaacctgagccggggcttcggccggcagggcaagcggaccttcatggccgagagacagtacacacggatggaggactggctgaccgccaagctggcctacgagggcctgagcaagacctacctgtccaagacactggcccagtacacctccaagacatgcagcaactgtgggtttaccatcaccagcgccgactacgacagggtgctggagaagctgaagaagacagcaacaggctggatgaccacaattaacggcaaggagctgaaggtggagggccagattacctactacaacagatacaagagacagaacgtagtcaaggacctgtccgtcgagctggatagactgagcgaagaatctgtgaacaacgacatctcctcctggacaaagggcagaagcggagaagctctgagcctcctgaagaaaagattctcccatagacccgtgcaggagaagttcgtgtgcctgaactgcggcttcgagacacacgcagccgagcaagccgccctgaacatcgccagatcctggctgttcctgcggagccaggagtacaagaaataccagacaaacaagacaaccggcaacaccgataagagagccttcgtcgagacctggcagtccttttaccggaagaagcttaaggaggtgtggaaacctgccgtgcggtctggcggatctggcggaggctccacaagcttccagggcagcgtgaccttccaggacgtggccgtggtgttcacccccgaggagtggggccacctggagcccagccagaaggagctgtacagggaggtgatgctggagaacttcaggaacctggtgtgcctgggcctggtggtgtacaagcccagcgtgatctaccagctggagaggggcggcgccccctggaagcccggcggcggcggcaggaggagcggcagcagcgactgggagaccctgaccagccccaagaaaaagagaaaagtctaagctgccttctgcggggcttgccttctggccatgcccttcttctctcccttgcacctgtacctcttggtctttgaataaagcctgagtaggaaggctagcaaaaaaaaaaaaaaaaaaaaaaaaaaaaaaaaaaaaaaaaaaaaaaaaaaaaaaaaaaaaaaaaaaaaaaaaaaaaaaaa

SEQ ID NO: 6260 - RNA, 5797 nt, synthetic construct
  source 1..5797: mol_type = other RNA
aggaaataagagagaaaagaagagtaagaagaaatataagagccaccatggcccctaagaagaagcgtaaagtgagccggatggaacgcctcgtctacgaggtgcggcagaagtgcagaaacatcgaggacatctgcatctcctgcggatctctgaacgtgaccctggagcacccactgttcatcggcggcatgtgccagaactgtaaaaactgttttctggagtgtgcctatcaatacgacgatgacggctaccagagctactgcaccatctgttgcggcggaagagaggtgctgatgtgtggaaataacaactgctgccggtgcttctgcgtggaatgcgtggacctgctggtgggccccggcgccgcccaggccgctattaaggaagatccttggaactgctacatgtgcggccacaagggcacatacggcctgctgagacggagagaggactggcctagcagactgcagatgttcttcgccaataaccacgaccaggagttcgacccccctaaggtgtaccctcccgtccccgccgagaagagaaagcccatccgggtcctgagcctgttcgatggcatcgccaccggtctgctggtgctgaaggacctgggcatccaggtggataggtacattgcctccgaggtgtgcgaggactccatcaccgtgggaatggtgcgtcatcagggcaagatcatgtacgtgggcgacgtgcggagcgtgacacagaagcatatccaggagtggggccctttcgacctggtgatcggcggcagcccttgcaatgacctgagcatcgtgaacccagcccggaagggcctgtacgagggaaccggcagactgttcttcgagttttacagactgctgcacgacgcccggcctaaggaaggcgacgaccggcccttcttttggctgttcgagaatgtggtggccatgggagtcagcgacaagcgggatattagccggttcctggagagcaaccccgtgatgatcgatgccaaggaagtgagcgccgcccaccgggccagatacttctggggcaatctgcctggcatgaacagacccctggccagcaccgtgaacgacaagctggagctgcaggagtgcctggagcacggccggatcgccaagttcagcaaggtgagaaccatcaccacccgaagcaacagcatcaaacaaggcaaggaccagcactttcctgtgttcatgaacgagaaggaggacatcctgtggtgtaccgagatggagagagtgttcgggttcccagtccactacacagatgtcagcaacatgtctagactggccagacagagactgctgggaagaagctggtccgtccctgtgatcagacacctgttcgcccctctgaaggagtacttcgcctgcgtgagcagcggcaacagcaacgccaacagccggggccccagcttctctagcggcctggtgccactgtccctgagagggagccacatgggccccatggagatctacaaaaccgtgagcgcctggaagcggcagcctgtgcgcgtgctgagcctgtttcggaatatcgataaagtcctgaaaagcctgggattcctggagagcggctctggctccggcggtggcaccctgaagtacgtggaggatgtgacaaacgtggtcagacgggatgtggagaagtggggccccttcgatctggtgtacggcagcacccaacccctgggcagctcttgtgaccggtgccctggctggtacatgtttcagttccaccggatcctgcagtacgccctgccgagacaggagtcccagcggccattcttttggattttcatggacaacttgctgctgaccgaggatgaccaggaaactaccactcggttcctgcagaccgaagccgtgaccctgcaggacgtgagaggccgggactaccagaacgccatgcgggtgtggtccaacatccctggactgaaaagcaagcacgcacctctgacccctaaagaagaggagtacctgcaggcccaggtgcggagcagaagcaagctggacgcccctaaggtggatctgctggtgaagaattgcctcctgcccctgagagagtacttcaagtatttcagccagaatagtctgcccctgggcggcccaagcagcggcgcccctcctcccagcggcggcagcccagccggctccccaacctctaccgaggagggcacctctgagtccgccacccccgagagcggccctggcacctccaccgagcccagcgagggcagcgcacccggcagccctgccggcagccccacctccacagaggagggaaccagcaccgagcccagcgaaggcagcgccccaggcaccagcaccgagcctagtgagggcggctctggcggcggcagcgcccaggagattaaacggatcaacaagatcagaagaagacttgtgaaagacagcaacaccaagaaggccggcaagacaggccccatgaaaaccctgctggttagagtgatgacacccgatctgagagagcggctggaaaacctgagaaagaagcctgaaaatatcccccagcccatcagcaatacatctagagccaacctgaataagctgctgaccgattacaccgaaatgaagaaggcgatcctgcatgtgtactgggaagagttccagaaggaccctgtgggcctgatgagccgggtggcccagcctgccagcaagaagatcgatcagaacaagctgaaacctgagatggacgagaagggcaacctgaccaccgccggctttgcctgctctcagtgtggccagcccctgttcgtgtacaagctggagcaggtgtctgagaagggcaaggcttacaccaactacttcggacggtgcaatgtggccgagcacgaaaagctgatcctgctggcccagctgaagcccgagaaggatagcgacgaagccgtgacatatagcctgggaaagtttgggcagagggccctggatttctacagcattcatgtgaccaaggagtccacccaccccgtgaagcccctggcccagatcgccggaaacagatacgcctccggacctgtgggaaaggccctgagcgacgcatgtatgggcacaatcgcctccttcctgtctaagtaccaggacatcatcatcgaacaccagaaggtggtgaagggcaaccagaagagactggagagcctgcgggagctggccggcaaggaaaacctggaataccctagcgtgaccctgccacctcagcctcacaccaaggagggcgttgatgcctacaacgaagtgatcgcccgggtgcgaatgtgggtgaacctgaacctgtggcagaagctgaagctaagcagagatgatgccaagcctctgctgagactgaagggattcccttcctttcctctggtcgagagacaggccaacgaagtggactggtgggacatggtgtgtaacgtgaagaagctgatcaacgagaaaaaggaggatggcaaggtgttttggcagaatctggctggctacaagagacaggaagccctgagaccatacctgagcagcgaggaagatcggaagaagggaaagaaattcgctcggtaccagctgggcgacctgctgctgcacctggaaaagaagcacggcgaggactggggaaaggtgtacgacgaggcctgggagcggattgacaagaaagtggaaggcctgagcaagcacatcaagctggaagaggaacggagaagcgaggacgcccagagcaaggccgccctgaccgactggctgcgggctaaggccagcttcgtgatcgagggcctgaaggaggccgacaaggacgagttctgcagatgcgagctgaagctgcagaagtggtacggggacctgcggggaaagcccttcgccatcgaagccgagaacagcatcctggacatcagcggcttcagcaagcagtacaactgtgccttcatctggcagaaggacggcgtgaagaagctgaacctgtacctgatcatcaactacttcaagggcggcaagctgcggttcaagaagatcaaacctgaagccttcgaagccaacagattctacaccgtgatcaacaaaaagagcggcgagatcgtgcccatggaggtgaacttcaacttcgacgaccccaacctgatcatcctgcctctggcctttggcaagagacagggcagagaattcatctggaacgacctgctgtccctggaaaccggcagcctgaagctggccaacggaagagtgatcgagaagacactgtacaacagaagaacccggcaggatgagcctgccctgttcgtggccctgaccttcgagcggcgggaggtcctggactcctccaatatcaaaccaatgaacctgatcggcgtggcaagaggcgaaaacatccccgccgtgatcgccctgaccgaccccgagggctgcccactgagccggtttaaggatagcctgggaaacccaacccacatcctgagaatcggcgagagctataaggagaagcagcggaccatccaggccaagaaggaggtggagcagcggagagccggcggctacagccggaagtacgccagcaaagccaagaatctggcagacgatatggtgagaaacaccgctagagatctgctgtactacgccgtgacccaggatgccatgctgatcttcgccaacctgagccggggcttcggccggcagggcaagcggaccttcatggccgagagacagtacacacggatggaggactggctgaccgccaagctggcctacgagggcctgagcaagacctacctgtccaagacactggcccagtacacctccaagacatgcagcaactgtgggtttaccatcaccagcgccgactacgacagggtgctggagaagctgaagaagacagcaacaggctggatgaccacaattaacggcaaggagctgaaggtggagggccagattacctactacaacagatacaagagacagaacgtagtcaaggacctgtccgtcgagctggatagactgagcgaagaatctgtgaacaacgacatctcctcctggacaaagggcagaagcggagaagctctgagcctcctgaagaaaagattctcccatagacccgtgcaggagaagttcgtgtgcctgaactgcggcttcgagacacacgcagccgagcaagccgccctgaacatcgccagatcctggctgttcctgcggagccaggagtacaagaaataccagacaaacaagacaaccggcaacaccgataagagagccttcgtcgagacctggcagtccttttaccggaagaagcttaaggaggtgtggaaacctgccgtgcggtctggcggatctggcggaggctccacaagcagcctgggcagcgacctgttcagggacgtggccgtggtgttcagccaggaggagtgggagcagctggcccccgcccagagggacctgtacagggacgtgatgctggagatctacagcaacctggtgagcctgggcttcgccatcagcaagcccgacgtgatcagcttcctggagcagggcagggagccctggatggtggagaaggtggtgaccggcggccagtgccccgtgctggagagcaggaccagccccaagaaaaagagaaaagtctaagctgccttctgcggggcttgccttctggccatgcccttcttctctcccttgcacctgtacctcttggtctttgaataaagcctgagtaggaaggctagcaaaaaaaaaaaaaaaaaaaaaaaaaaaaaaaaaaaaaaaaaaaaaaaaaaaaaaaaaaaaaaaaaaaaaaaaaaaaaaaa

SEQ ID NO: 6261 - RNA, 5797 nt, synthetic construct
  source 1..5797: mol_type = other RNA
aggaaataagagagaaaagaagagtaagaagaaatataagagccaccatggcccctaagaagaagcgtaaagtgagccggatggaacgcctcgtctacgaggtgcggcagaagtgcagaaacatcgaggacatctgcatctcctgcggatctctgaacgtgaccctggagcacccactgttcatcggcggcatgtgccagaactgtaaaaactgttttctggagtgtgcctatcaatacgacgatgacggctaccagagctactgcaccatctgttgcggcggaagagaggtgctgatgtgtggaaataacaactgctgccggtgcttctgcgtggaatgcgtggacctgctggtgggccccggcgccgcccaggccgctattaaggaagatccttggaactgctacatgtgcggccacaagggcacatacggcctgctgagacggagagaggactggcctagcagactgcagatgttcttcgccaataaccacgaccaggagttcgacccccctaaggtgtaccctcccgtccccgccgagaagagaaagcccatccgggtcctgagcctgttcgatggcatcgccaccggtctgctggtgctgaaggacctgggcatccaggtggataggtacattgcctccgaggtgtgcgaggactccatcaccgtgggaatggtgcgtcatcagggcaagatcatgtacgtgggcgacgtgcggagcgtgacacagaagcatatccaggagtggggccctttcgacctggtgatcggcggcagcccttgcaatgacctgagcatcgtgaacccagcccggaagggcctgtacgagggaaccggcagactgttcttcgagttttacagactgctgcacgacgcccggcctaaggaaggcgacgaccggcccttcttttggctgttcgagaatgtggtggccatgggagtcagcgacaagcgggatattagccggttcctggagagcaaccccgtgatgatcgatgccaaggaagtgagcgccgcccaccgggccagatacttctggggcaatctgcctggcatgaacagacccctggccagcaccgtgaacgacaagctggagctgcaggagtgcctggagcacggccggatcgccaagttcagcaaggtgagaaccatcaccacccgaagcaacagcatcaaacaaggcaaggaccagcactttcctgtgttcatgaacgagaaggaggacatcctgtggtgtaccgagatggagagagtgttcgggttcccagtccactacacagatgtcagcaacatgtctagactggccagacagagactgctgggaagaagctggtccgtccctgtgatcagacacctgttcgcccctctgaaggagtacttcgcctgcgtgagcagcggcaacagcaacgccaacagccggggccccagcttctctagcggcctggtgccactgtccctgagagggagccacatgggccccatggagatctacaaaaccgtgagcgcctggaagcggcagcctgtgcgcgtgctgagcctgtttcggaatatcgataaagtcctgaaaagcctgggattcctggagagcggctctggctccggcggtggcaccctgaagtacgtggaggatgtgacaaacgtggtcagacgggatgtggagaagtggggccccttcgatctggtgtacggcagcacccaacccctgggcagctcttgtgaccggtgccctggctggtacatgtttcagttccaccggatcctgcagtacgccctgccgagacaggagtcccagcggccattcttttggattttcatggacaacttgctgctgaccgaggatgaccaggaaactaccactcggttcctgcagaccgaagccgtgaccctgcaggacgtgagaggccgggactaccagaacgccatgcgggtgtggtccaacatccctggactgaaaagcaagcacgcacctctgacccctaaagaagaggagtacctgcaggcccaggtgcggagcagaagcaagctggacgcccctaaggtggatctgctggtgaagaattgcctcctgcccctgagagagtacttcaagtatttcagccagaatagtctgcccctgggcggcccaagcagcggcgcccctcctcccagcggcggcagcccagccggctccccaacctctaccgaggagggcacctctgagtccgccacccccgagagcggccctggcacctccaccgagcccagcgagggcagcgcacccggcagccctgccggcagccccacctccacagaggagggaaccagcaccgagcccagcgaaggcagcgccccaggcaccagcaccgagcctagtgagggcggctctggcggcggcagcgcccaggagattaaacggatcaacaagatcagaagaagacttgtgaaagacagcaacaccaagaaggccggcaagacaggccccatgaaaaccctgctggttagagtgatgacacccgatctgagagagcggctggaaaacctgagaaagaagcctgaaaatatcccccagcccatcagcaatacatctagagccaacctgaataagctgctgaccgattacaccgaaatgaagaaggcgatcctgcatgtgtactgggaagagttccagaaggaccctgtgggcctgatgagccgggtggcccagcctgccagcaagaagatcgatcagaacaagctgaaacctgagatggacgagaagggcaacctgaccaccgccggctttgcctgctctcagtgtggccagcccctgttcgtgtacaagctggagcaggtgtctgagaagggcaaggcttacaccaactacttcggacggtgcaatgtggccgagcacgaaaagctgatcctgctggcccagctgaagcccgagaaggatagcgacgaagccgtgacatatagcctgggaaagtttgggcagagggccctggatttctacagcattcatgtgaccaaggagtccacccaccccgtgaagcccctggcccagatcgccggaaacagatacgcctccggacctgtgggaaaggccctgagcgacgcatgtatgggcacaatcgcctccttcctgtctaagtaccaggacatcatcatcgaacaccagaaggtggtgaagggcaaccagaagagactggagagcctgcgggagctggccggcaaggaaaacctggaataccctagcgtgaccctgccacctcagcctcacaccaaggagggcgttgatgcctacaacgaagtgatcgcccgggtgcgaatgtgggtgaacctgaacctgtggcagaagctgaagctaagcagagatgatgccaagcctctgctgagactgaagggattcccttcctttcctctggtcgagagacaggccaacgaagtggactggtgggacatggtgtgtaacgtgaagaagctgatcaacgagaaaaaggaggatggcaaggtgttttggcagaatctggctggctacaagagacaggaagccctgagaccatacctgagcagcgaggaagatcggaagaagggaaagaaattcgctcggtaccagctgggcgacctgctgctgcacctggaaaagaagcacggcgaggactggggaaaggtgtacgacgaggcctgggagcggattgacaagaaagtggaaggcctgagcaagcacatcaagctggaagaggaacggagaagcgaggacgcccagagcaaggccgccctgaccgactggctgcgggctaaggccagcttcgtgatcgagggcctgaaggaggccgacaaggacgagttctgcagatgcgagctgaagctgcagaagtggtacggggacctgcggggaaagcccttcgccatcgaagccgagaacagcatcctggacatcagcggcttcagcaagcagtacaactgtgccttcatctggcagaaggacggcgtgaagaagctgaacctgtacctgatcatcaactacttcaagggcggcaagctgcggttcaagaagatcaaacctgaagccttcgaagccaacagattctacaccgtgatcaacaaaaagagcggcgagatcgtgcccatggaggtgaacttcaacttcgacgaccccaacctgatcatcctgcctctggcctttggcaagagacagggcagagaattcatctggaacgacctgctgtccctggaaaccggcagcctgaagctggccaacggaagagtgatcgagaagacactgtacaacagaagaacccggcaggatgagcctgccctgttcgtggccctgaccttcgagcggcgggaggtcctggactcctccaatatcaaaccaatgaacctgatcggcgtggcaagaggcgaaaacatccccgccgtgatcgccctgaccgaccccgagggctgcccactgagccggtttaaggatagcctgggaaacccaacccacatcctgagaatcggcgagagctataaggagaagcagcggaccatccaggccaagaaggaggtggagcagcggagagccggcggctacagccggaagtacgccagcaaagccaagaatctggcagacgatatggtgagaaacaccgctagagatctgctgtactacgccgtgacccaggatgccatgctgatcttcgccaacctgagccggggcttcggccggcagggcaagcggaccttcatggccgagagacagtacacacggatggaggactggctgaccgccaagctggcctacgagggcctgagcaagacctacctgtccaagacactggcccagtacacctccaagacatgcagcaactgtgggtttaccatcaccagcgccgactacgacagggtgctggagaagctgaagaagacagcaacaggctggatgaccacaattaacggcaaggagctgaaggtggagggccagattacctactacaacagatacaagagacagaacgtagtcaaggacctgtccgtcgagctggatagactgagcgaagaatctgtgaacaacgacatctcctcctggacaaagggcagaagcggagaagctctgagcctcctgaagaaaagattctcccatagacccgtgcaggagaagttcgtgtgcctgaactgcggcttcgagacacacgcagccgagcaagccgccctgaacatcgccagatcctggctgttcctgcggagccaggagtacaagaaataccagacaaacaagacaaccggcaacaccgataagagagccttcgtcgagacctggcagtccttttaccggaagaagcttaaggaggtgtggaaacctgccgtgcggtctggcggatctggcggaggctccacaagcctgctgcccgccgccggctgcggcaaggacagcggcacccccgccaccgaggccgtgaccttcgaggacgtggccgtgaacttcagcagggaggagtgggccctgctggaccccccccagaggaagctgtacagggacgtgatgtgggagaccctgaggcacctggccgccgtgggcatgaacagcgacgacaggcagatcgaggacgtgtacaagatctgcaggaagaacctgagcggcgccaccagccccaagaaaaagagaaaagtctaagctgccttctgcggggcttgccttctggccatgcccttcttctctcccttgcacctgtacctcttggtctttgaataaagcctgagtaggaaggctagcaaaaaaaaaaaaaaaaaaaaaaaaaaaaaaaaaaaaaaaaaaaaaaaaaaaaaaaaaaaaaaaaaaaaaaaaaaaaaaaa

SEQ ID NO: 6262 - RNA, 5797 nt, synthetic construct
  source 1..5797: mol_type = other RNA
aggaaataagagagaaaagaagagtaagaagaaatataagagccaccatggcccctaagaagaagcgtaaagtgagccggatggaacgcctcgtctacgaggtgcggcagaagtgcagaaacatcgaggacatctgcatctcctgcggatctctgaacgtgaccctggagcacccactgttcatcggcggcatgtgccagaactgtaaaaactgttttctggagtgtgcctatcaatacgacgatgacggctaccagagctactgcaccatctgttgcggcggaagagaggtgctgatgtgtggaaataacaactgctgccggtgcttctgcgtggaatgcgtggacctgctggtgggccccggcgccgcccaggccgctattaaggaagatccttggaactgctacatgtgcggccacaagggcacatacggcctgctgagacggagagaggactggcctagcagactgcagatgttcttcgccaataaccacgaccaggagttcgacccccctaaggtgtaccctcccgtccccgccgagaagagaaagcccatccgggtcctgagcctgttcgatggcatcgccaccggtctgctggtgctgaaggacctgggcatccaggtggataggtacattgcctccgaggtgtgcgaggactccatcaccgtgggaatggtgcgtcatcagggcaagatcatgtacgtgggcgacgtgcggagcgtgacacagaagcatatccaggagtggggccctttcgacctggtgatcggcggcagcccttgcaatgacctgagcatcgtgaacccagcccggaagggcctgtacgagggaaccggcagactgttcttcgagttttacagactgctgcacgacgcccggcctaaggaaggcgacgaccggcccttcttttggctgttcgagaatgtggtggccatgggagtcagcgacaagcgggatattagccggttcctggagagcaaccccgtgatgatcgatgccaaggaagtgagcgccgcccaccgggccagatacttctggggcaatctgcctggcatgaacagacccctggccagcaccgtgaacgacaagctggagctgcaggagtgcctggagcacggccggatcgccaagttcagcaaggtgagaaccatcaccacccgaagcaacagcatcaaacaaggcaaggaccagcactttcctgtgttcatgaacgagaaggaggacatcctgtggtgtaccgagatggagagagtgttcgggttcccagtccactacacagatgtcagcaacatgtctagactggccagacagagactgctgggaagaagctggtccgtccctgtgatcagacacctgttcgcccctctgaaggagtacttcgcctgcgtgagcagcggcaacagcaacgccaacagccggggccccagcttctctagcggcctggtgccactgtccctgagagggagccacatgggccccatggagatctacaaaaccgtgagcgcctggaagcggcagcctgtgcgcgtgctgagcctgtttcggaatatcgataaagtcctgaaaagcctgggattcctggagagcggctctggctccggcggtggcaccctgaagtacgtggaggatgtgacaaacgtggtcagacgggatgtggagaagtggggccccttcgatctggtgtacggcagcacccaacccctgggcagctcttgtgaccggtgccctggctggtacatgtttcagttccaccggatcctgcagtacgccctgccgagacaggagtcccagcggccattcttttggattttcatggacaacttgctgctgaccgaggatgaccaggaaactaccactcggttcctgcagaccgaagccgtgaccctgcaggacgtgagaggccgggactaccagaacgccatgcgggtgtggtccaacatccctggactgaaaagcaagcacgcacctctgacccctaaagaagaggagtacctgcaggcccaggtgcggagcagaagcaagctggacgcccctaaggtggatctgctggtgaagaattgcctcctgcccctgagagagtacttcaagtatttcagccagaatagtctgcccctgggcggcccaagcagcggcgcccctcctcccagcggcggcagcccagccggctccccaacctctaccgaggagggcacctctgagtccgccacccccgagagcggccctggcacctccaccgagcccagcgagggcagcgcacccggcagccctgccggcagccccacctccacagaggagggaaccagcaccgagcccagcgaaggcagcgccccaggcaccagcaccgagcctagtgagggcggctctggcggcggcagcgcccaggagattaaacggatcaacaagatcagaagaagacttgtgaaagacagcaacaccaagaaggccggcaagacaggccccatgaaaaccctgctggttagagtgatgacacccgatctgagagagcggctggaaaacctgagaaagaagcctgaaaatatcccccagcccatcagcaatacatctagagccaacctgaataagctgctgaccgattacaccgaaatgaagaaggcgatcctgcatgtgtactgggaagagttccagaaggaccctgtgggcctgatgagccgggtggcccagcctgccagcaagaagatcgatcagaacaagctgaaacctgagatggacgagaagggcaacctgaccaccgccggctttgcctgctctcagtgtggccagcccctgttcgtgtacaagctggagcaggtgtctgagaagggcaaggcttacaccaactacttcggacggtgcaatgtggccgagcacgaaaagctgatcctgctggcccagctgaagcccgagaaggatagcgacgaagccgtgacatatagcctgggaaagtttgggcagagggccctggatttctacagcattcatgtgaccaaggagtccacccaccccgtgaagcccctggcccagatcgccggaaacagatacgcctccggacctgtgggaaaggccctgagcgacgcatgtatgggcacaatcgcctccttcctgtctaagtaccaggacatcatcatcgaacaccagaaggtggtgaagggcaaccagaagagactggagagcctgcgggagctggccggcaaggaaaacctggaataccctagcgtgaccctgccacctcagcctcacaccaaggagggcgttgatgcctacaacgaagtgatcgcccgggtgcgaatgtgggtgaacctgaacctgtggcagaagctgaagctaagcagagatgatgccaagcctctgctgagactgaagggattcccttcctttcctctggtcgagagacaggccaacgaagtggactggtgggacatggtgtgtaacgtgaagaagctgatcaacgagaaaaaggaggatggcaaggtgttttggcagaatctggctggctacaagagacaggaagccctgagaccatacctgagcagcgaggaagatcggaagaagggaaagaaattcgctcggtaccagctgggcgacctgctgctgcacctggaaaagaagcacggcgaggactggggaaaggtgtacgacgaggcctgggagcggattgacaagaaagtggaaggcctgagcaagcacatcaagctggaagaggaacggagaagcgaggacgcccagagcaaggccgccctgaccgactggctgcgggctaaggccagcttcgtgatcgagggcctgaaggaggccgacaaggacgagttctgcagatgcgagctgaagctgcagaagtggtacggggacctgcggggaaagcccttcgccatcgaagccgagaacagcatcctggacatcagcggcttcagcaagcagtacaactgtgccttcatctggcagaaggacggcgtgaagaagctgaacctgtacctgatcatcaactacttcaagggcggcaagctgcggttcaagaagatcaaacctgaagccttcgaagccaacagattctacaccgtgatcaacaaaaagagcggcgagatcgtgcccatggaggtgaacttcaacttcgacgaccccaacctgatcatcctgcctctggcctttggcaagagacagggcagagaattcatctggaacgacctgctgtccctggaaaccggcagcctgaagctggccaacggaagagtgatcgagaagacactgtacaacagaagaacccggcaggatgagcctgccctgttcgtggccctgaccttcgagcggcgggaggtcctggactcctccaatatcaaaccaatgaacctgatcggcgtggcaagaggcgaaaacatccccgccgtgatcgccctgaccgaccccgagggctgcccactgagccggtttaaggatagcctgggaaacccaacccacatcctgagaatcggcgagagctataaggagaagcagcggaccatccaggccaagaaggaggtggagcagcggagagccggcggctacagccggaagtacgccagcaaagccaagaatctggcagacgatatggtgagaaacaccgctagagatctgctgtactacgccgtgacccaggatgccatgctgatcttcgccaacctgagccggggcttcggccggcagggcaagcggaccttcatggccgagagacagtacacacggatggaggactggctgaccgccaagctggcctacgagggcctgagcaagacctacctgtccaagacactggcccagtacacctccaagacatgcagcaactgtgggtttaccatcaccagcgccgactacgacagggtgctggagaagctgaagaagacagcaacaggctggatgaccacaattaacggcaaggagctgaaggtggagggccagattacctactacaacagatacaagagacagaacgtagtcaaggacctgtccgtcgagctggatagactgagcgaagaatctgtgaacaacgacatctcctcctggacaaagggcagaagcggagaagctctgagcctcctgaagaaaagattctcccatagacccgtgcaggagaagttcgtgtgcctgaactgcggcttcgagacacacgcagccgagcaagccgccctgaacatcgccagatcctggctgttcctgcggagccaggagtacaagaaataccagacaaacaagacaaccggcaacaccgataagagagccttcgtcgagacctggcagtccttttaccggaagaagcttaaggaggtgtggaaacctgccgtgcggtctggcggatctggcggaggctccacaagcgaggagctgcccgtggtgttcgaggacgtggccgtgtacttcaccagggaggagtggggcatgctggacaagaggcagaaggagctgtacagggacgtgatgaggatgaactacgagctgctggccagcctgggccccgccgccgccaagcccgacctgatcagcaagctggagaggagggccgccccctggatcaagcaccccaacggccccaagtggggcaagggcaggccccccggcaacaccagccccaagaaaaagagaaaagtctaagctgccttctgcggggcttgccttctggccatgcccttcttctctcccttgcacctgtacctcttggtctttgaataaagcctgagtaggaaggctagcaaaaaaaaaaaaaaaaaaaaaaaaaaaaaaaaaaaaaaaaaaaaaaaaaaaaaaaaaaaaaaaaaaaaaaaaaaaaaaaa

SEQ ID NO: 6263 - RNA, 5797 nt, synthetic construct
  source 1..5797: mol_type = other RNA
aggaaataagagagaaaagaagagtaagaagaaatataagagccaccatggcccctaagaagaagcgtaaagtgagccggatggaacgcctcgtctacgaggtgcggcagaagtgcagaaacatcgaggacatctgcatctcctgcggatctctgaacgtgaccctggagcacccactgttcatcggcggcatgtgccagaactgtaaaaactgttttctggagtgtgcctatcaatacgacgatgacggctaccagagctactgcaccatctgttgcggcggaagagaggtgctgatgtgtggaaataacaactgctgccggtgcttctgcgtggaatgcgtggacctgctggtgggccccggcgccgcccaggccgctattaaggaagatccttggaactgctacatgtgcggccacaagggcacatacggcctgctgagacggagagaggactggcctagcagactgcagatgttcttcgccaataaccacgaccaggagttcgacccccctaaggtgtaccctcccgtccccgccgagaagagaaagcccatccgggtcctgagcctgttcgatggcatcgccaccggtctgctggtgctgaaggacctgggcatccaggtggataggtacattgcctccgaggtgtgcgaggactccatcaccgtgggaatggtgcgtcatcagggcaagatcatgtacgtgggcgacgtgcggagcgtgacacagaagcatatccaggagtggggccctttcgacctggtgatcggcggcagcccttgcaatgacctgagcatcgtgaacccagcccggaagggcctgtacgagggaaccggcagactgttcttcgagttttacagactgctgcacgacgcccggcctaaggaaggcgacgaccggcccttcttttggctgttcgagaatgtggtggccatgggagtcagcgacaagcgggatattagccggttcctggagagcaaccccgtgatgatcgatgccaaggaagtgagcgccgcccaccgggccagatacttctggggcaatctgcctggcatgaacagacccctggccagcaccgtgaacgacaagctggagctgcaggagtgcctggagcacggccggatcgccaagttcagcaaggtgagaaccatcaccacccgaagcaacagcatcaaacaaggcaaggaccagcactttcctgtgttcatgaacgagaaggaggacatcctgtggtgtaccgagatggagagagtgttcgggttcccagtccactacacagatgtcagcaacatgtctagactggccagacagagactgctgggaagaagctggtccgtccctgtgatcagacacctgttcgcccctctgaaggagtacttcgcctgcgtgagcagcggcaacagcaacgccaacagccggggccccagcttctctagcggcctggtgccactgtccctgagagggagccacatgggccccatggagatctacaaaaccgtgagcgcctggaagcggcagcctgtgcgcgtgctgagcctgtttcggaatatcgataaagtcctgaaaagcctgggattcctggagagcggctctggctccggcggtggcaccctgaagtacgtggaggatgtgacaaacgtggtcagacgggatgtggagaagtggggccccttcgatctggtgtacggcagcacccaacccctgggcagctcttgtgaccggtgccctggctggtacatgtttcagttccaccggatcctgcagtacgccctgccgagacaggagtcccagcggccattcttttggattttcatggacaacttgctgctgaccgaggatgaccaggaaactaccactcggttcctgcagaccgaagccgtgaccctgcaggacgtgagaggccgggactaccagaacgccatgcgggtgtggtccaacatccctggactgaaaagcaagcacgcacctctgacccctaaagaagaggagtacctgcaggcccaggtgcggagcagaagcaagctggacgcccctaaggtggatctgctggtgaagaattgcctcctgcccctgagagagtacttcaagtatttcagccagaatagtctgcccctgggcggcccaagcagcggcgcccctcctcccagcggcggcagcccagccggctccccaacctctaccgaggagggcacctctgagtccgccacccccgagagcggccctggcacctccaccgagcccagcgagggcagcgcacccggcagccctgccggcagccccacctccacagaggagggaaccagcaccgagcccagcgaaggcagcgccccaggcaccagcaccgagcctagtgagggcggctctggcggcggcagcgcccaggagattaaacggatcaacaagatcagaagaagacttgtgaaagacagcaacaccaagaaggccggcaagacaggccccatgaaaaccctgctggttagagtgatgacacccgatctgagagagcggctggaaaacctgagaaagaagcctgaaaatatcccccagcccatcagcaatacatctagagccaacctgaataagctgctgaccgattacaccgaaatgaagaaggcgatcctgcatgtgtactgggaagagttccagaaggaccctgtgggcctgatgagccgggtggcccagcctgccagcaagaagatcgatcagaacaagctgaaacctgagatggacgagaagggcaacctgaccaccgccggctttgcctgctctcagtgtggccagcccctgttcgtgtacaagctggagcaggtgtctgagaagggcaaggcttacaccaactacttcggacggtgcaatgtggccgagcacgaaaagctgatcctgctggcccagctgaagcccgagaaggatagcgacgaagccgtgacatatagcctgggaaagtttgggcagagggccctggatttctacagcattcatgtgaccaaggagtccacccaccccgtgaagcccctggcccagatcgccggaaacagatacgcctccggacctgtgggaaaggccctgagcgacgcatgtatgggcacaatcgcctccttcctgtctaagtaccaggacatcatcatcgaacaccagaaggtggtgaagggcaaccagaagagactggagagcctgcgggagctggccggcaaggaaaacctggaataccctagcgtgaccctgccacctcagcctcacaccaaggagggcgttgatgcctacaacgaagtgatcgcccgggtgcgaatgtgggtgaacctgaacctgtggcagaagctgaagctaagcagagatgatgccaagcctctgctgagactgaagggattcccttcctttcctctggtcgagagacaggccaacgaagtggactggtgggacatggtgtgtaacgtgaagaagctgatcaacgagaaaaaggaggatggcaaggtgttttggcagaatctggctggctacaagagacaggaagccctgagaccatacctgagcagcgaggaagatcggaagaagggaaagaaattcgctcggtaccagctgggcgacctgctgctgcacctggaaaagaagcacggcgaggactggggaaaggtgtacgacgaggcctgggagcggattgacaagaaagtggaaggcctgagcaagcacatcaagctggaagaggaacggagaagcgaggacgcccagagcaaggccgccctgaccgactggctgcgggctaaggccagcttcgtgatcgagggcctgaaggaggccgacaaggacgagttctgcagatgcgagctgaagctgcagaagtggtacggggacctgcggggaaagcccttcgccatcgaagccgagaacagcatcctggacatcagcggcttcagcaagcagtacaactgtgccttcatctggcagaaggacggcgtgaagaagctgaacctgtacctgatcatcaactacttcaagggcggcaagctgcggttcaagaagatcaaacctgaagccttcgaagccaacagattctacaccgtgatcaacaaaaagagcggcgagatcgtgcccatggaggtgaacttcaacttcgacgaccccaacctgatcatcctgcctctggcctttggcaagagacagggcagagaattcatctggaacgacctgctgtccctggaaaccggcagcctgaagctggccaacggaagagtgatcgagaagacactgtacaacagaagaacccggcaggatgagcctgccctgttcgtggccctgaccttcgagcggcgggaggtcctggactcctccaatatcaaaccaatgaacctgatcggcgtggcaagaggcgaaaacatccccgccgtgatcgccctgaccgaccccgagggctgcccactgagccggtttaaggatagcctgggaaacccaacccacatcctgagaatcggcgagagctataaggagaagcagcggaccatccaggccaagaaggaggtggagcagcggagagccggcggctacagccggaagtacgccagcaaagccaagaatctggcagacgatatggtgagaaacaccgctagagatctgctgtactacgccgtgacccaggatgccatgctgatcttcgccaacctgagccggggcttcggccggcagggcaagcggaccttcatggccgagagacagtacacacggatggaggactggctgaccgccaagctggcctacgagggcctgagcaagacctacctgtccaagacactggcccagtacacctccaagacatgcagcaactgtgggtttaccatcaccagcgccgactacgacagggtgctggagaagctgaagaagacagcaacaggctggatgaccacaattaacggcaaggagctgaaggtggagggccagattacctactacaacagatacaagagacagaacgtagtcaaggacctgtccgtcgagctggatagactgagcgaagaatctgtgaacaacgacatctcctcctggacaaagggcagaagcggagaagctctgagcctcctgaagaaaagattctcccatagacccgtgcaggagaagttcgtgtgcctgaactgcggcttcgagacacacgcagccgagcaagccgccctgaacatcgccagatcctggctgttcctgcggagccaggagtacaagaaataccagacaaacaagacaaccggcaacaccgataagagagccttcgtcgagacctggcagtccttttaccggaagaagcttaaggaggtgtggaaacctgccgtgcggtctggcggatctggcggaggctccacaagcacccaggtgagcgtgaccttcgacgacgtggccgtgaccttcaccagggaggagtggaggcagctggaccccgcccagaggaccctgtaccaggaggtgatgctggagaactgcaggctgctggtgagcctgggctgccccgtgcccaggcccgagctgatcttccagctggagcagggccagaagctgtggaccgtgaaggaggacctgagcaggagcacctgccccggcaagaggtacaggaccagccccaagaaaaagagaaaagtctaagctgccttctgcggggcttgccttctggccatgcccttcttctctcccttgcacctgtacctcttggtctttgaataaagcctgagtaggaaggctagcaaaaaaaaaaaaaaaaaaaaaaaaaaaaaaaaaaaaaaaaaaaaaaaaaaaaaaaaaaaaaaaaaaaaaaaaaaaaaaaa

SEQ ID NO: 6264 - RNA, 5797 nt, synthetic construct
  source 1..5797: mol_type = other RNA
aggaaataagagagaaaagaagagtaagaagaaatataagagccaccatggcccctaagaagaagcgtaaagtgagccggatggaacgcctcgtctacgaggtgcggcagaagtgcagaaacatcgaggacatctgcatctcctgcggatctctgaacgtgaccctggagcacccactgttcatcggcggcatgtgccagaactgtaaaaactgttttctggagtgtgcctatcaatacgacgatgacggctaccagagctactgcaccatctgttgcggcggaagagaggtgctgatgtgtggaaataacaactgctgccggtgcttctgcgtggaatgcgtggacctgctggtgggccccggcgccgcccaggccgctattaaggaagatccttggaactgctacatgtgcggccacaagggcacatacggcctgctgagacggagagaggactggcctagcagactgcagatgttcttcgccaataaccacgaccaggagttcgacccccctaaggtgtaccctcccgtccccgccgagaagagaaagcccatccgggtcctgagcctgttcgatggcatcgccaccggtctgctggtgctgaaggacctgggcatccaggtggataggtacattgcctccgaggtgtgcgaggactccatcaccgtgggaatggtgcgtcatcagggcaagatcatgtacgtgggcgacgtgcggagcgtgacacagaagcatatccaggagtggggccctttcgacctggtgatcggcggcagcccttgcaatgacctgagcatcgtgaacccagcccggaagggcctgtacgagggaaccggcagactgttcttcgagttttacagactgctgcacgacgcccggcctaaggaaggcgacgaccggcccttcttttggctgttcgagaatgtggtggccatgggagtcagcgacaagcgggatattagccggttcctggagagcaaccccgtgatgatcgatgccaaggaagtgagcgccgcccaccgggccagatacttctggggcaatctgcctggcatgaacagacccctggccagcaccgtgaacgacaagctggagctgcaggagtgcctggagcacggccggatcgccaagttcagcaaggtgagaaccatcaccacccgaagcaacagcatcaaacaaggcaaggaccagcactttcctgtgttcatgaacgagaaggaggacatcctgtggtgtaccgagatggagagagtgttcgggttcccagtccactacacagatgtcagcaacatgtctagactggccagacagagactgctgggaagaagctggtccgtccctgtgatcagacacctgttcgcccctctgaaggagtacttcgcctgcgtgagcagcggcaacagcaacgccaacagccggggccccagcttctctagcggcctggtgccactgtccctgagagggagccacatgggccccatggagatctacaaaaccgtgagcgcctggaagcggcagcctgtgcgcgtgctgagcctgtttcggaatatcgataaagtcctgaaaagcctgggattcctggagagcggctctggctccggcggtggcaccctgaagtacgtggaggatgtgacaaacgtggtcagacgggatgtggagaagtggggccccttcgatctggtgtacggcagcacccaacccctgggcagctcttgtgaccggtgccctggctggtacatgtttcagttccaccggatcctgcagtacgccctgccgagacaggagtcccagcggccattcttttggattttcatggacaacttgctgctgaccgaggatgaccaggaaactaccactcggttcctgcagaccgaagccgtgaccctgcaggacgtgagaggccgggactaccagaacgccatgcgggtgtggtccaacatccctggactgaaaagcaagcacgcacctctgacccctaaagaagaggagtacctgcaggcccaggtgcggagcagaagcaagctggacgcccctaaggtggatctgctggtgaagaattgcctcctgcccctgagagagtacttcaagtatttcagccagaatagtctgcccctgggcggcccaagcagcggcgcccctcctcccagcggcggcagcccagccggctccccaacctctaccgaggagggcacctctgagtccgccacccccgagagcggccctggcacctccaccgagcccagcgagggcagcgcacccggcagccctgccggcagccccacctccacagaggagggaaccagcaccgagcccagcgaaggcagcgccccaggcaccagcaccgagcctagtgagggcggctctggcggcggcagcgcccaggagattaaacggatcaacaagatcagaagaagacttgtgaaagacagcaacaccaagaaggccggcaagacaggccccatgaaaaccctgctggttagagtgatgacacccgatctgagagagcggctggaaaacctgagaaagaagcctgaaaatatcccccagcccatcagcaatacatctagagccaacctgaataagctgctgaccgattacaccgaaatgaagaaggcgatcctgcatgtgtactgggaagagttccagaaggaccctgtgggcctgatgagccgggtggcccagcctgccagcaagaagatcgatcagaacaagctgaaacctgagatggacgagaagggcaacctgaccaccgccggctttgcctgctctcagtgtggccagcccctgttcgtgtacaagctggagcaggtgtctgagaagggcaaggcttacaccaactacttcggacggtgcaatgtggccgagcacgaaaagctgatcctgctggcccagctgaagcccgagaaggatagcgacgaagccgtgacatatagcctgggaaagtttgggcagagggccctggatttctacagcattcatgtgaccaaggagtccacccaccccgtgaagcccctggcccagatcgccggaaacagatacgcctccggacctgtgggaaaggccctgagcgacgcatgtatgggcacaatcgcctccttcctgtctaagtaccaggacatcatcatcgaacaccagaaggtggtgaagggcaaccagaagagactggagagcctgcgggagctggccggcaaggaaaacctggaataccctagcgtgaccctgccacctcagcctcacaccaaggagggcgttgatgcctacaacgaagtgatcgcccgggtgcgaatgtgggtgaacctgaacctgtggcagaagctgaagctaagcagagatgatgccaagcctctgctgagactgaagggattcccttcctttcctctggtcgagagacaggccaacgaagtggactggtgggacatggtgtgtaacgtgaagaagctgatcaacgagaaaaaggaggatggcaaggtgttttggcagaatctggctggctacaagagacaggaagccctgagaccatacctgagcagcgaggaagatcggaagaagggaaagaaattcgctcggtaccagctgggcgacctgctgctgcacctggaaaagaagcacggcgaggactggggaaaggtgtacgacgaggcctgggagcggattgacaagaaagtggaaggcctgagcaagcacatcaagctggaagaggaacggagaagcgaggacgcccagagcaaggccgccctgaccgactggctgcgggctaaggccagcttcgtgatcgagggcctgaaggaggccgacaaggacgagttctgcagatgcgagctgaagctgcagaagtggtacggggacctgcggggaaagcccttcgccatcgaagccgagaacagcatcctggacatcagcggcttcagcaagcagtacaactgtgccttcatctggcagaaggacggcgtgaagaagctgaacctgtacctgatcatcaactacttcaagggcggcaagctgcggttcaagaagatcaaacctgaagccttcgaagccaacagattctacaccgtgatcaacaaaaagagcggcgagatcgtgcccatggaggtgaacttcaacttcgacgaccccaacctgatcatcctgcctctggcctttggcaagagacagggcagagaattcatctggaacgacctgctgtccctggaaaccggcagcctgaagctggccaacggaagagtgatcgagaagacactgtacaacagaagaacccggcaggatgagcctgccctgttcgtggccctgaccttcgagcggcgggaggtcctggactcctccaatatcaaaccaatgaacctgatcggcgtggcaagaggcgaaaacatccccgccgtgatcgccctgaccgaccccgagggctgcccactgagccggtttaaggatagcctgggaaacccaacccacatcctgagaatcggcgagagctataaggagaagcagcggaccatccaggccaagaaggaggtggagcagcggagagccggcggctacagccggaagtacgccagcaaagccaagaatctggcagacgatatggtgagaaacaccgctagagatctgctgtactacgccgtgacccaggatgccatgctgatcttcgccaacctgagccggggcttcggccggcagggcaagcggaccttcatggccgagagacagtacacacggatggaggactggctgaccgccaagctggcctacgagggcctgagcaagacctacctgtccaagacactggcccagtacacctccaagacatgcagcaactgtgggtttaccatcaccagcgccgactacgacagggtgctggagaagctgaagaagacagcaacaggctggatgaccacaattaacggcaaggagctgaaggtggagggccagattacctactacaacagatacaagagacagaacgtagtcaaggacctgtccgtcgagctggatagactgagcgaagaatctgtgaacaacgacatctcctcctggacaaagggcagaagcggagaagctctgagcctcctgaagaaaagattctcccatagacccgtgcaggagaagttcgtgtgcctgaactgcggcttcgagacacacgcagccgagcaagccgccctgaacatcgccagatcctggctgttcctgcggagccaggagtacaagaaataccagacaaacaagacaaccggcaacaccgataagagagccttcgtcgagacctggcagtccttttaccggaagaagcttaaggaggtgtggaaacctgccgtgcggtctggcggatctggcggaggctccacaagcagccagggcctggtggccttcgaggacgtggccgtgtacttcagcctggaggagtgggagaggctggacgccgaccagagggagctgtaccaggaggtgatgcaggagaactacggcatcctggtgagcctgggctaccccatccccaagcccgacctgatcttcaggctggagcagggcgaggagccctgggtgcccgacagccccaggcccgaggagggcgacatcgtgaccggcgtgtacaccagccccaagaaaaagagaaaagtctaagctgccttctgcggggcttgccttctggccatgcccttcttctctcccttgcacctgtacctcttggtctttgaataaagcctgagtaggaaggctagcaaaaaaaaaaaaaaaaaaaaaaaaaaaaaaaaaaaaaaaaaaaaaaaaaaaaaaaaaaaaaaaaaaaaaaaaaaaaaaaa

SEQ ID NO: 6265 - RNA, 5797 nt, synthetic construct
  source 1..5797: mol_type = other RNA
aggaaataagagagaaaagaagagtaagaagaaatataagagccaccatggcccctaagaagaagcgtaaagtgagccggatggaacgcctcgtctacgaggtgcggcagaagtgcagaaacatcgaggacatctgcatctcctgcggatctctgaacgtgaccctggagcacccactgttcatcggcggcatgtgccagaactgtaaaaactgttttctggagtgtgcctatcaatacgacgatgacggctaccagagctactgcaccatctgttgcggcggaagagaggtgctgatgtgtggaaataacaactgctgccggtgcttctgcgtggaatgcgtggacctgctggtgggccccggcgccgcccaggccgctattaaggaagatccttggaactgctacatgtgcggccacaagggcacatacggcctgctgagacggagagaggactggcctagcagactgcagatgttcttcgccaataaccacgaccaggagttcgacccccctaaggtgtaccctcccgtccccgccgagaagagaaagcccatccgggtcctgagcctgttcgatggcatcgccaccggtctgctggtgctgaaggacctgggcatccaggtggataggtacattgcctccgaggtgtgcgaggactccatcaccgtgggaatggtgcgtcatcagggcaagatcatgtacgtgggcgacgtgcggagcgtgacacagaagcatatccaggagtggggccctttcgacctggtgatcggcggcagcccttgcaatgacctgagcatcgtgaacccagcccggaagggcctgtacgagggaaccggcagactgttcttcgagttttacagactgctgcacgacgcccggcctaaggaaggcgacgaccggcccttcttttggctgttcgagaatgtggtggccatgggagtcagcgacaagcgggatattagccggttcctggagagcaaccccgtgatgatcgatgccaaggaagtgagcgccgcccaccgggccagatacttctggggcaatctgcctggcatgaacagacccctggccagcaccgtgaacgacaagctggagctgcaggagtgcctggagcacggccggatcgccaagttcagcaaggtgagaaccatcaccacccgaagcaacagcatcaaacaaggcaaggaccagcactttcctgtgttcatgaacgagaaggaggacatcctgtggtgtaccgagatggagagagtgttcgggttcccagtccactacacagatgtcagcaacatgtctagactggccagacagagactgctgggaagaagctggtccgtccctgtgatcagacacctgttcgcccctctgaaggagtacttcgcctgcgtgagcagcggcaacagcaacgccaacagccggggccccagcttctctagcggcctggtgccactgtccctgagagggagccacatgggccccatggagatctacaaaaccgtgagcgcctggaagcggcagcctgtgcgcgtgctgagcctgtttcggaatatcgataaagtcctgaaaagcctgggattcctggagagcggctctggctccggcggtggcaccctgaagtacgtggaggatgtgacaaacgtggtcagacgggatgtggagaagtggggccccttcgatctggtgtacggcagcacccaacccctgggcagctcttgtgaccggtgccctggctggtacatgtttcagttccaccggatcctgcagtacgccctgccgagacaggagtcccagcggccattcttttggattttcatggacaacttgctgctgaccgaggatgaccaggaaactaccactcggttcctgcagaccgaagccgtgaccctgcaggacgtgagaggccgggactaccagaacgccatgcgggtgtggtccaacatccctggactgaaaagcaagcacgcacctctgacccctaaagaagaggagtacctgcaggcccaggtgcggagcagaagcaagctggacgcccctaaggtggatctgctggtgaagaattgcctcctgcccctgagagagtacttcaagtatttcagccagaatagtctgcccctgggcggcccaagcagcggcgcccctcctcccagcggcggcagcccagccggctccccaacctctaccgaggagggcacctctgagtccgccacccccgagagcggccctggcacctccaccgagcccagcgagggcagcgcacccggcagccctgccggcagccccacctccacagaggagggaaccagcaccgagcccagcgaaggcagcgccccaggcaccagcaccgagcctagtgagggcggctctggcggcggcagcgcccaggagattaaacggatcaacaagatcagaagaagacttgtgaaagacagcaacaccaagaaggccggcaagacaggccccatgaaaaccctgctggttagagtgatgacacccgatctgagagagcggctggaaaacctgagaaagaagcctgaaaatatcccccagcccatcagcaatacatctagagccaacctgaataagctgctgaccgattacaccgaaatgaagaaggcgatcctgcatgtgtactgggaagagttccagaaggaccctgtgggcctgatgagccgggtggcccagcctgccagcaagaagatcgatcagaacaagctgaaacctgagatggacgagaagggcaacctgaccaccgccggctttgcctgctctcagtgtggccagcccctgttcgtgtacaagctggagcaggtgtctgagaagggcaaggcttacaccaactacttcggacggtgcaatgtggccgagcacgaaaagctgatcctgctggcccagctgaagcccgagaaggatagcgacgaagccgtgacatatagcctgggaaagtttgggcagagggccctggatttctacagcattcatgtgaccaaggagtccacccaccccgtgaagcccctggcccagatcgccggaaacagatacgcctccggacctgtgggaaaggccctgagcgacgcatgtatgggcacaatcgcctccttcctgtctaagtaccaggacatcatcatcgaacaccagaaggtggtgaagggcaaccagaagagactggagagcctgcgggagctggccggcaaggaaaacctggaataccctagcgtgaccctgccacctcagcctcacaccaaggagggcgttgatgcctacaacgaagtgatcgcccgggtgcgaatgtgggtgaacctgaacctgtggcagaagctgaagctaagcagagatgatgccaagcctctgctgagactgaagggattcccttcctttcctctggtcgagagacaggccaacgaagtggactggtgggacatggtgtgtaacgtgaagaagctgatcaacgagaaaaaggaggatggcaaggtgttttggcagaatctggctggctacaagagacaggaagccctgagaccatacctgagcagcgaggaagatcggaagaagggaaagaaattcgctcggtaccagctgggcgacctgctgctgcacctggaaaagaagcacggcgaggactggggaaaggtgtacgacgaggcctgggagcggattgacaagaaagtggaaggcctgagcaagcacatcaagctggaagaggaacggagaagcgaggacgcccagagcaaggccgccctgaccgactggctgcgggctaaggccagcttcgtgatcgagggcctgaaggaggccgacaaggacgagttctgcagatgcgagctgaagctgcagaagtggtacggggacctgcggggaaagcccttcgccatcgaagccgagaacagcatcctggacatcagcggcttcagcaagcagtacaactgtgccttcatctggcagaaggacggcgtgaagaagctgaacctgtacctgatcatcaactacttcaagggcggcaagctgcggttcaagaagatcaaacctgaagccttcgaagccaacagattctacaccgtgatcaacaaaaagagcggcgagatcgtgcccatggaggtgaacttcaacttcgacgaccccaacctgatcatcctgcctctggcctttggcaagagacagggcagagaattcatctggaacgacctgctgtccctggaaaccggcagcctgaagctggccaacggaagagtgatcgagaagacactgtacaacagaagaacccggcaggatgagcctgccctgttcgtggccctgaccttcgagcggcgggaggtcctggactcctccaatatcaaaccaatgaacctgatcggcgtggcaagaggcgaaaacatccccgccgtgatcgccctgaccgaccccgagggctgcccactgagccggtttaaggatagcctgggaaacccaacccacatcctgagaatcggcgagagctataaggagaagcagcggaccatccaggccaagaaggaggtggagcagcggagagccggcggctacagccggaagtacgccagcaaagccaagaatctggcagacgatatggtgagaaacaccgctagagatctgctgtactacgccgtgacccaggatgccatgctgatcttcgccaacctgagccggggcttcggccggcagggcaagcggaccttcatggccgagagacagtacacacggatggaggactggctgaccgccaagctggcctacgagggcctgagcaagacctacctgtccaagacactggcccagtacacctccaagacatgcagcaactgtgggtttaccatcaccagcgccgactacgacagggtgctggagaagctgaagaagacagcaacaggctggatgaccacaattaacggcaaggagctgaaggtggagggccagattacctactacaacagatacaagagacagaacgtagtcaaggacctgtccgtcgagctggatagactgagcgaagaatctgtgaacaacgacatctcctcctggacaaagggcagaagcggagaagctctgagcctcctgaagaaaagattctcccatagacccgtgcaggagaagttcgtgtgcctgaactgcggcttcgagacacacgcagccgagcaagccgccctgaacatcgccagatcctggctgttcctgcggagccaggagtacaagaaataccagacaaacaagacaaccggcaacaccgataagagagccttcgtcgagacctggcagtccttttaccggaagaagcttaaggaggtgtggaaacctgccgtgcggtctggcggatctggcggaggctccacaagcttccaggagcccgtgaccttcgaggacgtggccgtgtacttcacccagaaccagtgggccagcctggacagcgcccagagggccctgtacagggaggtgatgctggagaactacgccaacgtggccagcctggtgagccccttccccaggcccgacctgatcagccagctggagaggggcgaggccccctgggaccccgacccctgggaggccgaggacctgaggggcatctgccccggcggcaccagccccaagaaaaagagaaaagtctaagctgccttctgcggggcttgccttctggccatgcccttcttctctcccttgcacctgtacctcttggtctttgaataaagcctgagtaggaaggctagcaaaaaaaaaaaaaaaaaaaaaaaaaaaaaaaaaaaaaaaaaaaaaaaaaaaaaaaaaaaaaaaaaaaaaaaaaaaaaaaa

SEQ ID NO: 6266 - RNA, 5797 nt, synthetic construct
  source 1..5797: mol_type = other RNA
aggaaataagagagaaaagaagagtaagaagaaatataagagccaccatggcccctaagaagaagcgtaaagtgagccggatggaacgcctcgtctacgaggtgcggcagaagtgcagaaacatcgaggacatctgcatctcctgcggatctctgaacgtgaccctggagcacccactgttcatcggcggcatgtgccagaactgtaaaaactgttttctggagtgtgcctatcaatacgacgatgacggctaccagagctactgcaccatctgttgcggcggaagagaggtgctgatgtgtggaaataacaactgctgccggtgcttctgcgtggaatgcgtggacctgctggtgggccccggcgccgcccaggccgctattaaggaagatccttggaactgctacatgtgcggccacaagggcacatacggcctgctgagacggagagaggactggcctagcagactgcagatgttcttcgccaataaccacgaccaggagttcgacccccctaaggtgtaccctcccgtccccgccgagaagagaaagcccatccgggtcctgagcctgttcgatggcatcgccaccggtctgctggtgctgaaggacctgggcatccaggtggataggtacattgcctccgaggtgtgcgaggactccatcaccgtgggaatggtgcgtcatcagggcaagatcatgtacgtgggcgacgtgcggagcgtgacacagaagcatatccaggagtggggccctttcgacctggtgatcggcggcagcccttgcaatgacctgagcatcgtgaacccagcccggaagggcctgtacgagggaaccggcagactgttcttcgagttttacagactgctgcacgacgcccggcctaaggaaggcgacgaccggcccttcttttggctgttcgagaatgtggtggccatgggagtcagcgacaagcgggatattagccggttcctggagagcaaccccgtgatgatcgatgccaaggaagtgagcgccgcccaccgggccagatacttctggggcaatctgcctggcatgaacagacccctggccagcaccgtgaacgacaagctggagctgcaggagtgcctggagcacggccggatcgccaagttcagcaaggtgagaaccatcaccacccgaagcaacagcatcaaacaaggcaaggaccagcactttcctgtgttcatgaacgagaaggaggacatcctgtggtgtaccgagatggagagagtgttcgggttcccagtccactacacagatgtcagcaacatgtctagactggccagacagagactgctgggaagaagctggtccgtccctgtgatcagacacctgttcgcccctctgaaggagtacttcgcctgcgtgagcagcggcaacagcaacgccaacagccggggccccagcttctctagcggcctggtgccactgtccctgagagggagccacatgggccccatggagatctacaaaaccgtgagcgcctggaagcggcagcctgtgcgcgtgctgagcctgtttcggaatatcgataaagtcctgaaaagcctgggattcctggagagcggctctggctccggcggtggcaccctgaagtacgtggaggatgtgacaaacgtggtcagacgggatgtggagaagtggggccccttcgatctggtgtacggcagcacccaacccctgggcagctcttgtgaccggtgccctggctggtacatgtttcagttccaccggatcctgcagtacgccctgccgagacaggagtcccagcggccattcttttggattttcatggacaacttgctgctgaccgaggatgaccaggaaactaccactcggttcctgcagaccgaagccgtgaccctgcaggacgtgagaggccgggactaccagaacgccatgcgggtgtggtccaacatccctggactgaaaagcaagcacgcacctctgacccctaaagaagaggagtacctgcaggcccaggtgcggagcagaagcaagctggacgcccctaaggtggatctgctggtgaagaattgcctcctgcccctgagagagtacttcaagtatttcagccagaatagtctgcccctgggcggcccaagcagcggcgcccctcctcccagcggcggcagcccagccggctccccaacctctaccgaggagggcacctctgagtccgccacccccgagagcggccctggcacctccaccgagcccagcgagggcagcgcacccggcagccctgccggcagccccacctccacagaggagggaaccagcaccgagcccagcgaaggcagcgccccaggcaccagcaccgagcctagtgagggcggctctggcggcggcagcgcccaggagattaaacggatcaacaagatcagaagaagacttgtgaaagacagcaacaccaagaaggccggcaagacaggccccatgaaaaccctgctggttagagtgatgacacccgatctgagagagcggctggaaaacctgagaaagaagcctgaaaatatcccccagcccatcagcaatacatctagagccaacctgaataagctgctgaccgattacaccgaaatgaagaaggcgatcctgcatgtgtactgggaagagttccagaaggaccctgtgggcctgatgagccgggtggcccagcctgccagcaagaagatcgatcagaacaagctgaaacctgagatggacgagaagggcaacctgaccaccgccggctttgcctgctctcagtgtggccagcccctgttcgtgtacaagctggagcaggtgtctgagaagggcaaggcttacaccaactacttcggacggtgcaatgtggccgagcacgaaaagctgatcctgctggcccagctgaagcccgagaaggatagcgacgaagccgtgacatatagcctgggaaagtttgggcagagggccctggatttctacagcattcatgtgaccaaggagtccacccaccccgtgaagcccctggcccagatcgccggaaacagatacgcctccggacctgtgggaaaggccctgagcgacgcatgtatgggcacaatcgcctccttcctgtctaagtaccaggacatcatcatcgaacaccagaaggtggtgaagggcaaccagaagagactggagagcctgcgggagctggccggcaaggaaaacctggaataccctagcgtgaccctgccacctcagcctcacaccaaggagggcgttgatgcctacaacgaagtgatcgcccgggtgcgaatgtgggtgaacctgaacctgtggcagaagctgaagctaagcagagatgatgccaagcctctgctgagactgaagggattcccttcctttcctctggtcgagagacaggccaacgaagtggactggtgggacatggtgtgtaacgtgaagaagctgatcaacgagaaaaaggaggatggcaaggtgttttggcagaatctggctggctacaagagacaggaagccctgagaccatacctgagcagcgaggaagatcggaagaagggaaagaaattcgctcggtaccagctgggcgacctgctgctgcacctggaaaagaagcacggcgaggactggggaaaggtgtacgacgaggcctgggagcggattgacaagaaagtggaaggcctgagcaagcacatcaagctggaagaggaacggagaagcgaggacgcccagagcaaggccgccctgaccgactggctgcgggctaaggccagcttcgtgatcgagggcctgaaggaggccgacaaggacgagttctgcagatgcgagctgaagctgcagaagtggtacggggacctgcggggaaagcccttcgccatcgaagccgagaacagcatcctggacatcagcggcttcagcaagcagtacaactgtgccttcatctggcagaaggacggcgtgaagaagctgaacctgtacctgatcatcaactacttcaagggcggcaagctgcggttcaagaagatcaaacctgaagccttcgaagccaacagattctacaccgtgatcaacaaaaagagcggcgagatcgtgcccatggaggtgaacttcaacttcgacgaccccaacctgatcatcctgcctctggcctttggcaagagacagggcagagaattcatctggaacgacctgctgtccctggaaaccggcagcctgaagctggccaacggaagagtgatcgagaagacactgtacaacagaagaacccggcaggatgagcctgccctgttcgtggccctgaccttcgagcggcgggaggtcctggactcctccaatatcaaaccaatgaacctgatcggcgtggcaagaggcgaaaacatccccgccgtgatcgccctgaccgaccccgagggctgcccactgagccggtttaaggatagcctgggaaacccaacccacatcctgagaatcggcgagagctataaggagaagcagcggaccatccaggccaagaaggaggtggagcagcggagagccggcggctacagccggaagtacgccagcaaagccaagaatctggcagacgatatggtgagaaacaccgctagagatctgctgtactacgccgtgacccaggatgccatgctgatcttcgccaacctgagccggggcttcggccggcagggcaagcggaccttcatggccgagagacagtacacacggatggaggactggctgaccgccaagctggcctacgagggcctgagcaagacctacctgtccaagacactggcccagtacacctccaagacatgcagcaactgtgggtttaccatcaccagcgccgactacgacagggtgctggagaagctgaagaagacagcaacaggctggatgaccacaattaacggcaaggagctgaaggtggagggccagattacctactacaacagatacaagagacagaacgtagtcaaggacctgtccgtcgagctggatagactgagcgaagaatctgtgaacaacgacatctcctcctggacaaagggcagaagcggagaagctctgagcctcctgaagaaaagattctcccatagacccgtgcaggagaagttcgtgtgcctgaactgcggcttcgagacacacgcagccgagcaagccgccctgaacatcgccagatcctggctgttcctgcggagccaggagtacaagaaataccagacaaacaagacaaccggcaacaccgataagagagccttcgtcgagacctggcagtccttttaccggaagaagcttaaggaggtgtggaaacctgccgtgcggtctggcggatctggcggaggctccacaagcgtgaccttcgacgacgtggccgtgaacttcaccatggaggagtgggccctgctggaccccagccagaagaagctgtacagggacgtgatgtgggagaacttcaggaacgtgaccgccatcggcaggaactgggacaaccagcagatcgaggaccagtacaagaactacaggaacaacctgaggaagaccagcgccgacttccagagcctgcagaagcacgccatgaccaaccccgaggagaagaccagccccaagaaaaagagaaaagtctaagctgccttctgcggggcttgccttctggccatgcccttcttctctcccttgcacctgtacctcttggtctttgaataaagcctgagtaggaaggctagcaaaaaaaaaaaaaaaaaaaaaaaaaaaaaaaaaaaaaaaaaaaaaaaaaaaaaaaaaaaaaaaaaaaaaaaaaaaaaaaa

SEQ ID NO: 6267 - RNA, 5797 nt, synthetic construct
  source 1..5797: mol_type = other RNA
aggaaataagagagaaaagaagagtaagaagaaatataagagccaccatggcccctaagaagaagcgtaaagtgagccggatggaacgcctcgtctacgaggtgcggcagaagtgcagaaacatcgaggacatctgcatctcctgcggatctctgaacgtgaccctggagcacccactgttcatcggcggcatgtgccagaactgtaaaaactgttttctggagtgtgcctatcaatacgacgatgacggctaccagagctactgcaccatctgttgcggcggaagagaggtgctgatgtgtggaaataacaactgctgccggtgcttctgcgtggaatgcgtggacctgctggtgggccccggcgccgcccaggccgctattaaggaagatccttggaactgctacatgtgcggccacaagggcacatacggcctgctgagacggagagaggactggcctagcagactgcagatgttcttcgccaataaccacgaccaggagttcgacccccctaaggtgtaccctcccgtccccgccgagaagagaaagcccatccgggtcctgagcctgttcgatggcatcgccaccggtctgctggtgctgaaggacctgggcatccaggtggataggtacattgcctccgaggtgtgcgaggactccatcaccgtgggaatggtgcgtcatcagggcaagatcatgtacgtgggcgacgtgcggagcgtgacacagaagcatatccaggagtggggccctttcgacctggtgatcggcggcagcccttgcaatgacctgagcatcgtgaacccagcccggaagggcctgtacgagggaaccggcagactgttcttcgagttttacagactgctgcacgacgcccggcctaaggaaggcgacgaccggcccttcttttggctgttcgagaatgtggtggccatgggagtcagcgacaagcgggatattagccggttcctggagagcaaccccgtgatgatcgatgccaaggaagtgagcgccgcccaccgggccagatacttctggggcaatctgcctggcatgaacagacccctggccagcaccgtgaacgacaagctggagctgcaggagtgcctggagcacggccggatcgccaagttcagcaaggtgagaaccatcaccacccgaagcaacagcatcaaacaaggcaaggaccagcactttcctgtgttcatgaacgagaaggaggacatcctgtggtgtaccgagatggagagagtgttcgggttcccagtccactacacagatgtcagcaacatgtctagactggccagacagagactgctgggaagaagctggtccgtccctgtgatcagacacctgttcgcccctctgaaggagtacttcgcctgcgtgagcagcggcaacagcaacgccaacagccggggccccagcttctctagcggcctggtgccactgtccctgagagggagccacatgggccccatggagatctacaaaaccgtgagcgcctggaagcggcagcctgtgcgcgtgctgagcctgtttcggaatatcgataaagtcctgaaaagcctgggattcctggagagcggctctggctccggcggtggcaccctgaagtacgtggaggatgtgacaaacgtggtcagacgggatgtggagaagtggggccccttcgatctggtgtacggcagcacccaacccctgggcagctcttgtgaccggtgccctggctggtacatgtttcagttccaccggatcctgcagtacgccctgccgagacaggagtcccagcggccattcttttggattttcatggacaacttgctgctgaccgaggatgaccaggaaactaccactcggttcctgcagaccgaagccgtgaccctgcaggacgtgagaggccgggactaccagaacgccatgcgggtgtggtccaacatccctggactgaaaagcaagcacgcacctctgacccctaaagaagaggagtacctgcaggcccaggtgcggagcagaagcaagctggacgcccctaaggtggatctgctggtgaagaattgcctcctgcccctgagagagtacttcaagtatttcagccagaatagtctgcccctgggcggcccaagcagcggcgcccctcctcccagcggcggcagcccagccggctccccaacctctaccgaggagggcacctctgagtccgccacccccgagagcggccctggcacctccaccgagcccagcgagggcagcgcacccggcagccctgccggcagccccacctccacagaggagggaaccagcaccgagcccagcgaaggcagcgccccaggcaccagcaccgagcctagtgagggcggctctggcggcggcagcgcccaggagattaaacggatcaacaagatcagaagaagacttgtgaaagacagcaacaccaagaaggccggcaagacaggccccatgaaaaccctgctggttagagtgatgacacccgatctgagagagcggctggaaaacctgagaaagaagcctgaaaatatcccccagcccatcagcaatacatctagagccaacctgaataagctgctgaccgattacaccgaaatgaagaaggcgatcctgcatgtgtactgggaagagttccagaaggaccctgtgggcctgatgagccgggtggcccagcctgccagcaagaagatcgatcagaacaagctgaaacctgagatggacgagaagggcaacctgaccaccgccggctttgcctgctctcagtgtggccagcccctgttcgtgtacaagctggagcaggtgtctgagaagggcaaggcttacaccaactacttcggacggtgcaatgtggccgagcacgaaaagctgatcctgctggcccagctgaagcccgagaaggatagcgacgaagccgtgacatatagcctgggaaagtttgggcagagggccctggatttctacagcattcatgtgaccaaggagtccacccaccccgtgaagcccctggcccagatcgccggaaacagatacgcctccggacctgtgggaaaggccctgagcgacgcatgtatgggcacaatcgcctccttcctgtctaagtaccaggacatcatcatcgaacaccagaaggtggtgaagggcaaccagaagagactggagagcctgcgggagctggccggcaaggaaaacctggaataccctagcgtgaccctgccacctcagcctcacaccaaggagggcgttgatgcctacaacgaagtgatcgcccgggtgcgaatgtgggtgaacctgaacctgtggcagaagctgaagctaagcagagatgatgccaagcctctgctgagactgaagggattcccttcctttcctctggtcgagagacaggccaacgaagtggactggtgggacatggtgtgtaacgtgaagaagctgatcaacgagaaaaaggaggatggcaaggtgttttggcagaatctggctggctacaagagacaggaagccctgagaccatacctgagcagcgaggaagatcggaagaagggaaagaaattcgctcggtaccagctgggcgacctgctgctgcacctggaaaagaagcacggcgaggactggggaaaggtgtacgacgaggcctgggagcggattgacaagaaagtggaaggcctgagcaagcacatcaagctggaagaggaacggagaagcgaggacgcccagagcaaggccgccctgaccgactggctgcgggctaaggccagcttcgtgatcgagggcctgaaggaggccgacaaggacgagttctgcagatgcgagctgaagctgcagaagtggtacggggacctgcggggaaagcccttcgccatcgaagccgagaacagcatcctggacatcagcggcttcagcaagcagtacaactgtgccttcatctggcagaaggacggcgtgaagaagctgaacctgtacctgatcatcaactacttcaagggcggcaagctgcggttcaagaagatcaaacctgaagccttcgaagccaacagattctacaccgtgatcaacaaaaagagcggcgagatcgtgcccatggaggtgaacttcaacttcgacgaccccaacctgatcatcctgcctctggcctttggcaagagacagggcagagaattcatctggaacgacctgctgtccctggaaaccggcagcctgaagctggccaacggaagagtgatcgagaagacactgtacaacagaagaacccggcaggatgagcctgccctgttcgtggccctgaccttcgagcggcgggaggtcctggactcctccaatatcaaaccaatgaacctgatcggcgtggcaagaggcgaaaacatccccgccgtgatcgccctgaccgaccccgagggctgcccactgagccggtttaaggatagcctgggaaacccaacccacatcctgagaatcggcgagagctataaggagaagcagcggaccatccaggccaagaaggaggtggagcagcggagagccggcggctacagccggaagtacgccagcaaagccaagaatctggcagacgatatggtgagaaacaccgctagagatctgctgtactacgccgtgacccaggatgccatgctgatcttcgccaacctgagccggggcttcggccggcagggcaagcggaccttcatggccgagagacagtacacacggatggaggactggctgaccgccaagctggcctacgagggcctgagcaagacctacctgtccaagacactggcccagtacacctccaagacatgcagcaactgtgggtttaccatcaccagcgccgactacgacagggtgctggagaagctgaagaagacagcaacaggctggatgaccacaattaacggcaaggagctgaaggtggagggccagattacctactacaacagatacaagagacagaacgtagtcaaggacctgtccgtcgagctggatagactgagcgaagaatctgtgaacaacgacatctcctcctggacaaagggcagaagcggagaagctctgagcctcctgaagaaaagattctcccatagacccgtgcaggagaagttcgtgtgcctgaactgcggcttcgagacacacgcagccgagcaagccgccctgaacatcgccagatcctggctgttcctgcggagccaggagtacaagaaataccagacaaacaagacaaccggcaacaccgataagagagccttcgtcgagacctggcagtccttttaccggaagaagcttaaggaggtgtggaaacctgccgtgcggtctggcggatctggcggaggctccacaagccccaaggtgcccgtgagcttcgaggacgtggccatgtacttcaccaagaccgagtggaagctgctggaccacaggcagaggaagctgtacaagcaggtgatgctggagaactaccaccacctggtgagcctgggcttcagcttcgccaagccccagctggtgatccagctggagcagggccagaagccctgggtggccgacgtgcacaggatgaggatcaccaccggcatgcaggccggcgacaccagccccaagaaaaagagaaaagtctaagctgccttctgcggggcttgccttctggccatgcccttcttctctcccttgcacctgtacctcttggtctttgaataaagcctgagtaggaaggctagcaaaaaaaaaaaaaaaaaaaaaaaaaaaaaaaaaaaaaaaaaaaaaaaaaaaaaaaaaaaaaaaaaaaaaaaaaaaaaaaa

SEQ ID NO: 6268 - RNA, 5797 nt, synthetic construct
  source 1..5797: mol_type = other RNA
aggaaataagagagaaaagaagagtaagaagaaatataagagccaccatggcccctaagaagaagcgtaaagtgagccggatggaacgcctcgtctacgaggtgcggcagaagtgcagaaacatcgaggacatctgcatctcctgcggatctctgaacgtgaccctggagcacccactgttcatcggcggcatgtgccagaactgtaaaaactgttttctggagtgtgcctatcaatacgacgatgacggctaccagagctactgcaccatctgttgcggcggaagagaggtgctgatgtgtggaaataacaactgctgccggtgcttctgcgtggaatgcgtggacctgctggtgggccccggcgccgcccaggccgctattaaggaagatccttggaactgctacatgtgcggccacaagggcacatacggcctgctgagacggagagaggactggcctagcagactgcagatgttcttcgccaataaccacgaccaggagttcgacccccctaaggtgtaccctcccgtccccgccgagaagagaaagcccatccgggtcctgagcctgttcgatggcatcgccaccggtctgctggtgctgaaggacctgggcatccaggtggataggtacattgcctccgaggtgtgcgaggactccatcaccgtgggaatggtgcgtcatcagggcaagatcatgtacgtgggcgacgtgcggagcgtgacacagaagcatatccaggagtggggccctttcgacctggtgatcggcggcagcccttgcaatgacctgagcatcgtgaacccagcccggaagggcctgtacgagggaaccggcagactgttcttcgagttttacagactgctgcacgacgcccggcctaaggaaggcgacgaccggcccttcttttggctgttcgagaatgtggtggccatgggagtcagcgacaagcgggatattagccggttcctggagagcaaccccgtgatgatcgatgccaaggaagtgagcgccgcccaccgggccagatacttctggggcaatctgcctggcatgaacagacccctggccagcaccgtgaacgacaagctggagctgcaggagtgcctggagcacggccggatcgccaagttcagcaaggtgagaaccatcaccacccgaagcaacagcatcaaacaaggcaaggaccagcactttcctgtgttcatgaacgagaaggaggacatcctgtggtgtaccgagatggagagagtgttcgggttcccagtccactacacagatgtcagcaacatgtctagactggccagacagagactgctgggaagaagctggtccgtccctgtgatcagacacctgttcgcccctctgaaggagtacttcgcctgcgtgagcagcggcaacagcaacgccaacagccggggccccagcttctctagcggcctggtgccactgtccctgagagggagccacatgggccccatggagatctacaaaaccgtgagcgcctggaagcggcagcctgtgcgcgtgctgagcctgtttcggaatatcgataaagtcctgaaaagcctgggattcctggagagcggctctggctccggcggtggcaccctgaagtacgtggaggatgtgacaaacgtggtcagacgggatgtggagaagtggggccccttcgatctggtgtacggcagcacccaacccctgggcagctcttgtgaccggtgccctggctggtacatgtttcagttccaccggatcctgcagtacgccctgccgagacaggagtcccagcggccattcttttggattttcatggacaacttgctgctgaccgaggatgaccaggaaactaccactcggttcctgcagaccgaagccgtgaccctgcaggacgtgagaggccgggactaccagaacgccatgcgggtgtggtccaacatccctggactgaaaagcaagcacgcacctctgacccctaaagaagaggagtacctgcaggcccaggtgcggagcagaagcaagctggacgcccctaaggtggatctgctggtgaagaattgcctcctgcccctgagagagtacttcaagtatttcagccagaatagtctgcccctgggcggcccaagcagcggcgcccctcctcccagcggcggcagcccagccggctccccaacctctaccgaggagggcacctctgagtccgccacccccgagagcggccctggcacctccaccgagcccagcgagggcagcgcacccggcagccctgccggcagccccacctccacagaggagggaaccagcaccgagcccagcgaaggcagcgccccaggcaccagcaccgagcctagtgagggcggctctggcggcggcagcgcccaggagattaaacggatcaacaagatcagaagaagacttgtgaaagacagcaacaccaagaaggccggcaagacaggccccatgaaaaccctgctggttagagtgatgacacccgatctgagagagcggctggaaaacctgagaaagaagcctgaaaatatcccccagcccatcagcaatacatctagagccaacctgaataagctgctgaccgattacaccgaaatgaagaaggcgatcctgcatgtgtactgggaagagttccagaaggaccctgtgggcctgatgagccgggtggcccagcctgccagcaagaagatcgatcagaacaagctgaaacctgagatggacgagaagggcaacctgaccaccgccggctttgcctgctctcagtgtggccagcccctgttcgtgtacaagctggagcaggtgtctgagaagggcaaggcttacaccaactacttcggacggtgcaatgtggccgagcacgaaaagctgatcctgctggcccagctgaagcccgagaaggatagcgacgaagccgtgacatatagcctgggaaagtttgggcagagggccctggatttctacagcattcatgtgaccaaggagtccacccaccccgtgaagcccctggcccagatcgccggaaacagatacgcctccggacctgtgggaaaggccctgagcgacgcatgtatgggcacaatcgcctccttcctgtctaagtaccaggacatcatcatcgaacaccagaaggtggtgaagggcaaccagaagagactggagagcctgcgggagctggccggcaaggaaaacctggaataccctagcgtgaccctgccacctcagcctcacaccaaggagggcgttgatgcctacaacgaagtgatcgcccgggtgcgaatgtgggtgaacctgaacctgtggcagaagctgaagctaagcagagatgatgccaagcctctgctgagactgaagggattcccttcctttcctctggtcgagagacaggccaacgaagtggactggtgggacatggtgtgtaacgtgaagaagctgatcaacgagaaaaaggaggatggcaaggtgttttggcagaatctggctggctacaagagacaggaagccctgagaccatacctgagcagcgaggaagatcggaagaagggaaagaaattcgctcggtaccagctgggcgacctgctgctgcacctggaaaagaagcacggcgaggactggggaaaggtgtacgacgaggcctgggagcggattgacaagaaagtggaaggcctgagcaagcacatcaagctggaagaggaacggagaagcgaggacgcccagagcaaggccgccctgaccgactggctgcgggctaaggccagcttcgtgatcgagggcctgaaggaggccgacaaggacgagttctgcagatgcgagctgaagctgcagaagtggtacggggacctgcggggaaagcccttcgccatcgaagccgagaacagcatcctggacatcagcggcttcagcaagcagtacaactgtgccttcatctggcagaaggacggcgtgaagaagctgaacctgtacctgatcatcaactacttcaagggcggcaagctgcggttcaagaagatcaaacctgaagccttcgaagccaacagattctacaccgtgatcaacaaaaagagcggcgagatcgtgcccatggaggtgaacttcaacttcgacgaccccaacctgatcatcctgcctctggcctttggcaagagacagggcagagaattcatctggaacgacctgctgtccctggaaaccggcagcctgaagctggccaacggaagagtgatcgagaagacactgtacaacagaagaacccggcaggatgagcctgccctgttcgtggccctgaccttcgagcggcgggaggtcctggactcctccaatatcaaaccaatgaacctgatcggcgtggcaagaggcgaaaacatccccgccgtgatcgccctgaccgaccccgagggctgcccactgagccggtttaaggatagcctgggaaacccaacccacatcctgagaatcggcgagagctataaggagaagcagcggaccatccaggccaagaaggaggtggagcagcggagagccggcggctacagccggaagtacgccagcaaagccaagaatctggcagacgatatggtgagaaacaccgctagagatctgctgtactacgccgtgacccaggatgccatgctgatcttcgccaacctgagccggggcttcggccggcagggcaagcggaccttcatggccgagagacagtacacacggatggaggactggctgaccgccaagctggcctacgagggcctgagcaagacctacctgtccaagacactggcccagtacacctccaagacatgcagcaactgtgggtttaccatcaccagcgccgactacgacagggtgctggagaagctgaagaagacagcaacaggctggatgaccacaattaacggcaaggagctgaaggtggagggccagattacctactacaacagatacaagagacagaacgtagtcaaggacctgtccgtcgagctggatagactgagcgaagaatctgtgaacaacgacatctcctcctggacaaagggcagaagcggagaagctctgagcctcctgaagaaaagattctcccatagacccgtgcaggagaagttcgtgtgcctgaactgcggcttcgagacacacgcagccgagcaagccgccctgaacatcgccagatcctggctgttcctgcggagccaggagtacaagaaataccagacaaacaagacaaccggcaacaccgataagagagccttcgtcgagacctggcagtccttttaccggaagaagcttaaggaggtgtggaaacctgccgtgcggtctggcggatctggcggaggctccacaagcagccagggcagcatcaccttcaaggacgtggccgtggacttcacccaggaggagtggtgcctgctggaccacagccagaaggagctgtacctggaggtgatgctggagaacgtgcagaacctgctgagcgtgggcctgcccgtgcccagggagaacttcatcagctgcctgcagcagggcaaggccccctggctgctggcccagaaggacagcaggaacagctgcctggaggccaagaccaacaccagccccaagaaaaagagaaaagtctaagctgccttctgcggggcttgccttctggccatgcccttcttctctcccttgcacctgtacctcttggtctttgaataaagcctgagtaggaaggctagcaaaaaaaaaaaaaaaaaaaaaaaaaaaaaaaaaaaaaaaaaaaaaaaaaaaaaaaaaaaaaaaaaaaaaaaaaaaaaaaa

SEQ ID NO: 6269 - RNA, 5797 nt, synthetic construct
  source 1..5797: mol_type = other RNA
aggaaataagagagaaaagaagagtaagaagaaatataagagccaccatggcccctaagaagaagcgtaaagtgagccggatggaacgcctcgtctacgaggtgcggcagaagtgcagaaacatcgaggacatctgcatctcctgcggatctctgaacgtgaccctggagcacccactgttcatcggcggcatgtgccagaactgtaaaaactgttttctggagtgtgcctatcaatacgacgatgacggctaccagagctactgcaccatctgttgcggcggaagagaggtgctgatgtgtggaaataacaactgctgccggtgcttctgcgtggaatgcgtggacctgctggtgggccccggcgccgcccaggccgctattaaggaagatccttggaactgctacatgtgcggccacaagggcacatacggcctgctgagacggagagaggactggcctagcagactgcagatgttcttcgccaataaccacgaccaggagttcgacccccctaaggtgtaccctcccgtccccgccgagaagagaaagcccatccgggtcctgagcctgttcgatggcatcgccaccggtctgctggtgctgaaggacctgggcatccaggtggataggtacattgcctccgaggtgtgcgaggactccatcaccgtgggaatggtgcgtcatcagggcaagatcatgtacgtgggcgacgtgcggagcgtgacacagaagcatatccaggagtggggccctttcgacctggtgatcggcggcagcccttgcaatgacctgagcatcgtgaacccagcccggaagggcctgtacgagggaaccggcagactgttcttcgagttttacagactgctgcacgacgcccggcctaaggaaggcgacgaccggcccttcttttggctgttcgagaatgtggtggccatgggagtcagcgacaagcgggatattagccggttcctggagagcaaccccgtgatgatcgatgccaaggaagtgagcgccgcccaccgggccagatacttctggggcaatctgcctggcatgaacagacccctggccagcaccgtgaacgacaagctggagctgcaggagtgcctggagcacggccggatcgccaagttcagcaaggtgagaaccatcaccacccgaagcaacagcatcaaacaaggcaaggaccagcactttcctgtgttcatgaacgagaaggaggacatcctgtggtgtaccgagatggagagagtgttcgggttcccagtccactacacagatgtcagcaacatgtctagactggccagacagagactgctgggaagaagctggtccgtccctgtgatcagacacctgttcgcccctctgaaggagtacttcgcctgcgtgagcagcggcaacagcaacgccaacagccggggccccagcttctctagcggcctggtgccactgtccctgagagggagccacatgggccccatggagatctacaaaaccgtgagcgcctggaagcggcagcctgtgcgcgtgctgagcctgtttcggaatatcgataaagtcctgaaaagcctgggattcctggagagcggctctggctccggcggtggcaccctgaagtacgtggaggatgtgacaaacgtggtcagacgggatgtggagaagtggggccccttcgatctggtgtacggcagcacccaacccctgggcagctcttgtgaccggtgccctggctggtacatgtttcagttccaccggatcctgcagtacgccctgccgagacaggagtcccagcggccattcttttggattttcatggacaacttgctgctgaccgaggatgaccaggaaactaccactcggttcctgcagaccgaagccgtgaccctgcaggacgtgagaggccgggactaccagaacgccatgcgggtgtggtccaacatccctggactgaaaagcaagcacgcacctctgacccctaaagaagaggagtacctgcaggcccaggtgcggagcagaagcaagctggacgcccctaaggtggatctgctggtgaagaattgcctcctgcccctgagagagtacttcaagtatttcagccagaatagtctgcccctgggcggcccaagcagcggcgcccctcctcccagcggcggcagcccagccggctccccaacctctaccgaggagggcacctctgagtccgccacccccgagagcggccctggcacctccaccgagcccagcgagggcagcgcacccggcagccctgccggcagccccacctccacagaggagggaaccagcaccgagcccagcgaaggcagcgccccaggcaccagcaccgagcctagtgagggcggctctggcggcggcagcgcccaggagattaaacggatcaacaagatcagaagaagacttgtgaaagacagcaacaccaagaaggccggcaagacaggccccatgaaaaccctgctggttagagtgatgacacccgatctgagagagcggctggaaaacctgagaaagaagcctgaaaatatcccccagcccatcagcaatacatctagagccaacctgaataagctgctgaccgattacaccgaaatgaagaaggcgatcctgcatgtgtactgggaagagttccagaaggaccctgtgggcctgatgagccgggtggcccagcctgccagcaagaagatcgatcagaacaagctgaaacctgagatggacgagaagggcaacctgaccaccgccggctttgcctgctctcagtgtggccagcccctgttcgtgtacaagctggagcaggtgtctgagaagggcaaggcttacaccaactacttcggacggtgcaatgtggccgagcacgaaaagctgatcctgctggcccagctgaagcccgagaaggatagcgacgaagccgtgacatatagcctgggaaagtttgggcagagggccctggatttctacagcattcatgtgaccaaggagtccacccaccccgtgaagcccctggcccagatcgccggaaacagatacgcctccggacctgtgggaaaggccctgagcgacgcatgtatgggcacaatcgcctccttcctgtctaagtaccaggacatcatcatcgaacaccagaaggtggtgaagggcaaccagaagagactggagagcctgcgggagctggccggcaaggaaaacctggaataccctagcgtgaccctgccacctcagcctcacaccaaggagggcgttgatgcctacaacgaagtgatcgcccgggtgcgaatgtgggtgaacctgaacctgtggcagaagctgaagctaagcagagatgatgccaagcctctgctgagactgaagggattcccttcctttcctctggtcgagagacaggccaacgaagtggactggtgggacatggtgtgtaacgtgaagaagctgatcaacgagaaaaaggaggatggcaaggtgttttggcagaatctggctggctacaagagacaggaagccctgagaccatacctgagcagcgaggaagatcggaagaagggaaagaaattcgctcggtaccagctgggcgacctgctgctgcacctggaaaagaagcacggcgaggactggggaaaggtgtacgacgaggcctgggagcggattgacaagaaagtggaaggcctgagcaagcacatcaagctggaagaggaacggagaagcgaggacgcccagagcaaggccgccctgaccgactggctgcgggctaaggccagcttcgtgatcgagggcctgaaggaggccgacaaggacgagttctgcagatgcgagctgaagctgcagaagtggtacggggacctgcggggaaagcccttcgccatcgaagccgagaacagcatcctggacatcagcggcttcagcaagcagtacaactgtgccttcatctggcagaaggacggcgtgaagaagctgaacctgtacctgatcatcaactacttcaagggcggcaagctgcggttcaagaagatcaaacctgaagccttcgaagccaacagattctacaccgtgatcaacaaaaagagcggcgagatcgtgcccatggaggtgaacttcaacttcgacgaccccaacctgatcatcctgcctctggcctttggcaagagacagggcagagaattcatctggaacgacctgctgtccctggaaaccggcagcctgaagctggccaacggaagagtgatcgagaagacactgtacaacagaagaacccggcaggatgagcctgccctgttcgtggccctgaccttcgagcggcgggaggtcctggactcctccaatatcaaaccaatgaacctgatcggcgtggcaagaggcgaaaacatccccgccgtgatcgccctgaccgaccccgagggctgcccactgagccggtttaaggatagcctgggaaacccaacccacatcctgagaatcggcgagagctataaggagaagcagcggaccatccaggccaagaaggaggtggagcagcggagagccggcggctacagccggaagtacgccagcaaagccaagaatctggcagacgatatggtgagaaacaccgctagagatctgctgtactacgccgtgacccaggatgccatgctgatcttcgccaacctgagccggggcttcggccggcagggcaagcggaccttcatggccgagagacagtacacacggatggaggactggctgaccgccaagctggcctacgagggcctgagcaagacctacctgtccaagacactggcccagtacacctccaagacatgcagcaactgtgggtttaccatcaccagcgccgactacgacagggtgctggagaagctgaagaagacagcaacaggctggatgaccacaattaacggcaaggagctgaaggtggagggccagattacctactacaacagatacaagagacagaacgtagtcaaggacctgtccgtcgagctggatagactgagcgaagaatctgtgaacaacgacatctcctcctggacaaagggcagaagcggagaagctctgagcctcctgaagaaaagattctcccatagacccgtgcaggagaagttcgtgtgcctgaactgcggcttcgagacacacgcagccgagcaagccgccctgaacatcgccagatcctggctgttcctgcggagccaggagtacaagaaataccagacaaacaagacaaccggcaacaccgataagagagccttcgtcgagacctggcagtccttttaccggaagaagcttaaggaggtgtggaaacctgccgtgcggtctggcggatctggcggaggctccacaagcccccagaagagcgtgaccttcgaggacgtggccgtgtacttcacccaggccgagtgggacggcctgagccccgcccagaggaccctgtacagggacgtgatgctggagaactacggcaacgtggccagcctgggcttccccctgctgaagcccgccgtgatcagccagctggagggcggcagcgagctgggcggcagcagccccctggccgccggcaccggcctgcagggcctgcagaccgtgaccagccccaagaaaaagagaaaagtctaagctgccttctgcggggcttgccttctggccatgcccttcttctctcccttgcacctgtacctcttggtctttgaataaagcctgagtaggaaggctagcaaaaaaaaaaaaaaaaaaaaaaaaaaaaaaaaaaaaaaaaaaaaaaaaaaaaaaaaaaaaaaaaaaaaaaaaaaaaaaaa

SEQ ID NO: 6270 - RNA, 5797 nt, synthetic construct
  source 1..5797: mol_type = other RNA
aggaaataagagagaaaagaagagtaagaagaaatataagagccaccatggcccctaagaagaagcgtaaagtgagccggatggaacgcctcgtctacgaggtgcggcagaagtgcagaaacatcgaggacatctgcatctcctgcggatctctgaacgtgaccctggagcacccactgttcatcggcggcatgtgccagaactgtaaaaactgttttctggagtgtgcctatcaatacgacgatgacggctaccagagctactgcaccatctgttgcggcggaagagaggtgctgatgtgtggaaataacaactgctgccggtgcttctgcgtggaatgcgtggacctgctggtgggccccggcgccgcccaggccgctattaaggaagatccttggaactgctacatgtgcggccacaagggcacatacggcctgctgagacggagagaggactggcctagcagactgcagatgttcttcgccaataaccacgaccaggagttcgacccccctaaggtgtaccctcccgtccccgccgagaagagaaagcccatccgggtcctgagcctgttcgatggcatcgccaccggtctgctggtgctgaaggacctgggcatccaggtggataggtacattgcctccgaggtgtgcgaggactccatcaccgtgggaatggtgcgtcatcagggcaagatcatgtacgtgggcgacgtgcggagcgtgacacagaagcatatccaggagtggggccctttcgacctggtgatcggcggcagcccttgcaatgacctgagcatcgtgaacccagcccggaagggcctgtacgagggaaccggcagactgttcttcgagttttacagactgctgcacgacgcccggcctaaggaaggcgacgaccggcccttcttttggctgttcgagaatgtggtggccatgggagtcagcgacaagcgggatattagccggttcctggagagcaaccccgtgatgatcgatgccaaggaagtgagcgccgcccaccgggccagatacttctggggcaatctgcctggcatgaacagacccctggccagcaccgtgaacgacaagctggagctgcaggagtgcctggagcacggccggatcgccaagttcagcaaggtgagaaccatcaccacccgaagcaacagcatcaaacaaggcaaggaccagcactttcctgtgttcatgaacgagaaggaggacatcctgtggtgtaccgagatggagagagtgttcgggttcccagtccactacacagatgtcagcaacatgtctagactggccagacagagactgctgggaagaagctggtccgtccctgtgatcagacacctgttcgcccctctgaaggagtacttcgcctgcgtgagcagcggcaacagcaacgccaacagccggggccccagcttctctagcggcctggtgccactgtccctgagagggagccacatgggccccatggagatctacaaaaccgtgagcgcctggaagcggcagcctgtgcgcgtgctgagcctgtttcggaatatcgataaagtcctgaaaagcctgggattcctggagagcggctctggctccggcggtggcaccctgaagtacgtggaggatgtgacaaacgtggtcagacgggatgtggagaagtggggccccttcgatctggtgtacggcagcacccaacccctgggcagctcttgtgaccggtgccctggctggtacatgtttcagttccaccggatcctgcagtacgccctgccgagacaggagtcccagcggccattcttttggattttcatggacaacttgctgctgaccgaggatgaccaggaaactaccactcggttcctgcagaccgaagccgtgaccctgcaggacgtgagaggccgggactaccagaacgccatgcgggtgtggtccaacatccctggactgaaaagcaagcacgcacctctgacccctaaagaagaggagtacctgcaggcccaggtgcggagcagaagcaagctggacgcccctaaggtggatctgctggtgaagaattgcctcctgcccctgagagagtacttcaagtatttcagccagaatagtctgcccctgggcggcccaagcagcggcgcccctcctcccagcggcggcagcccagccggctccccaacctctaccgaggagggcacctctgagtccgccacccccgagagcggccctggcacctccaccgagcccagcgagggcagcgcacccggcagccctgccggcagccccacctccacagaggagggaaccagcaccgagcccagcgaaggcagcgccccaggcaccagcaccgagcctagtgagggcggctctggcggcggcagcgcccaggagattaaacggatcaacaagatcagaagaagacttgtgaaagacagcaacaccaagaaggccggcaagacaggccccatgaaaaccctgctggttagagtgatgacacccgatctgagagagcggctggaaaacctgagaaagaagcctgaaaatatcccccagcccatcagcaatacatctagagccaacctgaataagctgctgaccgattacaccgaaatgaagaaggcgatcctgcatgtgtactgggaagagttccagaaggaccctgtgggcctgatgagccgggtggcccagcctgccagcaagaagatcgatcagaacaagctgaaacctgagatggacgagaagggcaacctgaccaccgccggctttgcctgctctcagtgtggccagcccctgttcgtgtacaagctggagcaggtgtctgagaagggcaaggcttacaccaactacttcggacggtgcaatgtggccgagcacgaaaagctgatcctgctggcccagctgaagcccgagaaggatagcgacgaagccgtgacatatagcctgggaaagtttgggcagagggccctggatttctacagcattcatgtgaccaaggagtccacccaccccgtgaagcccctggcccagatcgccggaaacagatacgcctccggacctgtgggaaaggccctgagcgacgcatgtatgggcacaatcgcctccttcctgtctaagtaccaggacatcatcatcgaacaccagaaggtggtgaagggcaaccagaagagactggagagcctgcgggagctggccggcaaggaaaacctggaataccctagcgtgaccctgccacctcagcctcacaccaaggagggcgttgatgcctacaacgaagtgatcgcccgggtgcgaatgtgggtgaacctgaacctgtggcagaagctgaagctaagcagagatgatgccaagcctctgctgagactgaagggattcccttcctttcctctggtcgagagacaggccaacgaagtggactggtgggacatggtgtgtaacgtgaagaagctgatcaacgagaaaaaggaggatggcaaggtgttttggcagaatctggctggctacaagagacaggaagccctgagaccatacctgagcagcgaggaagatcggaagaagggaaagaaattcgctcggtaccagctgggcgacctgctgctgcacctggaaaagaagcacggcgaggactggggaaaggtgtacgacgaggcctgggagcggattgacaagaaagtggaaggcctgagcaagcacatcaagctggaagaggaacggagaagcgaggacgcccagagcaaggccgccctgaccgactggctgcgggctaaggccagcttcgtgatcgagggcctgaaggaggccgacaaggacgagttctgcagatgcgagctgaagctgcagaagtggtacggggacctgcggggaaagcccttcgccatcgaagccgagaacagcatcctggacatcagcggcttcagcaagcagtacaactgtgccttcatctggcagaaggacggcgtgaagaagctgaacctgtacctgatcatcaactacttcaagggcggcaagctgcggttcaagaagatcaaacctgaagccttcgaagccaacagattctacaccgtgatcaacaaaaagagcggcgagatcgtgcccatggaggtgaacttcaacttcgacgaccccaacctgatcatcctgcctctggcctttggcaagagacagggcagagaattcatctggaacgacctgctgtccctggaaaccggcagcctgaagctggccaacggaagagtgatcgagaagacactgtacaacagaagaacccggcaggatgagcctgccctgttcgtggccctgaccttcgagcggcgggaggtcctggactcctccaatatcaaaccaatgaacctgatcggcgtggcaagaggcgaaaacatccccgccgtgatcgccctgaccgaccccgagggctgcccactgagccggtttaaggatagcctgggaaacccaacccacatcctgagaatcggcgagagctataaggagaagcagcggaccatccaggccaagaaggaggtggagcagcggagagccggcggctacagccggaagtacgccagcaaagccaagaatctggcagacgatatggtgagaaacaccgctagagatctgctgtactacgccgtgacccaggatgccatgctgatcttcgccaacctgagccggggcttcggccggcagggcaagcggaccttcatggccgagagacagtacacacggatggaggactggctgaccgccaagctggcctacgagggcctgagcaagacctacctgtccaagacactggcccagtacacctccaagacatgcagcaactgtgggtttaccatcaccagcgccgactacgacagggtgctggagaagctgaagaagacagcaacaggctggatgaccacaattaacggcaaggagctgaaggtggagggccagattacctactacaacagatacaagagacagaacgtagtcaaggacctgtccgtcgagctggatagactgagcgaagaatctgtgaacaacgacatctcctcctggacaaagggcagaagcggagaagctctgagcctcctgaagaaaagattctcccatagacccgtgcaggagaagttcgtgtgcctgaactgcggcttcgagacacacgcagccgagcaagccgccctgaacatcgccagatcctggctgttcctgcggagccaggagtacaagaaataccagacaaacaagacaaccggcaacaccgataagagagccttcgtcgagacctggcagtccttttaccggaagaagcttaaggaggtgtggaaacctgccgtgcggtctggcggatctggcggaggctccacaagcgcccaggtgctggtgaccttccaggacgtggccgtggacttcacccaggaggagtggaggctgctggaccccggccagaaggagctgtacaaggaggtgatgctggagaacgtgcagaacgtgctgagcctgggcctgcccgtgcccagggaggactggttcttccacttccacgagggcggcgacccctggatgctggagggcaagggccccagcatcagcaggctggacgaggagaggcacaccagccccaagaaaaagagaaaagtctaagctgccttctgcggggcttgccttctggccatgcccttcttctctcccttgcacctgtacctcttggtctttgaataaagcctgagtaggaaggctagcaaaaaaaaaaaaaaaaaaaaaaaaaaaaaaaaaaaaaaaaaaaaaaaaaaaaaaaaaaaaaaaaaaaaaaaaaaaaaaaa

SEQ ID NO: 6271 - RNA, 5797 nt, synthetic construct
  source 1..5797: mol_type = other RNA
aggaaataagagagaaaagaagagtaagaagaaatataagagccaccatggcccctaagaagaagcgtaaagtgagccggatggaacgcctcgtctacgaggtgcggcagaagtgcagaaacatcgaggacatctgcatctcctgcggatctctgaacgtgaccctggagcacccactgttcatcggcggcatgtgccagaactgtaaaaactgttttctggagtgtgcctatcaatacgacgatgacggctaccagagctactgcaccatctgttgcggcggaagagaggtgctgatgtgtggaaataacaactgctgccggtgcttctgcgtggaatgcgtggacctgctggtgggccccggcgccgcccaggccgctattaaggaagatccttggaactgctacatgtgcggccacaagggcacatacggcctgctgagacggagagaggactggcctagcagactgcagatgttcttcgccaataaccacgaccaggagttcgacccccctaaggtgtaccctcccgtccccgccgagaagagaaagcccatccgggtcctgagcctgttcgatggcatcgccaccggtctgctggtgctgaaggacctgggcatccaggtggataggtacattgcctccgaggtgtgcgaggactccatcaccgtgggaatggtgcgtcatcagggcaagatcatgtacgtgggcgacgtgcggagcgtgacacagaagcatatccaggagtggggccctttcgacctggtgatcggcggcagcccttgcaatgacctgagcatcgtgaacccagcccggaagggcctgtacgagggaaccggcagactgttcttcgagttttacagactgctgcacgacgcccggcctaaggaaggcgacgaccggcccttcttttggctgttcgagaatgtggtggccatgggagtcagcgacaagcgggatattagccggttcctggagagcaaccccgtgatgatcgatgccaaggaagtgagcgccgcccaccgggccagatacttctggggcaatctgcctggcatgaacagacccctggccagcaccgtgaacgacaagctggagctgcaggagtgcctggagcacggccggatcgccaagttcagcaaggtgagaaccatcaccacccgaagcaacagcatcaaacaaggcaaggaccagcactttcctgtgttcatgaacgagaaggaggacatcctgtggtgtaccgagatggagagagtgttcgggttcccagtccactacacagatgtcagcaacatgtctagactggccagacagagactgctgggaagaagctggtccgtccctgtgatcagacacctgttcgcccctctgaaggagtacttcgcctgcgtgagcagcggcaacagcaacgccaacagccggggccccagcttctctagcggcctggtgccactgtccctgagagggagccacatgggccccatggagatctacaaaaccgtgagcgcctggaagcggcagcctgtgcgcgtgctgagcctgtttcggaatatcgataaagtcctgaaaagcctgggattcctggagagcggctctggctccggcggtggcaccctgaagtacgtggaggatgtgacaaacgtggtcagacgggatgtggagaagtggggccccttcgatctggtgtacggcagcacccaacccctgggcagctcttgtgaccggtgccctggctggtacatgtttcagttccaccggatcctgcagtacgccctgccgagacaggagtcccagcggccattcttttggattttcatggacaacttgctgctgaccgaggatgaccaggaaactaccactcggttcctgcagaccgaagccgtgaccctgcaggacgtgagaggccgggactaccagaacgccatgcgggtgtggtccaacatccctggactgaaaagcaagcacgcacctctgacccctaaagaagaggagtacctgcaggcccaggtgcggagcagaagcaagctggacgcccctaaggtggatctgctggtgaagaattgcctcctgcccctgagagagtacttcaagtatttcagccagaatagtctgcccctgggcggcccaagcagcggcgcccctcctcccagcggcggcagcccagccggctccccaacctctaccgaggagggcacctctgagtccgccacccccgagagcggccctggcacctccaccgagcccagcgagggcagcgcacccggcagccctgccggcagccccacctccacagaggagggaaccagcaccgagcccagcgaaggcagcgccccaggcaccagcaccgagcctagtgagggcggctctggcggcggcagcgcccaggagattaaacggatcaacaagatcagaagaagacttgtgaaagacagcaacaccaagaaggccggcaagacaggccccatgaaaaccctgctggttagagtgatgacacccgatctgagagagcggctggaaaacctgagaaagaagcctgaaaatatcccccagcccatcagcaatacatctagagccaacctgaataagctgctgaccgattacaccgaaatgaagaaggcgatcctgcatgtgtactgggaagagttccagaaggaccctgtgggcctgatgagccgggtggcccagcctgccagcaagaagatcgatcagaacaagctgaaacctgagatggacgagaagggcaacctgaccaccgccggctttgcctgctctcagtgtggccagcccctgttcgtgtacaagctggagcaggtgtctgagaagggcaaggcttacaccaactacttcggacggtgcaatgtggccgagcacgaaaagctgatcctgctggcccagctgaagcccgagaaggatagcgacgaagccgtgacatatagcctgggaaagtttgggcagagggccctggatttctacagcattcatgtgaccaaggagtccacccaccccgtgaagcccctggcccagatcgccggaaacagatacgcctccggacctgtgggaaaggccctgagcgacgcatgtatgggcacaatcgcctccttcctgtctaagtaccaggacatcatcatcgaacaccagaaggtggtgaagggcaaccagaagagactggagagcctgcgggagctggccggcaaggaaaacctggaataccctagcgtgaccctgccacctcagcctcacaccaaggagggcgttgatgcctacaacgaagtgatcgcccgggtgcgaatgtgggtgaacctgaacctgtggcagaagctgaagctaagcagagatgatgccaagcctctgctgagactgaagggattcccttcctttcctctggtcgagagacaggccaacgaagtggactggtgggacatggtgtgtaacgtgaagaagctgatcaacgagaaaaaggaggatggcaaggtgttttggcagaatctggctggctacaagagacaggaagccctgagaccatacctgagcagcgaggaagatcggaagaagggaaagaaattcgctcggtaccagctgggcgacctgctgctgcacctggaaaagaagcacggcgaggactggggaaaggtgtacgacgaggcctgggagcggattgacaagaaagtggaaggcctgagcaagcacatcaagctggaagaggaacggagaagcgaggacgcccagagcaaggccgccctgaccgactggctgcgggctaaggccagcttcgtgatcgagggcctgaaggaggccgacaaggacgagttctgcagatgcgagctgaagctgcagaagtggtacggggacctgcggggaaagcccttcgccatcgaagccgagaacagcatcctggacatcagcggcttcagcaagcagtacaactgtgccttcatctggcagaaggacggcgtgaagaagctgaacctgtacctgatcatcaactacttcaagggcggcaagctgcggttcaagaagatcaaacctgaagccttcgaagccaacagattctacaccgtgatcaacaaaaagagcggcgagatcgtgcccatggaggtgaacttcaacttcgacgaccccaacctgatcatcctgcctctggcctttggcaagagacagggcagagaattcatctggaacgacctgctgtccctggaaaccggcagcctgaagctggccaacggaagagtgatcgagaagacactgtacaacagaagaacccggcaggatgagcctgccctgttcgtggccctgaccttcgagcggcgggaggtcctggactcctccaatatcaaaccaatgaacctgatcggcgtggcaagaggcgaaaacatccccgccgtgatcgccctgaccgaccccgagggctgcccactgagccggtttaaggatagcctgggaaacccaacccacatcctgagaatcggcgagagctataaggagaagcagcggaccatccaggccaagaaggaggtggagcagcggagagccggcggctacagccggaagtacgccagcaaagccaagaatctggcagacgatatggtgagaaacaccgctagagatctgctgtactacgccgtgacccaggatgccatgctgatcttcgccaacctgagccggggcttcggccggcagggcaagcggaccttcatggccgagagacagtacacacggatggaggactggctgaccgccaagctggcctacgagggcctgagcaagacctacctgtccaagacactggcccagtacacctccaagacatgcagcaactgtgggtttaccatcaccagcgccgactacgacagggtgctggagaagctgaagaagacagcaacaggctggatgaccacaattaacggcaaggagctgaaggtggagggccagattacctactacaacagatacaagagacagaacgtagtcaaggacctgtccgtcgagctggatagactgagcgaagaatctgtgaacaacgacatctcctcctggacaaagggcagaagcggagaagctctgagcctcctgaagaaaagattctcccatagacccgtgcaggagaagttcgtgtgcctgaactgcggcttcgagacacacgcagccgagcaagccgccctgaacatcgccagatcctggctgttcctgcggagccaggagtacaagaaataccagacaaacaagacaaccggcaacaccgataagagagccttcgtcgagacctggcagtccttttaccggaagaagcttaaggaggtgtggaaacctgccgtgcggtctggcggatctggcggaggctccacaagcctgcaggagcccgtgagcttcgccgaggtggccgtgtacttcagcagggaggagtgggccctgctggaccccgcccagagggccctgtacagggacgtgatgctggagacctaccagtgcgtggcctggctggcccccctgcccgcccccaagcccggcctgatcagcctgctggagggcggcgaggacccctggatccccgacgtgaggagccccgaggccgtgcccggcgacctgagccccaccagccccaagaaaaagagaaaagtctaagctgccttctgcggggcttgccttctggccatgcccttcttctctcccttgcacctgtacctcttggtctttgaataaagcctgagtaggaaggctagcaaaaaaaaaaaaaaaaaaaaaaaaaaaaaaaaaaaaaaaaaaaaaaaaaaaaaaaaaaaaaaaaaaaaaaaaaaaaaaaa

SEQ ID NO: 6272 - RNA, 5797 nt, synthetic construct
  source 1..5797: mol_type = other RNA
aggaaataagagagaaaagaagagtaagaagaaatataagagccaccatggcccctaagaagaagcgtaaagtgagccggatggaacgcctcgtctacgaggtgcggcagaagtgcagaaacatcgaggacatctgcatctcctgcggatctctgaacgtgaccctggagcacccactgttcatcggcggcatgtgccagaactgtaaaaactgttttctggagtgtgcctatcaatacgacgatgacggctaccagagctactgcaccatctgttgcggcggaagagaggtgctgatgtgtggaaataacaactgctgccggtgcttctgcgtggaatgcgtggacctgctggtgggccccggcgccgcccaggccgctattaaggaagatccttggaactgctacatgtgcggccacaagggcacatacggcctgctgagacggagagaggactggcctagcagactgcagatgttcttcgccaataaccacgaccaggagttcgacccccctaaggtgtaccctcccgtccccgccgagaagagaaagcccatccgggtcctgagcctgttcgatggcatcgccaccggtctgctggtgctgaaggacctgggcatccaggtggataggtacattgcctccgaggtgtgcgaggactccatcaccgtgggaatggtgcgtcatcagggcaagatcatgtacgtgggcgacgtgcggagcgtgacacagaagcatatccaggagtggggccctttcgacctggtgatcggcggcagcccttgcaatgacctgagcatcgtgaacccagcccggaagggcctgtacgagggaaccggcagactgttcttcgagttttacagactgctgcacgacgcccggcctaaggaaggcgacgaccggcccttcttttggctgttcgagaatgtggtggccatgggagtcagcgacaagcgggatattagccggttcctggagagcaaccccgtgatgatcgatgccaaggaagtgagcgccgcccaccgggccagatacttctggggcaatctgcctggcatgaacagacccctggccagcaccgtgaacgacaagctggagctgcaggagtgcctggagcacggccggatcgccaagttcagcaaggtgagaaccatcaccacccgaagcaacagcatcaaacaaggcaaggaccagcactttcctgtgttcatgaacgagaaggaggacatcctgtggtgtaccgagatggagagagtgttcgggttcccagtccactacacagatgtcagcaacatgtctagactggccagacagagactgctgggaagaagctggtccgtccctgtgatcagacacctgttcgcccctctgaaggagtacttcgcctgcgtgagcagcggcaacagcaacgccaacagccggggccccagcttctctagcggcctggtgccactgtccctgagagggagccacatgggccccatggagatctacaaaaccgtgagcgcctggaagcggcagcctgtgcgcgtgctgagcctgtttcggaatatcgataaagtcctgaaaagcctgggattcctggagagcggctctggctccggcggtggcaccctgaagtacgtggaggatgtgacaaacgtggtcagacgggatgtggagaagtggggccccttcgatctggtgtacggcagcacccaacccctgggcagctcttgtgaccggtgccctggctggtacatgtttcagttccaccggatcctgcagtacgccctgccgagacaggagtcccagcggccattcttttggattttcatggacaacttgctgctgaccgaggatgaccaggaaactaccactcggttcctgcagaccgaagccgtgaccctgcaggacgtgagaggccgggactaccagaacgccatgcgggtgtggtccaacatccctggactgaaaagcaagcacgcacctctgacccctaaagaagaggagtacctgcaggcccaggtgcggagcagaagcaagctggacgcccctaaggtggatctgctggtgaagaattgcctcctgcccctgagagagtacttcaagtatttcagccagaatagtctgcccctgggcggcccaagcagcggcgcccctcctcccagcggcggcagcccagccggctccccaacctctaccgaggagggcacctctgagtccgccacccccgagagcggccctggcacctccaccgagcccagcgagggcagcgcacccggcagccctgccggcagccccacctccacagaggagggaaccagcaccgagcccagcgaaggcagcgccccaggcaccagcaccgagcctagtgagggcggctctggcggcggcagcgcccaggagattaaacggatcaacaagatcagaagaagacttgtgaaagacagcaacaccaagaaggccggcaagacaggccccatgaaaaccctgctggttagagtgatgacacccgatctgagagagcggctggaaaacctgagaaagaagcctgaaaatatcccccagcccatcagcaatacatctagagccaacctgaataagctgctgaccgattacaccgaaatgaagaaggcgatcctgcatgtgtactgggaagagttccagaaggaccctgtgggcctgatgagccgggtggcccagcctgccagcaagaagatcgatcagaacaagctgaaacctgagatggacgagaagggcaacctgaccaccgccggctttgcctgctctcagtgtggccagcccctgttcgtgtacaagctggagcaggtgtctgagaagggcaaggcttacaccaactacttcggacggtgcaatgtggccgagcacgaaaagctgatcctgctggcccagctgaagcccgagaaggatagcgacgaagccgtgacatatagcctgggaaagtttgggcagagggccctggatttctacagcattcatgtgaccaaggagtccacccaccccgtgaagcccctggcccagatcgccggaaacagatacgcctccggacctgtgggaaaggccctgagcgacgcatgtatgggcacaatcgcctccttcctgtctaagtaccaggacatcatcatcgaacaccagaaggtggtgaagggcaaccagaagagactggagagcctgcgggagctggccggcaaggaaaacctggaataccctagcgtgaccctgccacctcagcctcacaccaaggagggcgttgatgcctacaacgaagtgatcgcccgggtgcgaatgtgggtgaacctgaacctgtggcagaagctgaagctaagcagagatgatgccaagcctctgctgagactgaagggattcccttcctttcctctggtcgagagacaggccaacgaagtggactggtgggacatggtgtgtaacgtgaagaagctgatcaacgagaaaaaggaggatggcaaggtgttttggcagaatctggctggctacaagagacaggaagccctgagaccatacctgagcagcgaggaagatcggaagaagggaaagaaattcgctcggtaccagctgggcgacctgctgctgcacctggaaaagaagcacggcgaggactggggaaaggtgtacgacgaggcctgggagcggattgacaagaaagtggaaggcctgagcaagcacatcaagctggaagaggaacggagaagcgaggacgcccagagcaaggccgccctgaccgactggctgcgggctaaggccagcttcgtgatcgagggcctgaaggaggccgacaaggacgagttctgcagatgcgagctgaagctgcagaagtggtacggggacctgcggggaaagcccttcgccatcgaagccgagaacagcatcctggacatcagcggcttcagcaagcagtacaactgtgccttcatctggcagaaggacggcgtgaagaagctgaacctgtacctgatcatcaactacttcaagggcggcaagctgcggttcaagaagatcaaacctgaagccttcgaagccaacagattctacaccgtgatcaacaaaaagagcggcgagatcgtgcccatggaggtgaacttcaacttcgacgaccccaacctgatcatcctgcctctggcctttggcaagagacagggcagagaattcatctggaacgacctgctgtccctggaaaccggcagcctgaagctggccaacggaagagtgatcgagaagacactgtacaacagaagaacccggcaggatgagcctgccctgttcgtggccctgaccttcgagcggcgggaggtcctggactcctccaatatcaaaccaatgaacctgatcggcgtggcaagaggcgaaaacatccccgccgtgatcgccctgaccgaccccgagggctgcccactgagccggtttaaggatagcctgggaaacccaacccacatcctgagaatcggcgagagctataaggagaagcagcggaccatccaggccaagaaggaggtggagcagcggagagccggcggctacagccggaagtacgccagcaaagccaagaatctggcagacgatatggtgagaaacaccgctagagatctgctgtactacgccgtgacccaggatgccatgctgatcttcgccaacctgagccggggcttcggccggcagggcaagcggaccttcatggccgagagacagtacacacggatggaggactggctgaccgccaagctggcctacgagggcctgagcaagacctacctgtccaagacactggcccagtacacctccaagacatgcagcaactgtgggtttaccatcaccagcgccgactacgacagggtgctggagaagctgaagaagacagcaacaggctggatgaccacaattaacggcaaggagctgaaggtggagggccagattacctactacaacagatacaagagacagaacgtagtcaaggacctgtccgtcgagctggatagactgagcgaagaatctgtgaacaacgacatctcctcctggacaaagggcagaagcggagaagctctgagcctcctgaagaaaagattctcccatagacccgtgcaggagaagttcgtgtgcctgaactgcggcttcgagacacacgcagccgagcaagccgccctgaacatcgccagatcctggctgttcctgcggagccaggagtacaagaaataccagacaaacaagacaaccggcaacaccgataagagagccttcgtcgagacctggcagtccttttaccggaagaagcttaaggaggtgtggaaacctgccgtgcggtctggcggatctggcggaggctccacaagcatggagctgagggaggccttcgaggacgtggccgtgtacttcaccaggaaggagtgggagctgctggaggacgaggacaaggagctgtacagggacctgatgctgaggaactaccaggccctggtgagcctgggctaccagggccccacccccggcctgatctgcaggatcaagcagagggaggtggagctgtgggtgtgcgacgacgagcaccacggcgagagcagcgtgagcgagaacctgaccagccccaagaaaaagagaaaagtctaagctgccttctgcggggcttgccttctggccatgcccttcttctctcccttgcacctgtacctcttggtctttgaataaagcctgagtaggaaggctagcaaaaaaaaaaaaaaaaaaaaaaaaaaaaaaaaaaaaaaaaaaaaaaaaaaaaaaaaaaaaaaaaaaaaaaaaaaaaaaaa

SEQ ID NO: 6273 - RNA, 5797 nt, synthetic construct
  source 1..5797: mol_type = other RNA
aggaaataagagagaaaagaagagtaagaagaaatataagagccaccatggcccctaagaagaagcgtaaagtgagccggatggaacgcctcgtctacgaggtgcggcagaagtgcagaaacatcgaggacatctgcatctcctgcggatctctgaacgtgaccctggagcacccactgttcatcggcggcatgtgccagaactgtaaaaactgttttctggagtgtgcctatcaatacgacgatgacggctaccagagctactgcaccatctgttgcggcggaagagaggtgctgatgtgtggaaataacaactgctgccggtgcttctgcgtggaatgcgtggacctgctggtgggccccggcgccgcccaggccgctattaaggaagatccttggaactgctacatgtgcggccacaagggcacatacggcctgctgagacggagagaggactggcctagcagactgcagatgttcttcgccaataaccacgaccaggagttcgacccccctaaggtgtaccctcccgtccccgccgagaagagaaagcccatccgggtcctgagcctgttcgatggcatcgccaccggtctgctggtgctgaaggacctgggcatccaggtggataggtacattgcctccgaggtgtgcgaggactccatcaccgtgggaatggtgcgtcatcagggcaagatcatgtacgtgggcgacgtgcggagcgtgacacagaagcatatccaggagtggggccctttcgacctggtgatcggcggcagcccttgcaatgacctgagcatcgtgaacccagcccggaagggcctgtacgagggaaccggcagactgttcttcgagttttacagactgctgcacgacgcccggcctaaggaaggcgacgaccggcccttcttttggctgttcgagaatgtggtggccatgggagtcagcgacaagcgggatattagccggttcctggagagcaaccccgtgatgatcgatgccaaggaagtgagcgccgcccaccgggccagatacttctggggcaatctgcctggcatgaacagacccctggccagcaccgtgaacgacaagctggagctgcaggagtgcctggagcacggccggatcgccaagttcagcaaggtgagaaccatcaccacccgaagcaacagcatcaaacaaggcaaggaccagcactttcctgtgttcatgaacgagaaggaggacatcctgtggtgtaccgagatggagagagtgttcgggttcccagtccactacacagatgtcagcaacatgtctagactggccagacagagactgctgggaagaagctggtccgtccctgtgatcagacacctgttcgcccctctgaaggagtacttcgcctgcgtgagcagcggcaacagcaacgccaacagccggggccccagcttctctagcggcctggtgccactgtccctgagagggagccacatgggccccatggagatctacaaaaccgtgagcgcctggaagcggcagcctgtgcgcgtgctgagcctgtttcggaatatcgataaagtcctgaaaagcctgggattcctggagagcggctctggctccggcggtggcaccctgaagtacgtggaggatgtgacaaacgtggtcagacgggatgtggagaagtggggccccttcgatctggtgtacggcagcacccaacccctgggcagctcttgtgaccggtgccctggctggtacatgtttcagttccaccggatcctgcagtacgccctgccgagacaggagtcccagcggccattcttttggattttcatggacaacttgctgctgaccgaggatgaccaggaaactaccactcggttcctgcagaccgaagccgtgaccctgcaggacgtgagaggccgggactaccagaacgccatgcgggtgtggtccaacatccctggactgaaaagcaagcacgcacctctgacccctaaagaagaggagtacctgcaggcccaggtgcggagcagaagcaagctggacgcccctaaggtggatctgctggtgaagaattgcctcctgcccctgagagagtacttcaagtatttcagccagaatagtctgcccctgggcggcccaagcagcggcgcccctcctcccagcggcggcagcccagccggctccccaacctctaccgaggagggcacctctgagtccgccacccccgagagcggccctggcacctccaccgagcccagcgagggcagcgcacccggcagccctgccggcagccccacctccacagaggagggaaccagcaccgagcccagcgaaggcagcgccccaggcaccagcaccgagcctagtgagggcggctctggcggcggcagcgcccaggagattaaacggatcaacaagatcagaagaagacttgtgaaagacagcaacaccaagaaggccggcaagacaggccccatgaaaaccctgctggttagagtgatgacacccgatctgagagagcggctggaaaacctgagaaagaagcctgaaaatatcccccagcccatcagcaatacatctagagccaacctgaataagctgctgaccgattacaccgaaatgaagaaggcgatcctgcatgtgtactgggaagagttccagaaggaccctgtgggcctgatgagccgggtggcccagcctgccagcaagaagatcgatcagaacaagctgaaacctgagatggacgagaagggcaacctgaccaccgccggctttgcctgctctcagtgtggccagcccctgttcgtgtacaagctggagcaggtgtctgagaagggcaaggcttacaccaactacttcggacggtgcaatgtggccgagcacgaaaagctgatcctgctggcccagctgaagcccgagaaggatagcgacgaagccgtgacatatagcctgggaaagtttgggcagagggccctggatttctacagcattcatgtgaccaaggagtccacccaccccgtgaagcccctggcccagatcgccggaaacagatacgcctccggacctgtgggaaaggccctgagcgacgcatgtatgggcacaatcgcctccttcctgtctaagtaccaggacatcatcatcgaacaccagaaggtggtgaagggcaaccagaagagactggagagcctgcgggagctggccggcaaggaaaacctggaataccctagcgtgaccctgccacctcagcctcacaccaaggagggcgttgatgcctacaacgaagtgatcgcccgggtgcgaatgtgggtgaacctgaacctgtggcagaagctgaagctaagcagagatgatgccaagcctctgctgagactgaagggattcccttcctttcctctggtcgagagacaggccaacgaagtggactggtgggacatggtgtgtaacgtgaagaagctgatcaacgagaaaaaggaggatggcaaggtgttttggcagaatctggctggctacaagagacaggaagccctgagaccatacctgagcagcgaggaagatcggaagaagggaaagaaattcgctcggtaccagctgggcgacctgctgctgcacctggaaaagaagcacggcgaggactggggaaaggtgtacgacgaggcctgggagcggattgacaagaaagtggaaggcctgagcaagcacatcaagctggaagaggaacggagaagcgaggacgcccagagcaaggccgccctgaccgactggctgcgggctaaggccagcttcgtgatcgagggcctgaaggaggccgacaaggacgagttctgcagatgcgagctgaagctgcagaagtggtacggggacctgcggggaaagcccttcgccatcgaagccgagaacagcatcctggacatcagcggcttcagcaagcagtacaactgtgccttcatctggcagaaggacggcgtgaagaagctgaacctgtacctgatcatcaactacttcaagggcggcaagctgcggttcaagaagatcaaacctgaagccttcgaagccaacagattctacaccgtgatcaacaaaaagagcggcgagatcgtgcccatggaggtgaacttcaacttcgacgaccccaacctgatcatcctgcctctggcctttggcaagagacagggcagagaattcatctggaacgacctgctgtccctggaaaccggcagcctgaagctggccaacggaagagtgatcgagaagacactgtacaacagaagaacccggcaggatgagcctgccctgttcgtggccctgaccttcgagcggcgggaggtcctggactcctccaatatcaaaccaatgaacctgatcggcgtggcaagaggcgaaaacatccccgccgtgatcgccctgaccgaccccgagggctgcccactgagccggtttaaggatagcctgggaaacccaacccacatcctgagaatcggcgagagctataaggagaagcagcggaccatccaggccaagaaggaggtggagcagcggagagccggcggctacagccggaagtacgccagcaaagccaagaatctggcagacgatatggtgagaaacaccgctagagatctgctgtactacgccgtgacccaggatgccatgctgatcttcgccaacctgagccggggcttcggccggcagggcaagcggaccttcatggccgagagacagtacacacggatggaggactggctgaccgccaagctggcctacgagggcctgagcaagacctacctgtccaagacactggcccagtacacctccaagacatgcagcaactgtgggtttaccatcaccagcgccgactacgacagggtgctggagaagctgaagaagacagcaacaggctggatgaccacaattaacggcaaggagctgaaggtggagggccagattacctactacaacagatacaagagacagaacgtagtcaaggacctgtccgtcgagctggatagactgagcgaagaatctgtgaacaacgacatctcctcctggacaaagggcagaagcggagaagctctgagcctcctgaagaaaagattctcccatagacccgtgcaggagaagttcgtgtgcctgaactgcggcttcgagacacacgcagccgagcaagccgccctgaacatcgccagatcctggctgttcctgcggagccaggagtacaagaaataccagacaaacaagacaaccggcaacaccgataagagagccttcgtcgagacctggcagtccttttaccggaagaagcttaaggaggtgtggaaacctgccgtgcggtctggcggatctggcggaggctccacaagcttccaggagaccgtgaccttcaaggacgtggccgtggtgttcagcgaggaggagctgggcctgctggacagcacccagaggaagctgtacagggacgtgatgctggagaacttcaggaacctggtgagcgtgggccacagcagcagcaagcccgacatgatcagccagctggagagggaggagaagctgtgcatgaaggagatccacaccgagaggggcaggcacagcggcggcaggaaccagaccagccccaagaaaaagagaaaagtctaagctgccttctgcggggcttgccttctggccatgcccttcttctctcccttgcacctgtacctcttggtctttgaataaagcctgagtaggaaggctagcaaaaaaaaaaaaaaaaaaaaaaaaaaaaaaaaaaaaaaaaaaaaaaaaaaaaaaaaaaaaaaaaaaaaaaaaaaaaaaaa

SEQ ID NO: 6274 - RNA, 5797 nt, synthetic construct
  source 1..5797: mol_type = other RNA
aggaaataagagagaaaagaagagtaagaagaaatataagagccaccatggcccctaagaagaagcgtaaagtgagccggatggaacgcctcgtctacgaggtgcggcagaagtgcagaaacatcgaggacatctgcatctcctgcggatctctgaacgtgaccctggagcacccactgttcatcggcggcatgtgccagaactgtaaaaactgttttctggagtgtgcctatcaatacgacgatgacggctaccagagctactgcaccatctgttgcggcggaagagaggtgctgatgtgtggaaataacaactgctgccggtgcttctgcgtggaatgcgtggacctgctggtgggccccggcgccgcccaggccgctattaaggaagatccttggaactgctacatgtgcggccacaagggcacatacggcctgctgagacggagagaggactggcctagcagactgcagatgttcttcgccaataaccacgaccaggagttcgacccccctaaggtgtaccctcccgtccccgccgagaagagaaagcccatccgggtcctgagcctgttcgatggcatcgccaccggtctgctggtgctgaaggacctgggcatccaggtggataggtacattgcctccgaggtgtgcgaggactccatcaccgtgggaatggtgcgtcatcagggcaagatcatgtacgtgggcgacgtgcggagcgtgacacagaagcatatccaggagtggggccctttcgacctggtgatcggcggcagcccttgcaatgacctgagcatcgtgaacccagcccggaagggcctgtacgagggaaccggcagactgttcttcgagttttacagactgctgcacgacgcccggcctaaggaaggcgacgaccggcccttcttttggctgttcgagaatgtggtggccatgggagtcagcgacaagcgggatattagccggttcctggagagcaaccccgtgatgatcgatgccaaggaagtgagcgccgcccaccgggccagatacttctggggcaatctgcctggcatgaacagacccctggccagcaccgtgaacgacaagctggagctgcaggagtgcctggagcacggccggatcgccaagttcagcaaggtgagaaccatcaccacccgaagcaacagcatcaaacaaggcaaggaccagcactttcctgtgttcatgaacgagaaggaggacatcctgtggtgtaccgagatggagagagtgttcgggttcccagtccactacacagatgtcagcaacatgtctagactggccagacagagactgctgggaagaagctggtccgtccctgtgatcagacacctgttcgcccctctgaaggagtacttcgcctgcgtgagcagcggcaacagcaacgccaacagccggggccccagcttctctagcggcctggtgccactgtccctgagagggagccacatgggccccatggagatctacaaaaccgtgagcgcctggaagcggcagcctgtgcgcgtgctgagcctgtttcggaatatcgataaagtcctgaaaagcctgggattcctggagagcggctctggctccggcggtggcaccctgaagtacgtggaggatgtgacaaacgtggtcagacgggatgtggagaagtggggccccttcgatctggtgtacggcagcacccaacccctgggcagctcttgtgaccggtgccctggctggtacatgtttcagttccaccggatcctgcagtacgccctgccgagacaggagtcccagcggccattcttttggattttcatggacaacttgctgctgaccgaggatgaccaggaaactaccactcggttcctgcagaccgaagccgtgaccctgcaggacgtgagaggccgggactaccagaacgccatgcgggtgtggtccaacatccctggactgaaaagcaagcacgcacctctgacccctaaagaagaggagtacctgcaggcccaggtgcggagcagaagcaagctggacgcccctaaggtggatctgctggtgaagaattgcctcctgcccctgagagagtacttcaagtatttcagccagaatagtctgcccctgggcggcccaagcagcggcgcccctcctcccagcggcggcagcccagccggctccccaacctctaccgaggagggcacctctgagtccgccacccccgagagcggccctggcacctccaccgagcccagcgagggcagcgcacccggcagccctgccggcagccccacctccacagaggagggaaccagcaccgagcccagcgaaggcagcgccccaggcaccagcaccgagcctagtgagggcggctctggcggcggcagcgcccaggagattaaacggatcaacaagatcagaagaagacttgtgaaagacagcaacaccaagaaggccggcaagacaggccccatgaaaaccctgctggttagagtgatgacacccgatctgagagagcggctggaaaacctgagaaagaagcctgaaaatatcccccagcccatcagcaatacatctagagccaacctgaataagctgctgaccgattacaccgaaatgaagaaggcgatcctgcatgtgtactgggaagagttccagaaggaccctgtgggcctgatgagccgggtggcccagcctgccagcaagaagatcgatcagaacaagctgaaacctgagatggacgagaagggcaacctgaccaccgccggctttgcctgctctcagtgtggccagcccctgttcgtgtacaagctggagcaggtgtctgagaagggcaaggcttacaccaactacttcggacggtgcaatgtggccgagcacgaaaagctgatcctgctggcccagctgaagcccgagaaggatagcgacgaagccgtgacatatagcctgggaaagtttgggcagagggccctggatttctacagcattcatgtgaccaaggagtccacccaccccgtgaagcccctggcccagatcgccggaaacagatacgcctccggacctgtgggaaaggccctgagcgacgcatgtatgggcacaatcgcctccttcctgtctaagtaccaggacatcatcatcgaacaccagaaggtggtgaagggcaaccagaagagactggagagcctgcgggagctggccggcaaggaaaacctggaataccctagcgtgaccctgccacctcagcctcacaccaaggagggcgttgatgcctacaacgaagtgatcgcccgggtgcgaatgtgggtgaacctgaacctgtggcagaagctgaagctaagcagagatgatgccaagcctctgctgagactgaagggattcccttcctttcctctggtcgagagacaggccaacgaagtggactggtgggacatggtgtgtaacgtgaagaagctgatcaacgagaaaaaggaggatggcaaggtgttttggcagaatctggctggctacaagagacaggaagccctgagaccatacctgagcagcgaggaagatcggaagaagggaaagaaattcgctcggtaccagctgggcgacctgctgctgcacctggaaaagaagcacggcgaggactggggaaaggtgtacgacgaggcctgggagcggattgacaagaaagtggaaggcctgagcaagcacatcaagctggaagaggaacggagaagcgaggacgcccagagcaaggccgccctgaccgactggctgcgggctaaggccagcttcgtgatcgagggcctgaaggaggccgacaaggacgagttctgcagatgcgagctgaagctgcagaagtggtacggggacctgcggggaaagcccttcgccatcgaagccgagaacagcatcctggacatcagcggcttcagcaagcagtacaactgtgccttcatctggcagaaggacggcgtgaagaagctgaacctgtacctgatcatcaactacttcaagggcggcaagctgcggttcaagaagatcaaacctgaagccttcgaagccaacagattctacaccgtgatcaacaaaaagagcggcgagatcgtgcccatggaggtgaacttcaacttcgacgaccccaacctgatcatcctgcctctggcctttggcaagagacagggcagagaattcatctggaacgacctgctgtccctggaaaccggcagcctgaagctggccaacggaagagtgatcgagaagacactgtacaacagaagaacccggcaggatgagcctgccctgttcgtggccctgaccttcgagcggcgggaggtcctggactcctccaatatcaaaccaatgaacctgatcggcgtggcaagaggcgaaaacatccccgccgtgatcgccctgaccgaccccgagggctgcccactgagccggtttaaggatagcctgggaaacccaacccacatcctgagaatcggcgagagctataaggagaagcagcggaccatccaggccaagaaggaggtggagcagcggagagccggcggctacagccggaagtacgccagcaaagccaagaatctggcagacgatatggtgagaaacaccgctagagatctgctgtactacgccgtgacccaggatgccatgctgatcttcgccaacctgagccggggcttcggccggcagggcaagcggaccttcatggccgagagacagtacacacggatggaggactggctgaccgccaagctggcctacgagggcctgagcaagacctacctgtccaagacactggcccagtacacctccaagacatgcagcaactgtgggtttaccatcaccagcgccgactacgacagggtgctggagaagctgaagaagacagcaacaggctggatgaccacaattaacggcaaggagctgaaggtggagggccagattacctactacaacagatacaagagacagaacgtagtcaaggacctgtccgtcgagctggatagactgagcgaagaatctgtgaacaacgacatctcctcctggacaaagggcagaagcggagaagctctgagcctcctgaagaaaagattctcccatagacccgtgcaggagaagttcgtgtgcctgaactgcggcttcgagacacacgcagccgagcaagccgccctgaacatcgccagatcctggctgttcctgcggagccaggagtacaagaaataccagacaaacaagacaaccggcaacaccgataagagagccttcgtcgagacctggcagtccttttaccggaagaagcttaaggaggtgtggaaacctgccgtgcggtctggcggatctggcggaggctccacaagctaccagatccccgtgagcttcaaggacgtggtggtgggcttcacccaggaggagtggcacaggctgagccccgcccagagggccctgtacagggacgtgatgctggagacctacagcaacctggtgagcgtgggctacgagggcaccaagcccgacgtgatcctgaggctggagcaggaggaggccccctggatcggcgaggccgcctgccccggctgccactgctgggaggacatctggaggaccagccccaagaaaaagagaaaagtctaagctgccttctgcggggcttgccttctggccatgcccttcttctctcccttgcacctgtacctcttggtctttgaataaagcctgagtaggaaggctagcaaaaaaaaaaaaaaaaaaaaaaaaaaaaaaaaaaaaaaaaaaaaaaaaaaaaaaaaaaaaaaaaaaaaaaaaaaaaaaaa

SEQ ID NO: 6275 - RNA, 5797 nt, synthetic construct
  source 1..5797: mol_type = other RNA
aggaaataagagagaaaagaagagtaagaagaaatataagagccaccatggcccctaagaagaagcgtaaagtgagccggatggaacgcctcgtctacgaggtgcggcagaagtgcagaaacatcgaggacatctgcatctcctgcggatctctgaacgtgaccctggagcacccactgttcatcggcggcatgtgccagaactgtaaaaactgttttctggagtgtgcctatcaatacgacgatgacggctaccagagctactgcaccatctgttgcggcggaagagaggtgctgatgtgtggaaataacaactgctgccggtgcttctgcgtggaatgcgtggacctgctggtgggccccggcgccgcccaggccgctattaaggaagatccttggaactgctacatgtgcggccacaagggcacatacggcctgctgagacggagagaggactggcctagcagactgcagatgttcttcgccaataaccacgaccaggagttcgacccccctaaggtgtaccctcccgtccccgccgagaagagaaagcccatccgggtcctgagcctgttcgatggcatcgccaccggtctgctggtgctgaaggacctgggcatccaggtggataggtacattgcctccgaggtgtgcgaggactccatcaccgtgggaatggtgcgtcatcagggcaagatcatgtacgtgggcgacgtgcggagcgtgacacagaagcatatccaggagtggggccctttcgacctggtgatcggcggcagcccttgcaatgacctgagcatcgtgaacccagcccggaagggcctgtacgagggaaccggcagactgttcttcgagttttacagactgctgcacgacgcccggcctaaggaaggcgacgaccggcccttcttttggctgttcgagaatgtggtggccatgggagtcagcgacaagcgggatattagccggttcctggagagcaaccccgtgatgatcgatgccaaggaagtgagcgccgcccaccgggccagatacttctggggcaatctgcctggcatgaacagacccctggccagcaccgtgaacgacaagctggagctgcaggagtgcctggagcacggccggatcgccaagttcagcaaggtgagaaccatcaccacccgaagcaacagcatcaaacaaggcaaggaccagcactttcctgtgttcatgaacgagaaggaggacatcctgtggtgtaccgagatggagagagtgttcgggttcccagtccactacacagatgtcagcaacatgtctagactggccagacagagactgctgggaagaagctggtccgtccctgtgatcagacacctgttcgcccctctgaaggagtacttcgcctgcgtgagcagcggcaacagcaacgccaacagccggggccccagcttctctagcggcctggtgccactgtccctgagagggagccacatgggccccatggagatctacaaaaccgtgagcgcctggaagcggcagcctgtgcgcgtgctgagcctgtttcggaatatcgataaagtcctgaaaagcctgggattcctggagagcggctctggctccggcggtggcaccctgaagtacgtggaggatgtgacaaacgtggtcagacgggatgtggagaagtggggccccttcgatctggtgtacggcagcacccaacccctgggcagctcttgtgaccggtgccctggctggtacatgtttcagttccaccggatcctgcagtacgccctgccgagacaggagtcccagcggccattcttttggattttcatggacaacttgctgctgaccgaggatgaccaggaaactaccactcggttcctgcagaccgaagccgtgaccctgcaggacgtgagaggccgggactaccagaacgccatgcgggtgtggtccaacatccctggactgaaaagcaagcacgcacctctgacccctaaagaagaggagtacctgcaggcccaggtgcggagcagaagcaagctggacgcccctaaggtggatctgctggtgaagaattgcctcctgcccctgagagagtacttcaagtatttcagccagaatagtctgcccctgggcggcccaagcagcggcgcccctcctcccagcggcggcagcccagccggctccccaacctctaccgaggagggcacctctgagtccgccacccccgagagcggccctggcacctccaccgagcccagcgagggcagcgcacccggcagccctgccggcagccccacctccacagaggagggaaccagcaccgagcccagcgaaggcagcgccccaggcaccagcaccgagcctagtgagggcggctctggcggcggcagcgcccaggagattaaacggatcaacaagatcagaagaagacttgtgaaagacagcaacaccaagaaggccggcaagacaggccccatgaaaaccctgctggttagagtgatgacacccgatctgagagagcggctggaaaacctgagaaagaagcctgaaaatatcccccagcccatcagcaatacatctagagccaacctgaataagctgctgaccgattacaccgaaatgaagaaggcgatcctgcatgtgtactgggaagagttccagaaggaccctgtgggcctgatgagccgggtggcccagcctgccagcaagaagatcgatcagaacaagctgaaacctgagatggacgagaagggcaacctgaccaccgccggctttgcctgctctcagtgtggccagcccctgttcgtgtacaagctggagcaggtgtctgagaagggcaaggcttacaccaactacttcggacggtgcaatgtggccgagcacgaaaagctgatcctgctggcccagctgaagcccgagaaggatagcgacgaagccgtgacatatagcctgggaaagtttgggcagagggccctggatttctacagcattcatgtgaccaaggagtccacccaccccgtgaagcccctggcccagatcgccggaaacagatacgcctccggacctgtgggaaaggccctgagcgacgcatgtatgggcacaatcgcctccttcctgtctaagtaccaggacatcatcatcgaacaccagaaggtggtgaagggcaaccagaagagactggagagcctgcgggagctggccggcaaggaaaacctggaataccctagcgtgaccctgccacctcagcctcacaccaaggagggcgttgatgcctacaacgaagtgatcgcccgggtgcgaatgtgggtgaacctgaacctgtggcagaagctgaagctaagcagagatgatgccaagcctctgctgagactgaagggattcccttcctttcctctggtcgagagacaggccaacgaagtggactggtgggacatggtgtgtaacgtgaagaagctgatcaacgagaaaaaggaggatggcaaggtgttttggcagaatctggctggctacaagagacaggaagccctgagaccatacctgagcagcgaggaagatcggaagaagggaaagaaattcgctcggtaccagctgggcgacctgctgctgcacctggaaaagaagcacggcgaggactggggaaaggtgtacgacgaggcctgggagcggattgacaagaaagtggaaggcctgagcaagcacatcaagctggaagaggaacggagaagcgaggacgcccagagcaaggccgccctgaccgactggctgcgggctaaggccagcttcgtgatcgagggcctgaaggaggccgacaaggacgagttctgcagatgcgagctgaagctgcagaagtggtacggggacctgcggggaaagcccttcgccatcgaagccgagaacagcatcctggacatcagcggcttcagcaagcagtacaactgtgccttcatctggcagaaggacggcgtgaagaagctgaacctgtacctgatcatcaactacttcaagggcggcaagctgcggttcaagaagatcaaacctgaagccttcgaagccaacagattctacaccgtgatcaacaaaaagagcggcgagatcgtgcccatggaggtgaacttcaacttcgacgaccccaacctgatcatcctgcctctggcctttggcaagagacagggcagagaattcatctggaacgacctgctgtccctggaaaccggcagcctgaagctggccaacggaagagtgatcgagaagacactgtacaacagaagaacccggcaggatgagcctgccctgttcgtggccctgaccttcgagcggcgggaggtcctggactcctccaatatcaaaccaatgaacctgatcggcgtggcaagaggcgaaaacatccccgccgtgatcgccctgaccgaccccgagggctgcccactgagccggtttaaggatagcctgggaaacccaacccacatcctgagaatcggcgagagctataaggagaagcagcggaccatccaggccaagaaggaggtggagcagcggagagccggcggctacagccggaagtacgccagcaaagccaagaatctggcagacgatatggtgagaaacaccgctagagatctgctgtactacgccgtgacccaggatgccatgctgatcttcgccaacctgagccggggcttcggccggcagggcaagcggaccttcatggccgagagacagtacacacggatggaggactggctgaccgccaagctggcctacgagggcctgagcaagacctacctgtccaagacactggcccagtacacctccaagacatgcagcaactgtgggtttaccatcaccagcgccgactacgacagggtgctggagaagctgaagaagacagcaacaggctggatgaccacaattaacggcaaggagctgaaggtggagggccagattacctactacaacagatacaagagacagaacgtagtcaaggacctgtccgtcgagctggatagactgagcgaagaatctgtgaacaacgacatctcctcctggacaaagggcagaagcggagaagctctgagcctcctgaagaaaagattctcccatagacccgtgcaggagaagttcgtgtgcctgaactgcggcttcgagacacacgcagccgagcaagccgccctgaacatcgccagatcctggctgttcctgcggagccaggagtacaagaaataccagacaaacaagacaaccggcaacaccgataagagagccttcgtcgagacctggcagtccttttaccggaagaagcttaaggaggtgtggaaacctgccgtgcggtctggcggatctggcggaggctccacaagcagccagagcctggtgaccttcggcgacgtggccgtggacttcagcagggaggagtgggagtggctgagcagcgcccagaggaccctgtacaggaccgtgatgctggagaactacaggaacctggtgagcctgggcctgtgcatcagcaagcccgacatgatcagcagcctggagcagaggaaggagccctggatggccaagaggaagctgaccaggggcaggtgccccgacctgaagatcgtgaccagccccaagaaaaagagaaaagtctaagctgccttctgcggggcttgccttctggccatgcccttcttctctcccttgcacctgtacctcttggtctttgaataaagcctgagtaggaaggctagcaaaaaaaaaaaaaaaaaaaaaaaaaaaaaaaaaaaaaaaaaaaaaaaaaaaaaaaaaaaaaaaaaaaaaaaaaaaaaaaa

SEQ ID NO: 6276 - RNA, 5797 nt, synthetic construct
  source 1..5797: mol_type = other RNA
aggaaataagagagaaaagaagagtaagaagaaatataagagccaccatggcccctaagaagaagcgtaaagtgagccggatggaacgcctcgtctacgaggtgcggcagaagtgcagaaacatcgaggacatctgcatctcctgcggatctctgaacgtgaccctggagcacccactgttcatcggcggcatgtgccagaactgtaaaaactgttttctggagtgtgcctatcaatacgacgatgacggctaccagagctactgcaccatctgttgcggcggaagagaggtgctgatgtgtggaaataacaactgctgccggtgcttctgcgtggaatgcgtggacctgctggtgggccccggcgccgcccaggccgctattaaggaagatccttggaactgctacatgtgcggccacaagggcacatacggcctgctgagacggagagaggactggcctagcagactgcagatgttcttcgccaataaccacgaccaggagttcgacccccctaaggtgtaccctcccgtccccgccgagaagagaaagcccatccgggtcctgagcctgttcgatggcatcgccaccggtctgctggtgctgaaggacctgggcatccaggtggataggtacattgcctccgaggtgtgcgaggactccatcaccgtgggaatggtgcgtcatcagggcaagatcatgtacgtgggcgacgtgcggagcgtgacacagaagcatatccaggagtggggccctttcgacctggtgatcggcggcagcccttgcaatgacctgagcatcgtgaacccagcccggaagggcctgtacgagggaaccggcagactgttcttcgagttttacagactgctgcacgacgcccggcctaaggaaggcgacgaccggcccttcttttggctgttcgagaatgtggtggccatgggagtcagcgacaagcgggatattagccggttcctggagagcaaccccgtgatgatcgatgccaaggaagtgagcgccgcccaccgggccagatacttctggggcaatctgcctggcatgaacagacccctggccagcaccgtgaacgacaagctggagctgcaggagtgcctggagcacggccggatcgccaagttcagcaaggtgagaaccatcaccacccgaagcaacagcatcaaacaaggcaaggaccagcactttcctgtgttcatgaacgagaaggaggacatcctgtggtgtaccgagatggagagagtgttcgggttcccagtccactacacagatgtcagcaacatgtctagactggccagacagagactgctgggaagaagctggtccgtccctgtgatcagacacctgttcgcccctctgaaggagtacttcgcctgcgtgagcagcggcaacagcaacgccaacagccggggccccagcttctctagcggcctggtgccactgtccctgagagggagccacatgggccccatggagatctacaaaaccgtgagcgcctggaagcggcagcctgtgcgcgtgctgagcctgtttcggaatatcgataaagtcctgaaaagcctgggattcctggagagcggctctggctccggcggtggcaccctgaagtacgtggaggatgtgacaaacgtggtcagacgggatgtggagaagtggggccccttcgatctggtgtacggcagcacccaacccctgggcagctcttgtgaccggtgccctggctggtacatgtttcagttccaccggatcctgcagtacgccctgccgagacaggagtcccagcggccattcttttggattttcatggacaacttgctgctgaccgaggatgaccaggaaactaccactcggttcctgcagaccgaagccgtgaccctgcaggacgtgagaggccgggactaccagaacgccatgcgggtgtggtccaacatccctggactgaaaagcaagcacgcacctctgacccctaaagaagaggagtacctgcaggcccaggtgcggagcagaagcaagctggacgcccctaaggtggatctgctggtgaagaattgcctcctgcccctgagagagtacttcaagtatttcagccagaatagtctgcccctgggcggcccaagcagcggcgcccctcctcccagcggcggcagcccagccggctccccaacctctaccgaggagggcacctctgagtccgccacccccgagagcggccctggcacctccaccgagcccagcgagggcagcgcacccggcagccctgccggcagccccacctccacagaggagggaaccagcaccgagcccagcgaaggcagcgccccaggcaccagcaccgagcctagtgagggcggctctggcggcggcagcgcccaggagattaaacggatcaacaagatcagaagaagacttgtgaaagacagcaacaccaagaaggccggcaagacaggccccatgaaaaccctgctggttagagtgatgacacccgatctgagagagcggctggaaaacctgagaaagaagcctgaaaatatcccccagcccatcagcaatacatctagagccaacctgaataagctgctgaccgattacaccgaaatgaagaaggcgatcctgcatgtgtactgggaagagttccagaaggaccctgtgggcctgatgagccgggtggcccagcctgccagcaagaagatcgatcagaacaagctgaaacctgagatggacgagaagggcaacctgaccaccgccggctttgcctgctctcagtgtggccagcccctgttcgtgtacaagctggagcaggtgtctgagaagggcaaggcttacaccaactacttcggacggtgcaatgtggccgagcacgaaaagctgatcctgctggcccagctgaagcccgagaaggatagcgacgaagccgtgacatatagcctgggaaagtttgggcagagggccctggatttctacagcattcatgtgaccaaggagtccacccaccccgtgaagcccctggcccagatcgccggaaacagatacgcctccggacctgtgggaaaggccctgagcgacgcatgtatgggcacaatcgcctccttcctgtctaagtaccaggacatcatcatcgaacaccagaaggtggtgaagggcaaccagaagagactggagagcctgcgggagctggccggcaaggaaaacctggaataccctagcgtgaccctgccacctcagcctcacaccaaggagggcgttgatgcctacaacgaagtgatcgcccgggtgcgaatgtgggtgaacctgaacctgtggcagaagctgaagctaagcagagatgatgccaagcctctgctgagactgaagggattcccttcctttcctctggtcgagagacaggccaacgaagtggactggtgggacatggtgtgtaacgtgaagaagctgatcaacgagaaaaaggaggatggcaaggtgttttggcagaatctggctggctacaagagacaggaagccctgagaccatacctgagcagcgaggaagatcggaagaagggaaagaaattcgctcggtaccagctgggcgacctgctgctgcacctggaaaagaagcacggcgaggactggggaaaggtgtacgacgaggcctgggagcggattgacaagaaagtggaaggcctgagcaagcacatcaagctggaagaggaacggagaagcgaggacgcccagagcaaggccgccctgaccgactggctgcgggctaaggccagcttcgtgatcgagggcctgaaggaggccgacaaggacgagttctgcagatgcgagctgaagctgcagaagtggtacggggacctgcggggaaagcccttcgccatcgaagccgagaacagcatcctggacatcagcggcttcagcaagcagtacaactgtgccttcatctggcagaaggacggcgtgaagaagctgaacctgtacctgatcatcaactacttcaagggcggcaagctgcggttcaagaagatcaaacctgaagccttcgaagccaacagattctacaccgtgatcaacaaaaagagcggcgagatcgtgcccatggaggtgaacttcaacttcgacgaccccaacctgatcatcctgcctctggcctttggcaagagacagggcagagaattcatctggaacgacctgctgtccctggaaaccggcagcctgaagctggccaacggaagagtgatcgagaagacactgtacaacagaagaacccggcaggatgagcctgccctgttcgtggccctgaccttcgagcggcgggaggtcctggactcctccaatatcaaaccaatgaacctgatcggcgtggcaagaggcgaaaacatccccgccgtgatcgccctgaccgaccccgagggctgcccactgagccggtttaaggatagcctgggaaacccaacccacatcctgagaatcggcgagagctataaggagaagcagcggaccatccaggccaagaaggaggtggagcagcggagagccggcggctacagccggaagtacgccagcaaagccaagaatctggcagacgatatggtgagaaacaccgctagagatctgctgtactacgccgtgacccaggatgccatgctgatcttcgccaacctgagccggggcttcggccggcagggcaagcggaccttcatggccgagagacagtacacacggatggaggactggctgaccgccaagctggcctacgagggcctgagcaagacctacctgtccaagacactggcccagtacacctccaagacatgcagcaactgtgggtttaccatcaccagcgccgactacgacagggtgctggagaagctgaagaagacagcaacaggctggatgaccacaattaacggcaaggagctgaaggtggagggccagattacctactacaacagatacaagagacagaacgtagtcaaggacctgtccgtcgagctggatagactgagcgaagaatctgtgaacaacgacatctcctcctggacaaagggcagaagcggagaagctctgagcctcctgaagaaaagattctcccatagacccgtgcaggagaagttcgtgtgcctgaactgcggcttcgagacacacgcagccgagcaagccgccctgaacatcgccagatcctggctgttcctgcggagccaggagtacaagaaataccagacaaacaagacaaccggcaacaccgataagagagccttcgtcgagacctggcagtccttttaccggaagaagcttaaggaggtgtggaaacctgccgtgcggtctggcggatctggcggaggctccacaagcatgatgcaggcccaggagagcctgaccctggaggacgtggccgtggacttcacctgggaggagtggcagctgctgagccccgcccagaaggacctgtacagggacgtgatgctggagaactacagcaacctggtgagcgtgggctaccaggccagcaagcccgacgccttcagcaagctggagaggggcgaggagacctgcaccaccgaggacgagatctacagcaggatctgcagcgagatcaccagccccaagaaaaagagaaaagtctaagctgccttctgcggggcttgccttctggccatgcccttcttctctcccttgcacctgtacctcttggtctttgaataaagcctgagtaggaaggctagcaaaaaaaaaaaaaaaaaaaaaaaaaaaaaaaaaaaaaaaaaaaaaaaaaaaaaaaaaaaaaaaaaaaaaaaaaaaaaaaa

SEQ ID NO: 6277 - RNA, 5797 nt, synthetic construct
  source 1..5797: mol_type = other RNA
aggaaataagagagaaaagaagagtaagaagaaatataagagccaccatggcccctaagaagaagcgtaaagtgagccggatggaacgcctcgtctacgaggtgcggcagaagtgcagaaacatcgaggacatctgcatctcctgcggatctctgaacgtgaccctggagcacccactgttcatcggcggcatgtgccagaactgtaaaaactgttttctggagtgtgcctatcaatacgacgatgacggctaccagagctactgcaccatctgttgcggcggaagagaggtgctgatgtgtggaaataacaactgctgccggtgcttctgcgtggaatgcgtggacctgctggtgggccccggcgccgcccaggccgctattaaggaagatccttggaactgctacatgtgcggccacaagggcacatacggcctgctgagacggagagaggactggcctagcagactgcagatgttcttcgccaataaccacgaccaggagttcgacccccctaaggtgtaccctcccgtccccgccgagaagagaaagcccatccgggtcctgagcctgttcgatggcatcgccaccggtctgctggtgctgaaggacctgggcatccaggtggataggtacattgcctccgaggtgtgcgaggactccatcaccgtgggaatggtgcgtcatcagggcaagatcatgtacgtgggcgacgtgcggagcgtgacacagaagcatatccaggagtggggccctttcgacctggtgatcggcggcagcccttgcaatgacctgagcatcgtgaacccagcccggaagggcctgtacgagggaaccggcagactgttcttcgagttttacagactgctgcacgacgcccggcctaaggaaggcgacgaccggcccttcttttggctgttcgagaatgtggtggccatgggagtcagcgacaagcgggatattagccggttcctggagagcaaccccgtgatgatcgatgccaaggaagtgagcgccgcccaccgggccagatacttctggggcaatctgcctggcatgaacagacccctggccagcaccgtgaacgacaagctggagctgcaggagtgcctggagcacggccggatcgccaagttcagcaaggtgagaaccatcaccacccgaagcaacagcatcaaacaaggcaaggaccagcactttcctgtgttcatgaacgagaaggaggacatcctgtggtgtaccgagatggagagagtgttcgggttcccagtccactacacagatgtcagcaacatgtctagactggccagacagagactgctgggaagaagctggtccgtccctgtgatcagacacctgttcgcccctctgaaggagtacttcgcctgcgtgagcagcggcaacagcaacgccaacagccggggccccagcttctctagcggcctggtgccactgtccctgagagggagccacatgggccccatggagatctacaaaaccgtgagcgcctggaagcggcagcctgtgcgcgtgctgagcctgtttcggaatatcgataaagtcctgaaaagcctgggattcctggagagcggctctggctccggcggtggcaccctgaagtacgtggaggatgtgacaaacgtggtcagacgggatgtggagaagtggggccccttcgatctggtgtacggcagcacccaacccctgggcagctcttgtgaccggtgccctggctggtacatgtttcagttccaccggatcctgcagtacgccctgccgagacaggagtcccagcggccattcttttggattttcatggacaacttgctgctgaccgaggatgaccaggaaactaccactcggttcctgcagaccgaagccgtgaccctgcaggacgtgagaggccgggactaccagaacgccatgcgggtgtggtccaacatccctggactgaaaagcaagcacgcacctctgacccctaaagaagaggagtacctgcaggcccaggtgcggagcagaagcaagctggacgcccctaaggtggatctgctggtgaagaattgcctcctgcccctgagagagtacttcaagtatttcagccagaatagtctgcccctgggcggcccaagcagcggcgcccctcctcccagcggcggcagcccagccggctccccaacctctaccgaggagggcacctctgagtccgccacccccgagagcggccctggcacctccaccgagcccagcgagggcagcgcacccggcagccctgccggcagccccacctccacagaggagggaaccagcaccgagcccagcgaaggcagcgccccaggcaccagcaccgagcctagtgagggcggctctggcggcggcagcgcccaggagattaaacggatcaacaagatcagaagaagacttgtgaaagacagcaacaccaagaaggccggcaagacaggccccatgaaaaccctgctggttagagtgatgacacccgatctgagagagcggctggaaaacctgagaaagaagcctgaaaatatcccccagcccatcagcaatacatctagagccaacctgaataagctgctgaccgattacaccgaaatgaagaaggcgatcctgcatgtgtactgggaagagttccagaaggaccctgtgggcctgatgagccgggtggcccagcctgccagcaagaagatcgatcagaacaagctgaaacctgagatggacgagaagggcaacctgaccaccgccggctttgcctgctctcagtgtggccagcccctgttcgtgtacaagctggagcaggtgtctgagaagggcaaggcttacaccaactacttcggacggtgcaatgtggccgagcacgaaaagctgatcctgctggcccagctgaagcccgagaaggatagcgacgaagccgtgacatatagcctgggaaagtttgggcagagggccctggatttctacagcattcatgtgaccaaggagtccacccaccccgtgaagcccctggcccagatcgccggaaacagatacgcctccggacctgtgggaaaggccctgagcgacgcatgtatgggcacaatcgcctccttcctgtctaagtaccaggacatcatcatcgaacaccagaaggtggtgaagggcaaccagaagagactggagagcctgcgggagctggccggcaaggaaaacctggaataccctagcgtgaccctgccacctcagcctcacaccaaggagggcgttgatgcctacaacgaagtgatcgcccgggtgcgaatgtgggtgaacctgaacctgtggcagaagctgaagctaagcagagatgatgccaagcctctgctgagactgaagggattcccttcctttcctctggtcgagagacaggccaacgaagtggactggtgggacatggtgtgtaacgtgaagaagctgatcaacgagaaaaaggaggatggcaaggtgttttggcagaatctggctggctacaagagacaggaagccctgagaccatacctgagcagcgaggaagatcggaagaagggaaagaaattcgctcggtaccagctgggcgacctgctgctgcacctggaaaagaagcacggcgaggactggggaaaggtgtacgacgaggcctgggagcggattgacaagaaagtggaaggcctgagcaagcacatcaagctggaagaggaacggagaagcgaggacgcccagagcaaggccgccctgaccgactggctgcgggctaaggccagcttcgtgatcgagggcctgaaggaggccgacaaggacgagttctgcagatgcgagctgaagctgcagaagtggtacggggacctgcggggaaagcccttcgccatcgaagccgagaacagcatcctggacatcagcggcttcagcaagcagtacaactgtgccttcatctggcagaaggacggcgtgaagaagctgaacctgtacctgatcatcaactacttcaagggcggcaagctgcggttcaagaagatcaaacctgaagccttcgaagccaacagattctacaccgtgatcaacaaaaagagcggcgagatcgtgcccatggaggtgaacttcaacttcgacgaccccaacctgatcatcctgcctctggcctttggcaagagacagggcagagaattcatctggaacgacctgctgtccctggaaaccggcagcctgaagctggccaacggaagagtgatcgagaagacactgtacaacagaagaacccggcaggatgagcctgccctgttcgtggccctgaccttcgagcggcgggaggtcctggactcctccaatatcaaaccaatgaacctgatcggcgtggcaagaggcgaaaacatccccgccgtgatcgccctgaccgaccccgagggctgcccactgagccggtttaaggatagcctgggaaacccaacccacatcctgagaatcggcgagagctataaggagaagcagcggaccatccaggccaagaaggaggtggagcagcggagagccggcggctacagccggaagtacgccagcaaagccaagaatctggcagacgatatggtgagaaacaccgctagagatctgctgtactacgccgtgacccaggatgccatgctgatcttcgccaacctgagccggggcttcggccggcagggcaagcggaccttcatggccgagagacagtacacacggatggaggactggctgaccgccaagctggcctacgagggcctgagcaagacctacctgtccaagacactggcccagtacacctccaagacatgcagcaactgtgggtttaccatcaccagcgccgactacgacagggtgctggagaagctgaagaagacagcaacaggctggatgaccacaattaacggcaaggagctgaaggtggagggccagattacctactacaacagatacaagagacagaacgtagtcaaggacctgtccgtcgagctggatagactgagcgaagaatctgtgaacaacgacatctcctcctggacaaagggcagaagcggagaagctctgagcctcctgaagaaaagattctcccatagacccgtgcaggagaagttcgtgtgcctgaactgcggcttcgagacacacgcagccgagcaagccgccctgaacatcgccagatcctggctgttcctgcggagccaggagtacaagaaataccagacaaacaagacaaccggcaacaccgataagagagccttcgtcgagacctggcagtccttttaccggaagaagcttaaggaggtgtggaaacctgccgtgcggtctggcggatctggcggaggctccacaagcagccaggagcccgtgaccttcgaggacgtggccgtgtacttcacccagaaccagtgggccagcctggaccccatgcagagggccctgtacctggaggtgatgctggagaactacgccaacatcaccagcctggccctgcccttccccaagcccgacctgatcctgcagctggagcagggcgaggccccctgggacctggacccctggacccccctggagggcgaggccctggagggcgtgcacaccagccccaagaaaaagagaaaagtctaagctgccttctgcggggcttgccttctggccatgcccttcttctctcccttgcacctgtacctcttggtctttgaataaagcctgagtaggaaggctagcaaaaaaaaaaaaaaaaaaaaaaaaaaaaaaaaaaaaaaaaaaaaaaaaaaaaaaaaaaaaaaaaaaaaaaaaaaaaaaaa

SEQ ID NO: 6278 - RNA, 5797 nt, synthetic construct
  source 1..5797: mol_type = other RNA
aggaaataagagagaaaagaagagtaagaagaaatataagagccaccatggcccctaagaagaagcgtaaagtgagccggatggaacgcctcgtctacgaggtgcggcagaagtgcagaaacatcgaggacatctgcatctcctgcggatctctgaacgtgaccctggagcacccactgttcatcggcggcatgtgccagaactgtaaaaactgttttctggagtgtgcctatcaatacgacgatgacggctaccagagctactgcaccatctgttgcggcggaagagaggtgctgatgtgtggaaataacaactgctgccggtgcttctgcgtggaatgcgtggacctgctggtgggccccggcgccgcccaggccgctattaaggaagatccttggaactgctacatgtgcggccacaagggcacatacggcctgctgagacggagagaggactggcctagcagactgcagatgttcttcgccaataaccacgaccaggagttcgacccccctaaggtgtaccctcccgtccccgccgagaagagaaagcccatccgggtcctgagcctgttcgatggcatcgccaccggtctgctggtgctgaaggacctgggcatccaggtggataggtacattgcctccgaggtgtgcgaggactccatcaccgtgggaatggtgcgtcatcagggcaagatcatgtacgtgggcgacgtgcggagcgtgacacagaagcatatccaggagtggggccctttcgacctggtgatcggcggcagcccttgcaatgacctgagcatcgtgaacccagcccggaagggcctgtacgagggaaccggcagactgttcttcgagttttacagactgctgcacgacgcccggcctaaggaaggcgacgaccggcccttcttttggctgttcgagaatgtggtggccatgggagtcagcgacaagcgggatattagccggttcctggagagcaaccccgtgatgatcgatgccaaggaagtgagcgccgcccaccgggccagatacttctggggcaatctgcctggcatgaacagacccctggccagcaccgtgaacgacaagctggagctgcaggagtgcctggagcacggccggatcgccaagttcagcaaggtgagaaccatcaccacccgaagcaacagcatcaaacaaggcaaggaccagcactttcctgtgttcatgaacgagaaggaggacatcctgtggtgtaccgagatggagagagtgttcgggttcccagtccactacacagatgtcagcaacatgtctagactggccagacagagactgctgggaagaagctggtccgtccctgtgatcagacacctgttcgcccctctgaaggagtacttcgcctgcgtgagcagcggcaacagcaacgccaacagccggggccccagcttctctagcggcctggtgccactgtccctgagagggagccacatgggccccatggagatctacaaaaccgtgagcgcctggaagcggcagcctgtgcgcgtgctgagcctgtttcggaatatcgataaagtcctgaaaagcctgggattcctggagagcggctctggctccggcggtggcaccctgaagtacgtggaggatgtgacaaacgtggtcagacgggatgtggagaagtggggccccttcgatctggtgtacggcagcacccaacccctgggcagctcttgtgaccggtgccctggctggtacatgtttcagttccaccggatcctgcagtacgccctgccgagacaggagtcccagcggccattcttttggattttcatggacaacttgctgctgaccgaggatgaccaggaaactaccactcggttcctgcagaccgaagccgtgaccctgcaggacgtgagaggccgggactaccagaacgccatgcgggtgtggtccaacatccctggactgaaaagcaagcacgcacctctgacccctaaagaagaggagtacctgcaggcccaggtgcggagcagaagcaagctggacgcccctaaggtggatctgctggtgaagaattgcctcctgcccctgagagagtacttcaagtatttcagccagaatagtctgcccctgggcggcccaagcagcggcgcccctcctcccagcggcggcagcccagccggctccccaacctctaccgaggagggcacctctgagtccgccacccccgagagcggccctggcacctccaccgagcccagcgagggcagcgcacccggcagccctgccggcagccccacctccacagaggagggaaccagcaccgagcccagcgaaggcagcgccccaggcaccagcaccgagcctagtgagggcggctctggcggcggcagcgcccaggagattaaacggatcaacaagatcagaagaagacttgtgaaagacagcaacaccaagaaggccggcaagacaggccccatgaaaaccctgctggttagagtgatgacacccgatctgagagagcggctggaaaacctgagaaagaagcctgaaaatatcccccagcccatcagcaatacatctagagccaacctgaataagctgctgaccgattacaccgaaatgaagaaggcgatcctgcatgtgtactgggaagagttccagaaggaccctgtgggcctgatgagccgggtggcccagcctgccagcaagaagatcgatcagaacaagctgaaacctgagatggacgagaagggcaacctgaccaccgccggctttgcctgctctcagtgtggccagcccctgttcgtgtacaagctggagcaggtgtctgagaagggcaaggcttacaccaactacttcggacggtgcaatgtggccgagcacgaaaagctgatcctgctggcccagctgaagcccgagaaggatagcgacgaagccgtgacatatagcctgggaaagtttgggcagagggccctggatttctacagcattcatgtgaccaaggagtccacccaccccgtgaagcccctggcccagatcgccggaaacagatacgcctccggacctgtgggaaaggccctgagcgacgcatgtatgggcacaatcgcctccttcctgtctaagtaccaggacatcatcatcgaacaccagaaggtggtgaagggcaaccagaagagactggagagcctgcgggagctggccggcaaggaaaacctggaataccctagcgtgaccctgccacctcagcctcacaccaaggagggcgttgatgcctacaacgaagtgatcgcccgggtgcgaatgtgggtgaacctgaacctgtggcagaagctgaagctaagcagagatgatgccaagcctctgctgagactgaagggattcccttcctttcctctggtcgagagacaggccaacgaagtggactggtgggacatggtgtgtaacgtgaagaagctgatcaacgagaaaaaggaggatggcaaggtgttttggcagaatctggctggctacaagagacaggaagccctgagaccatacctgagcagcgaggaagatcggaagaagggaaagaaattcgctcggtaccagctgggcgacctgctgctgcacctggaaaagaagcacggcgaggactggggaaaggtgtacgacgaggcctgggagcggattgacaagaaagtggaaggcctgagcaagcacatcaagctggaagaggaacggagaagcgaggacgcccagagcaaggccgccctgaccgactggctgcgggctaaggccagcttcgtgatcgagggcctgaaggaggccgacaaggacgagttctgcagatgcgagctgaagctgcagaagtggtacggggacctgcggggaaagcccttcgccatcgaagccgagaacagcatcctggacatcagcggcttcagcaagcagtacaactgtgccttcatctggcagaaggacggcgtgaagaagctgaacctgtacctgatcatcaactacttcaagggcggcaagctgcggttcaagaagatcaaacctgaagccttcgaagccaacagattctacaccgtgatcaacaaaaagagcggcgagatcgtgcccatggaggtgaacttcaacttcgacgaccccaacctgatcatcctgcctctggcctttggcaagagacagggcagagaattcatctggaacgacctgctgtccctggaaaccggcagcctgaagctggccaacggaagagtgatcgagaagacactgtacaacagaagaacccggcaggatgagcctgccctgttcgtggccctgaccttcgagcggcgggaggtcctggactcctccaatatcaaaccaatgaacctgatcggcgtggcaagaggcgaaaacatccccgccgtgatcgccctgaccgaccccgagggctgcccactgagccggtttaaggatagcctgggaaacccaacccacatcctgagaatcggcgagagctataaggagaagcagcggaccatccaggccaagaaggaggtggagcagcggagagccggcggctacagccggaagtacgccagcaaagccaagaatctggcagacgatatggtgagaaacaccgctagagatctgctgtactacgccgtgacccaggatgccatgctgatcttcgccaacctgagccggggcttcggccggcagggcaagcggaccttcatggccgagagacagtacacacggatggaggactggctgaccgccaagctggcctacgagggcctgagcaagacctacctgtccaagacactggcccagtacacctccaagacatgcagcaactgtgggtttaccatcaccagcgccgactacgacagggtgctggagaagctgaagaagacagcaacaggctggatgaccacaattaacggcaaggagctgaaggtggagggccagattacctactacaacagatacaagagacagaacgtagtcaaggacctgtccgtcgagctggatagactgagcgaagaatctgtgaacaacgacatctcctcctggacaaagggcagaagcggagaagctctgagcctcctgaagaaaagattctcccatagacccgtgcaggagaagttcgtgtgcctgaactgcggcttcgagacacacgcagccgagcaagccgccctgaacatcgccagatcctggctgttcctgcggagccaggagtacaagaaataccagacaaacaagacaaccggcaacaccgataagagagccttcgtcgagacctggcagtccttttaccggaagaagcttaaggaggtgtggaaacctgccgtgcggtctggcggatctggcggaggctccacaagcctgcaggagagcgtgaccttcaaggacgtggccgtgctgttcacccaggacgagtgggcccagctgagccccgcccagagggccctgtacagggacgtgatgctggagaactacagccacctggtgagcctgggcctgctgggccccaagcccgacctgttcgcccagctgggcaagggcgaggagtggacccccgaggacaccagcaggggcttctgcctggactggatgaccatccccgtgaccagccccaagaaaaagagaaaagtctaagctgccttctgcggggcttgccttctggccatgcccttcttctctcccttgcacctgtacctcttggtctttgaataaagcctgagtaggaaggctagcaaaaaaaaaaaaaaaaaaaaaaaaaaaaaaaaaaaaaaaaaaaaaaaaaaaaaaaaaaaaaaaaaaaaaaaaaaaaaaaa

SEQ ID NO: 6279 - RNA, 5797 nt, synthetic construct
  source 1..5797: mol_type = other RNA
aggaaataagagagaaaagaagagtaagaagaaatataagagccaccatggcccctaagaagaagcgtaaagtgagccggatggaacgcctcgtctacgaggtgcggcagaagtgcagaaacatcgaggacatctgcatctcctgcggatctctgaacgtgaccctggagcacccactgttcatcggcggcatgtgccagaactgtaaaaactgttttctggagtgtgcctatcaatacgacgatgacggctaccagagctactgcaccatctgttgcggcggaagagaggtgctgatgtgtggaaataacaactgctgccggtgcttctgcgtggaatgcgtggacctgctggtgggccccggcgccgcccaggccgctattaaggaagatccttggaactgctacatgtgcggccacaagggcacatacggcctgctgagacggagagaggactggcctagcagactgcagatgttcttcgccaataaccacgaccaggagttcgacccccctaaggtgtaccctcccgtccccgccgagaagagaaagcccatccgggtcctgagcctgttcgatggcatcgccaccggtctgctggtgctgaaggacctgggcatccaggtggataggtacattgcctccgaggtgtgcgaggactccatcaccgtgggaatggtgcgtcatcagggcaagatcatgtacgtgggcgacgtgcggagcgtgacacagaagcatatccaggagtggggccctttcgacctggtgatcggcggcagcccttgcaatgacctgagcatcgtgaacccagcccggaagggcctgtacgagggaaccggcagactgttcttcgagttttacagactgctgcacgacgcccggcctaaggaaggcgacgaccggcccttcttttggctgttcgagaatgtggtggccatgggagtcagcgacaagcgggatattagccggttcctggagagcaaccccgtgatgatcgatgccaaggaagtgagcgccgcccaccgggccagatacttctggggcaatctgcctggcatgaacagacccctggccagcaccgtgaacgacaagctggagctgcaggagtgcctggagcacggccggatcgccaagttcagcaaggtgagaaccatcaccacccgaagcaacagcatcaaacaaggcaaggaccagcactttcctgtgttcatgaacgagaaggaggacatcctgtggtgtaccgagatggagagagtgttcgggttcccagtccactacacagatgtcagcaacatgtctagactggccagacagagactgctgggaagaagctggtccgtccctgtgatcagacacctgttcgcccctctgaaggagtacttcgcctgcgtgagcagcggcaacagcaacgccaacagccggggccccagcttctctagcggcctggtgccactgtccctgagagggagccacatgggccccatggagatctacaaaaccgtgagcgcctggaagcggcagcctgtgcgcgtgctgagcctgtttcggaatatcgataaagtcctgaaaagcctgggattcctggagagcggctctggctccggcggtggcaccctgaagtacgtggaggatgtgacaaacgtggtcagacgggatgtggagaagtggggccccttcgatctggtgtacggcagcacccaacccctgggcagctcttgtgaccggtgccctggctggtacatgtttcagttccaccggatcctgcagtacgccctgccgagacaggagtcccagcggccattcttttggattttcatggacaacttgctgctgaccgaggatgaccaggaaactaccactcggttcctgcagaccgaagccgtgaccctgcaggacgtgagaggccgggactaccagaacgccatgcgggtgtggtccaacatccctggactgaaaagcaagcacgcacctctgacccctaaagaagaggagtacctgcaggcccaggtgcggagcagaagcaagctggacgcccctaaggtggatctgctggtgaagaattgcctcctgcccctgagagagtacttcaagtatttcagccagaatagtctgcccctgggcggcccaagcagcggcgcccctcctcccagcggcggcagcccagccggctccccaacctctaccgaggagggcacctctgagtccgccacccccgagagcggccctggcacctccaccgagcccagcgagggcagcgcacccggcagccctgccggcagccccacctccacagaggagggaaccagcaccgagcccagcgaaggcagcgccccaggcaccagcaccgagcctagtgagggcggctctggcggcggcagcgcccaggagattaaacggatcaacaagatcagaagaagacttgtgaaagacagcaacaccaagaaggccggcaagacaggccccatgaaaaccctgctggttagagtgatgacacccgatctgagagagcggctggaaaacctgagaaagaagcctgaaaatatcccccagcccatcagcaatacatctagagccaacctgaataagctgctgaccgattacaccgaaatgaagaaggcgatcctgcatgtgtactgggaagagttccagaaggaccctgtgggcctgatgagccgggtggcccagcctgccagcaagaagatcgatcagaacaagctgaaacctgagatggacgagaagggcaacctgaccaccgccggctttgcctgctctcagtgtggccagcccctgttcgtgtacaagctggagcaggtgtctgagaagggcaaggcttacaccaactacttcggacggtgcaatgtggccgagcacgaaaagctgatcctgctggcccagctgaagcccgagaaggatagcgacgaagccgtgacatatagcctgggaaagtttgggcagagggccctggatttctacagcattcatgtgaccaaggagtccacccaccccgtgaagcccctggcccagatcgccggaaacagatacgcctccggacctgtgggaaaggccctgagcgacgcatgtatgggcacaatcgcctccttcctgtctaagtaccaggacatcatcatcgaacaccagaaggtggtgaagggcaaccagaagagactggagagcctgcgggagctggccggcaaggaaaacctggaataccctagcgtgaccctgccacctcagcctcacaccaaggagggcgttgatgcctacaacgaagtgatcgcccgggtgcgaatgtgggtgaacctgaacctgtggcagaagctgaagctaagcagagatgatgccaagcctctgctgagactgaagggattcccttcctttcctctggtcgagagacaggccaacgaagtggactggtgggacatggtgtgtaacgtgaagaagctgatcaacgagaaaaaggaggatggcaaggtgttttggcagaatctggctggctacaagagacaggaagccctgagaccatacctgagcagcgaggaagatcggaagaagggaaagaaattcgctcggtaccagctgggcgacctgctgctgcacctggaaaagaagcacggcgaggactggggaaaggtgtacgacgaggcctgggagcggattgacaagaaagtggaaggcctgagcaagcacatcaagctggaagaggaacggagaagcgaggacgcccagagcaaggccgccctgaccgactggctgcgggctaaggccagcttcgtgatcgagggcctgaaggaggccgacaaggacgagttctgcagatgcgagctgaagctgcagaagtggtacggggacctgcggggaaagcccttcgccatcgaagccgagaacagcatcctggacatcagcggcttcagcaagcagtacaactgtgccttcatctggcagaaggacggcgtgaagaagctgaacctgtacctgatcatcaactacttcaagggcggcaagctgcggttcaagaagatcaaacctgaagccttcgaagccaacagattctacaccgtgatcaacaaaaagagcggcgagatcgtgcccatggaggtgaacttcaacttcgacgaccccaacctgatcatcctgcctctggcctttggcaagagacagggcagagaattcatctggaacgacctgctgtccctggaaaccggcagcctgaagctggccaacggaagagtgatcgagaagacactgtacaacagaagaacccggcaggatgagcctgccctgttcgtggccctgaccttcgagcggcgggaggtcctggactcctccaatatcaaaccaatgaacctgatcggcgtggcaagaggcgaaaacatccccgccgtgatcgccctgaccgaccccgagggctgcccactgagccggtttaaggatagcctgggaaacccaacccacatcctgagaatcggcgagagctataaggagaagcagcggaccatccaggccaagaaggaggtggagcagcggagagccggcggctacagccggaagtacgccagcaaagccaagaatctggcagacgatatggtgagaaacaccgctagagatctgctgtactacgccgtgacccaggatgccatgctgatcttcgccaacctgagccggggcttcggccggcagggcaagcggaccttcatggccgagagacagtacacacggatggaggactggctgaccgccaagctggcctacgagggcctgagcaagacctacctgtccaagacactggcccagtacacctccaagacatgcagcaactgtgggtttaccatcaccagcgccgactacgacagggtgctggagaagctgaagaagacagcaacaggctggatgaccacaattaacggcaaggagctgaaggtggagggccagattacctactacaacagatacaagagacagaacgtagtcaaggacctgtccgtcgagctggatagactgagcgaagaatctgtgaacaacgacatctcctcctggacaaagggcagaagcggagaagctctgagcctcctgaagaaaagattctcccatagacccgtgcaggagaagttcgtgtgcctgaactgcggcttcgagacacacgcagccgagcaagccgccctgaacatcgccagatcctggctgttcctgcggagccaggagtacaagaaataccagacaaacaagacaaccggcaacaccgataagagagccttcgtcgagacctggcagtccttttaccggaagaagcttaaggaggtgtggaaacctgccgtgcggtctggcggatctggcggaggctccacaagcagcctgggcagcgtgagcttcaaggacgtgaccgtggacttcagcagggaggagtggcagcagctggacctggcccagaagagcctgtacagggacgtgaccctggagaactacttcaacctgatcagcgtgggctgccaggtgcccaagcccgaggtgatcttcaacctggagcagggcggcgagctgtgcgtgctggacggcggcctgagctgccagaactgcagcgacggcgacatcggcaccagccccaagaaaaagagaaaagtctaagctgccttctgcggggcttgccttctggccatgcccttcttctctcccttgcacctgtacctcttggtctttgaataaagcctgagtaggaaggctagcaaaaaaaaaaaaaaaaaaaaaaaaaaaaaaaaaaaaaaaaaaaaaaaaaaaaaaaaaaaaaaaaaaaaaaaaaaaaaaaa

SEQ ID NO: 6280 - RNA, 5797 nt, synthetic construct
  source 1..5797: mol_type = other RNA
aggaaataagagagaaaagaagagtaagaagaaatataagagccaccatggcccctaagaagaagcgtaaagtgagccggatggaacgcctcgtctacgaggtgcggcagaagtgcagaaacatcgaggacatctgcatctcctgcggatctctgaacgtgaccctggagcacccactgttcatcggcggcatgtgccagaactgtaaaaactgttttctggagtgtgcctatcaatacgacgatgacggctaccagagctactgcaccatctgttgcggcggaagagaggtgctgatgtgtggaaataacaactgctgccggtgcttctgcgtggaatgcgtggacctgctggtgggccccggcgccgcccaggccgctattaaggaagatccttggaactgctacatgtgcggccacaagggcacatacggcctgctgagacggagagaggactggcctagcagactgcagatgttcttcgccaataaccacgaccaggagttcgacccccctaaggtgtaccctcccgtccccgccgagaagagaaagcccatccgggtcctgagcctgttcgatggcatcgccaccggtctgctggtgctgaaggacctgggcatccaggtggataggtacattgcctccgaggtgtgcgaggactccatcaccgtgggaatggtgcgtcatcagggcaagatcatgtacgtgggcgacgtgcggagcgtgacacagaagcatatccaggagtggggccctttcgacctggtgatcggcggcagcccttgcaatgacctgagcatcgtgaacccagcccggaagggcctgtacgagggaaccggcagactgttcttcgagttttacagactgctgcacgacgcccggcctaaggaaggcgacgaccggcccttcttttggctgttcgagaatgtggtggccatgggagtcagcgacaagcgggatattagccggttcctggagagcaaccccgtgatgatcgatgccaaggaagtgagcgccgcccaccgggccagatacttctggggcaatctgcctggcatgaacagacccctggccagcaccgtgaacgacaagctggagctgcaggagtgcctggagcacggccggatcgccaagttcagcaaggtgagaaccatcaccacccgaagcaacagcatcaaacaaggcaaggaccagcactttcctgtgttcatgaacgagaaggaggacatcctgtggtgtaccgagatggagagagtgttcgggttcccagtccactacacagatgtcagcaacatgtctagactggccagacagagactgctgggaagaagctggtccgtccctgtgatcagacacctgttcgcccctctgaaggagtacttcgcctgcgtgagcagcggcaacagcaacgccaacagccggggccccagcttctctagcggcctggtgccactgtccctgagagggagccacatgggccccatggagatctacaaaaccgtgagcgcctggaagcggcagcctgtgcgcgtgctgagcctgtttcggaatatcgataaagtcctgaaaagcctgggattcctggagagcggctctggctccggcggtggcaccctgaagtacgtggaggatgtgacaaacgtggtcagacgggatgtggagaagtggggccccttcgatctggtgtacggcagcacccaacccctgggcagctcttgtgaccggtgccctggctggtacatgtttcagttccaccggatcctgcagtacgccctgccgagacaggagtcccagcggccattcttttggattttcatggacaacttgctgctgaccgaggatgaccaggaaactaccactcggttcctgcagaccgaagccgtgaccctgcaggacgtgagaggccgggactaccagaacgccatgcgggtgtggtccaacatccctggactgaaaagcaagcacgcacctctgacccctaaagaagaggagtacctgcaggcccaggtgcggagcagaagcaagctggacgcccctaaggtggatctgctggtgaagaattgcctcctgcccctgagagagtacttcaagtatttcagccagaatagtctgcccctgggcggcccaagcagcggcgcccctcctcccagcggcggcagcccagccggctccccaacctctaccgaggagggcacctctgagtccgccacccccgagagcggccctggcacctccaccgagcccagcgagggcagcgcacccggcagccctgccggcagccccacctccacagaggagggaaccagcaccgagcccagcgaaggcagcgccccaggcaccagcaccgagcctagtgagggcggctctggcggcggcagcgcccaggagattaaacggatcaacaagatcagaagaagacttgtgaaagacagcaacaccaagaaggccggcaagacaggccccatgaaaaccctgctggttagagtgatgacacccgatctgagagagcggctggaaaacctgagaaagaagcctgaaaatatcccccagcccatcagcaatacatctagagccaacctgaataagctgctgaccgattacaccgaaatgaagaaggcgatcctgcatgtgtactgggaagagttccagaaggaccctgtgggcctgatgagccgggtggcccagcctgccagcaagaagatcgatcagaacaagctgaaacctgagatggacgagaagggcaacctgaccaccgccggctttgcctgctctcagtgtggccagcccctgttcgtgtacaagctggagcaggtgtctgagaagggcaaggcttacaccaactacttcggacggtgcaatgtggccgagcacgaaaagctgatcctgctggcccagctgaagcccgagaaggatagcgacgaagccgtgacatatagcctgggaaagtttgggcagagggccctggatttctacagcattcatgtgaccaaggagtccacccaccccgtgaagcccctggcccagatcgccggaaacagatacgcctccggacctgtgggaaaggccctgagcgacgcatgtatgggcacaatcgcctccttcctgtctaagtaccaggacatcatcatcgaacaccagaaggtggtgaagggcaaccagaagagactggagagcctgcgggagctggccggcaaggaaaacctggaataccctagcgtgaccctgccacctcagcctcacaccaaggagggcgttgatgcctacaacgaagtgatcgcccgggtgcgaatgtgggtgaacctgaacctgtggcagaagctgaagctaagcagagatgatgccaagcctctgctgagactgaagggattcccttcctttcctctggtcgagagacaggccaacgaagtggactggtgggacatggtgtgtaacgtgaagaagctgatcaacgagaaaaaggaggatggcaaggtgttttggcagaatctggctggctacaagagacaggaagccctgagaccatacctgagcagcgaggaagatcggaagaagggaaagaaattcgctcggtaccagctgggcgacctgctgctgcacctggaaaagaagcacggcgaggactggggaaaggtgtacgacgaggcctgggagcggattgacaagaaagtggaaggcctgagcaagcacatcaagctggaagaggaacggagaagcgaggacgcccagagcaaggccgccctgaccgactggctgcgggctaaggccagcttcgtgatcgagggcctgaaggaggccgacaaggacgagttctgcagatgcgagctgaagctgcagaagtggtacggggacctgcggggaaagcccttcgccatcgaagccgagaacagcatcctggacatcagcggcttcagcaagcagtacaactgtgccttcatctggcagaaggacggcgtgaagaagctgaacctgtacctgatcatcaactacttcaagggcggcaagctgcggttcaagaagatcaaacctgaagccttcgaagccaacagattctacaccgtgatcaacaaaaagagcggcgagatcgtgcccatggaggtgaacttcaacttcgacgaccccaacctgatcatcctgcctctggcctttggcaagagacagggcagagaattcatctggaacgacctgctgtccctggaaaccggcagcctgaagctggccaacggaagagtgatcgagaagacactgtacaacagaagaacccggcaggatgagcctgccctgttcgtggccctgaccttcgagcggcgggaggtcctggactcctccaatatcaaaccaatgaacctgatcggcgtggcaagaggcgaaaacatccccgccgtgatcgccctgaccgaccccgagggctgcccactgagccggtttaaggatagcctgggaaacccaacccacatcctgagaatcggcgagagctataaggagaagcagcggaccatccaggccaagaaggaggtggagcagcggagagccggcggctacagccggaagtacgccagcaaagccaagaatctggcagacgatatggtgagaaacaccgctagagatctgctgtactacgccgtgacccaggatgccatgctgatcttcgccaacctgagccggggcttcggccggcagggcaagcggaccttcatggccgagagacagtacacacggatggaggactggctgaccgccaagctggcctacgagggcctgagcaagacctacctgtccaagacactggcccagtacacctccaagacatgcagcaactgtgggtttaccatcaccagcgccgactacgacagggtgctggagaagctgaagaagacagcaacaggctggatgaccacaattaacggcaaggagctgaaggtggagggccagattacctactacaacagatacaagagacagaacgtagtcaaggacctgtccgtcgagctggatagactgagcgaagaatctgtgaacaacgacatctcctcctggacaaagggcagaagcggagaagctctgagcctcctgaagaaaagattctcccatagacccgtgcaggagaagttcgtgtgcctgaactgcggcttcgagacacacgcagccgagcaagccgccctgaacatcgccagatcctggctgttcctgcggagccaggagtacaagaaataccagacaaacaagacaaccggcaacaccgataagagagccttcgtcgagacctggcagtccttttaccggaagaagcttaaggaggtgtggaaacctgccgtgcggtctggcggatctggcggaggctccacaagccccgcccagggccccggcgaggccaggcccagcaggaagaggggcaggaggcccagggccctgaagttcgtggacgtggccgtgtacttcagccccgaggagtggggctgcctgaggcccgcccagagggccctgtacagggacgtgatgagggagacctacggccacctgggcgccctgggctgcgccggccccaagcccgccctgatcagctggctggagaggaacaccgacgactgggagaccagccccaagaaaaagagaaaagtctaagctgccttctgcggggcttgccttctggccatgcccttcttctctcccttgcacctgtacctcttggtctttgaataaagcctgagtaggaaggctagcaaaaaaaaaaaaaaaaaaaaaaaaaaaaaaaaaaaaaaaaaaaaaaaaaaaaaaaaaaaaaaaaaaaaaaaaaaaaaaaa

SEQ ID NO: 6281 - RNA, 5797 nt, synthetic construct
  source 1..5797: mol_type = other RNA
aggaaataagagagaaaagaagagtaagaagaaatataagagccaccatggcccctaagaagaagcgtaaagtgagccggatggaacgcctcgtctacgaggtgcggcagaagtgcagaaacatcgaggacatctgcatctcctgcggatctctgaacgtgaccctggagcacccactgttcatcggcggcatgtgccagaactgtaaaaactgttttctggagtgtgcctatcaatacgacgatgacggctaccagagctactgcaccatctgttgcggcggaagagaggtgctgatgtgtggaaataacaactgctgccggtgcttctgcgtggaatgcgtggacctgctggtgggccccggcgccgcccaggccgctattaaggaagatccttggaactgctacatgtgcggccacaagggcacatacggcctgctgagacggagagaggactggcctagcagactgcagatgttcttcgccaataaccacgaccaggagttcgacccccctaaggtgtaccctcccgtccccgccgagaagagaaagcccatccgggtcctgagcctgttcgatggcatcgccaccggtctgctggtgctgaaggacctgggcatccaggtggataggtacattgcctccgaggtgtgcgaggactccatcaccgtgggaatggtgcgtcatcagggcaagatcatgtacgtgggcgacgtgcggagcgtgacacagaagcatatccaggagtggggccctttcgacctggtgatcggcggcagcccttgcaatgacctgagcatcgtgaacccagcccggaagggcctgtacgagggaaccggcagactgttcttcgagttttacagactgctgcacgacgcccggcctaaggaaggcgacgaccggcccttcttttggctgttcgagaatgtggtggccatgggagtcagcgacaagcgggatattagccggttcctggagagcaaccccgtgatgatcgatgccaaggaagtgagcgccgcccaccgggccagatacttctggggcaatctgcctggcatgaacagacccctggccagcaccgtgaacgacaagctggagctgcaggagtgcctggagcacggccggatcgccaagttcagcaaggtgagaaccatcaccacccgaagcaacagcatcaaacaaggcaaggaccagcactttcctgtgttcatgaacgagaaggaggacatcctgtggtgtaccgagatggagagagtgttcgggttcccagtccactacacagatgtcagcaacatgtctagactggccagacagagactgctgggaagaagctggtccgtccctgtgatcagacacctgttcgcccctctgaaggagtacttcgcctgcgtgagcagcggcaacagcaacgccaacagccggggccccagcttctctagcggcctggtgccactgtccctgagagggagccacatgggccccatggagatctacaaaaccgtgagcgcctggaagcggcagcctgtgcgcgtgctgagcctgtttcggaatatcgataaagtcctgaaaagcctgggattcctggagagcggctctggctccggcggtggcaccctgaagtacgtggaggatgtgacaaacgtggtcagacgggatgtggagaagtggggccccttcgatctggtgtacggcagcacccaacccctgggcagctcttgtgaccggtgccctggctggtacatgtttcagttccaccggatcctgcagtacgccctgccgagacaggagtcccagcggccattcttttggattttcatggacaacttgctgctgaccgaggatgaccaggaaactaccactcggttcctgcagaccgaagccgtgaccctgcaggacgtgagaggccgggactaccagaacgccatgcgggtgtggtccaacatccctggactgaaaagcaagcacgcacctctgacccctaaagaagaggagtacctgcaggcccaggtgcggagcagaagcaagctggacgcccctaaggtggatctgctggtgaagaattgcctcctgcccctgagagagtacttcaagtatttcagccagaatagtctgcccctgggcggcccaagcagcggcgcccctcctcccagcggcggcagcccagccggctccccaacctctaccgaggagggcacctctgagtccgccacccccgagagcggccctggcacctccaccgagcccagcgagggcagcgcacccggcagccctgccggcagccccacctccacagaggagggaaccagcaccgagcccagcgaaggcagcgccccaggcaccagcaccgagcctagtgagggcggctctggcggcggcagcgcccaggagattaaacggatcaacaagatcagaagaagacttgtgaaagacagcaacaccaagaaggccggcaagacaggccccatgaaaaccctgctggttagagtgatgacacccgatctgagagagcggctggaaaacctgagaaagaagcctgaaaatatcccccagcccatcagcaatacatctagagccaacctgaataagctgctgaccgattacaccgaaatgaagaaggcgatcctgcatgtgtactgggaagagttccagaaggaccctgtgggcctgatgagccgggtggcccagcctgccagcaagaagatcgatcagaacaagctgaaacctgagatggacgagaagggcaacctgaccaccgccggctttgcctgctctcagtgtggccagcccctgttcgtgtacaagctggagcaggtgtctgagaagggcaaggcttacaccaactacttcggacggtgcaatgtggccgagcacgaaaagctgatcctgctggcccagctgaagcccgagaaggatagcgacgaagccgtgacatatagcctgggaaagtttgggcagagggccctggatttctacagcattcatgtgaccaaggagtccacccaccccgtgaagcccctggcccagatcgccggaaacagatacgcctccggacctgtgggaaaggccctgagcgacgcatgtatgggcacaatcgcctccttcctgtctaagtaccaggacatcatcatcgaacaccagaaggtggtgaagggcaaccagaagagactggagagcctgcgggagctggccggcaaggaaaacctggaataccctagcgtgaccctgccacctcagcctcacaccaaggagggcgttgatgcctacaacgaagtgatcgcccgggtgcgaatgtgggtgaacctgaacctgtggcagaagctgaagctaagcagagatgatgccaagcctctgctgagactgaagggattcccttcctttcctctggtcgagagacaggccaacgaagtggactggtgggacatggtgtgtaacgtgaagaagctgatcaacgagaaaaaggaggatggcaaggtgttttggcagaatctggctggctacaagagacaggaagccctgagaccatacctgagcagcgaggaagatcggaagaagggaaagaaattcgctcggtaccagctgggcgacctgctgctgcacctggaaaagaagcacggcgaggactggggaaaggtgtacgacgaggcctgggagcggattgacaagaaagtggaaggcctgagcaagcacatcaagctggaagaggaacggagaagcgaggacgcccagagcaaggccgccctgaccgactggctgcgggctaaggccagcttcgtgatcgagggcctgaaggaggccgacaaggacgagttctgcagatgcgagctgaagctgcagaagtggtacggggacctgcggggaaagcccttcgccatcgaagccgagaacagcatcctggacatcagcggcttcagcaagcagtacaactgtgccttcatctggcagaaggacggcgtgaagaagctgaacctgtacctgatcatcaactacttcaagggcggcaagctgcggttcaagaagatcaaacctgaagccttcgaagccaacagattctacaccgtgatcaacaaaaagagcggcgagatcgtgcccatggaggtgaacttcaacttcgacgaccccaacctgatcatcctgcctctggcctttggcaagagacagggcagagaattcatctggaacgacctgctgtccctggaaaccggcagcctgaagctggccaacggaagagtgatcgagaagacactgtacaacagaagaacccggcaggatgagcctgccctgttcgtggccctgaccttcgagcggcgggaggtcctggactcctccaatatcaaaccaatgaacctgatcggcgtggcaagaggcgaaaacatccccgccgtgatcgccctgaccgaccccgagggctgcccactgagccggtttaaggatagcctgggaaacccaacccacatcctgagaatcggcgagagctataaggagaagcagcggaccatccaggccaagaaggaggtggagcagcggagagccggcggctacagccggaagtacgccagcaaagccaagaatctggcagacgatatggtgagaaacaccgctagagatctgctgtactacgccgtgacccaggatgccatgctgatcttcgccaacctgagccggggcttcggccggcagggcaagcggaccttcatggccgagagacagtacacacggatggaggactggctgaccgccaagctggcctacgagggcctgagcaagacctacctgtccaagacactggcccagtacacctccaagacatgcagcaactgtgggtttaccatcaccagcgccgactacgacagggtgctggagaagctgaagaagacagcaacaggctggatgaccacaattaacggcaaggagctgaaggtggagggccagattacctactacaacagatacaagagacagaacgtagtcaaggacctgtccgtcgagctggatagactgagcgaagaatctgtgaacaacgacatctcctcctggacaaagggcagaagcggagaagctctgagcctcctgaagaaaagattctcccatagacccgtgcaggagaagttcgtgtgcctgaactgcggcttcgagacacacgcagccgagcaagccgccctgaacatcgccagatcctggctgttcctgcggagccaggagtacaagaaataccagacaaacaagacaaccggcaacaccgataagagagccttcgtcgagacctggcagtccttttaccggaagaagcttaaggaggtgtggaaacctgccgtgcggtctggcggatctggcggaggctccacaagcatgaacatggagggcctggtgatgttccaggacctgagcatcgacttcagccaggaggagtgggagtgcctgaaccccacccagaaggacctgtacagggacgtgatgatggagaactacagcagcctgctgagcctgggcctgagcatccccaagcccgacgtgatcagcctgctggagcagggcaaggagccctggatggtgagcagggacgtgctgggcggctggtgccccgacaggctgaccagccccaagaaaaagagaaaagtctaagctgccttctgcggggcttgccttctggccatgcccttcttctctcccttgcacctgtacctcttggtctttgaataaagcctgagtaggaaggctagcaaaaaaaaaaaaaaaaaaaaaaaaaaaaaaaaaaaaaaaaaaaaaaaaaaaaaaaaaaaaaaaaaaaaaaaaaaaaaaaa

SEQ ID NO: 6282 - RNA, 5797 nt, synthetic construct
  source 1..5797: mol_type = other RNA
aggaaataagagagaaaagaagagtaagaagaaatataagagccaccatggcccctaagaagaagcgtaaagtgagccggatggaacgcctcgtctacgaggtgcggcagaagtgcagaaacatcgaggacatctgcatctcctgcggatctctgaacgtgaccctggagcacccactgttcatcggcggcatgtgccagaactgtaaaaactgttttctggagtgtgcctatcaatacgacgatgacggctaccagagctactgcaccatctgttgcggcggaagagaggtgctgatgtgtggaaataacaactgctgccggtgcttctgcgtggaatgcgtggacctgctggtgggccccggcgccgcccaggccgctattaaggaagatccttggaactgctacatgtgcggccacaagggcacatacggcctgctgagacggagagaggactggcctagcagactgcagatgttcttcgccaataaccacgaccaggagttcgacccccctaaggtgtaccctcccgtccccgccgagaagagaaagcccatccgggtcctgagcctgttcgatggcatcgccaccggtctgctggtgctgaaggacctgggcatccaggtggataggtacattgcctccgaggtgtgcgaggactccatcaccgtgggaatggtgcgtcatcagggcaagatcatgtacgtgggcgacgtgcggagcgtgacacagaagcatatccaggagtggggccctttcgacctggtgatcggcggcagcccttgcaatgacctgagcatcgtgaacccagcccggaagggcctgtacgagggaaccggcagactgttcttcgagttttacagactgctgcacgacgcccggcctaaggaaggcgacgaccggcccttcttttggctgttcgagaatgtggtggccatgggagtcagcgacaagcgggatattagccggttcctggagagcaaccccgtgatgatcgatgccaaggaagtgagcgccgcccaccgggccagatacttctggggcaatctgcctggcatgaacagacccctggccagcaccgtgaacgacaagctggagctgcaggagtgcctggagcacggccggatcgccaagttcagcaaggtgagaaccatcaccacccgaagcaacagcatcaaacaaggcaaggaccagcactttcctgtgttcatgaacgagaaggaggacatcctgtggtgtaccgagatggagagagtgttcgggttcccagtccactacacagatgtcagcaacatgtctagactggccagacagagactgctgggaagaagctggtccgtccctgtgatcagacacctgttcgcccctctgaaggagtacttcgcctgcgtgagcagcggcaacagcaacgccaacagccggggccccagcttctctagcggcctggtgccactgtccctgagagggagccacatgggccccatggagatctacaaaaccgtgagcgcctggaagcggcagcctgtgcgcgtgctgagcctgtttcggaatatcgataaagtcctgaaaagcctgggattcctggagagcggctctggctccggcggtggcaccctgaagtacgtggaggatgtgacaaacgtggtcagacgggatgtggagaagtggggccccttcgatctggtgtacggcagcacccaacccctgggcagctcttgtgaccggtgccctggctggtacatgtttcagttccaccggatcctgcagtacgccctgccgagacaggagtcccagcggccattcttttggattttcatggacaacttgctgctgaccgaggatgaccaggaaactaccactcggttcctgcagaccgaagccgtgaccctgcaggacgtgagaggccgggactaccagaacgccatgcgggtgtggtccaacatccctggactgaaaagcaagcacgcacctctgacccctaaagaagaggagtacctgcaggcccaggtgcggagcagaagcaagctggacgcccctaaggtggatctgctggtgaagaattgcctcctgcccctgagagagtacttcaagtatttcagccagaatagtctgcccctgggcggcccaagcagcggcgcccctcctcccagcggcggcagcccagccggctccccaacctctaccgaggagggcacctctgagtccgccacccccgagagcggccctggcacctccaccgagcccagcgagggcagcgcacccggcagccctgccggcagccccacctccacagaggagggaaccagcaccgagcccagcgaaggcagcgccccaggcaccagcaccgagcctagtgagggcggctctggcggcggcagcgcccaggagattaaacggatcaacaagatcagaagaagacttgtgaaagacagcaacaccaagaaggccggcaagacaggccccatgaaaaccctgctggttagagtgatgacacccgatctgagagagcggctggaaaacctgagaaagaagcctgaaaatatcccccagcccatcagcaatacatctagagccaacctgaataagctgctgaccgattacaccgaaatgaagaaggcgatcctgcatgtgtactgggaagagttccagaaggaccctgtgggcctgatgagccgggtggcccagcctgccagcaagaagatcgatcagaacaagctgaaacctgagatggacgagaagggcaacctgaccaccgccggctttgcctgctctcagtgtggccagcccctgttcgtgtacaagctggagcaggtgtctgagaagggcaaggcttacaccaactacttcggacggtgcaatgtggccgagcacgaaaagctgatcctgctggcccagctgaagcccgagaaggatagcgacgaagccgtgacatatagcctgggaaagtttgggcagagggccctggatttctacagcattcatgtgaccaaggagtccacccaccccgtgaagcccctggcccagatcgccggaaacagatacgcctccggacctgtgggaaaggccctgagcgacgcatgtatgggcacaatcgcctccttcctgtctaagtaccaggacatcatcatcgaacaccagaaggtggtgaagggcaaccagaagagactggagagcctgcgggagctggccggcaaggaaaacctggaataccctagcgtgaccctgccacctcagcctcacaccaaggagggcgttgatgcctacaacgaagtgatcgcccgggtgcgaatgtgggtgaacctgaacctgtggcagaagctgaagctaagcagagatgatgccaagcctctgctgagactgaagggattcccttcctttcctctggtcgagagacaggccaacgaagtggactggtgggacatggtgtgtaacgtgaagaagctgatcaacgagaaaaaggaggatggcaaggtgttttggcagaatctggctggctacaagagacaggaagccctgagaccatacctgagcagcgaggaagatcggaagaagggaaagaaattcgctcggtaccagctgggcgacctgctgctgcacctggaaaagaagcacggcgaggactggggaaaggtgtacgacgaggcctgggagcggattgacaagaaagtggaaggcctgagcaagcacatcaagctggaagaggaacggagaagcgaggacgcccagagcaaggccgccctgaccgactggctgcgggctaaggccagcttcgtgatcgagggcctgaaggaggccgacaaggacgagttctgcagatgcgagctgaagctgcagaagtggtacggggacctgcggggaaagcccttcgccatcgaagccgagaacagcatcctggacatcagcggcttcagcaagcagtacaactgtgccttcatctggcagaaggacggcgtgaagaagctgaacctgtacctgatcatcaactacttcaagggcggcaagctgcggttcaagaagatcaaacctgaagccttcgaagccaacagattctacaccgtgatcaacaaaaagagcggcgagatcgtgcccatggaggtgaacttcaacttcgacgaccccaacctgatcatcctgcctctggcctttggcaagagacagggcagagaattcatctggaacgacctgctgtccctggaaaccggcagcctgaagctggccaacggaagagtgatcgagaagacactgtacaacagaagaacccggcaggatgagcctgccctgttcgtggccctgaccttcgagcggcgggaggtcctggactcctccaatatcaaaccaatgaacctgatcggcgtggcaagaggcgaaaacatccccgccgtgatcgccctgaccgaccccgagggctgcccactgagccggtttaaggatagcctgggaaacccaacccacatcctgagaatcggcgagagctataaggagaagcagcggaccatccaggccaagaaggaggtggagcagcggagagccggcggctacagccggaagtacgccagcaaagccaagaatctggcagacgatatggtgagaaacaccgctagagatctgctgtactacgccgtgacccaggatgccatgctgatcttcgccaacctgagccggggcttcggccggcagggcaagcggaccttcatggccgagagacagtacacacggatggaggactggctgaccgccaagctggcctacgagggcctgagcaagacctacctgtccaagacactggcccagtacacctccaagacatgcagcaactgtgggtttaccatcaccagcgccgactacgacagggtgctggagaagctgaagaagacagcaacaggctggatgaccacaattaacggcaaggagctgaaggtggagggccagattacctactacaacagatacaagagacagaacgtagtcaaggacctgtccgtcgagctggatagactgagcgaagaatctgtgaacaacgacatctcctcctggacaaagggcagaagcggagaagctctgagcctcctgaagaaaagattctcccatagacccgtgcaggagaagttcgtgtgcctgaactgcggcttcgagacacacgcagccgagcaagccgccctgaacatcgccagatcctggctgttcctgcggagccaggagtacaagaaataccagacaaacaagacaaccggcaacaccgataagagagccttcgtcgagacctggcagtccttttaccggaagaagcttaaggaggtgtggaaacctgccgtgcggtctggcggatctggcggaggctccacaagcatgaccttcgaggacgtgagcgtggagttcacccagggcgagtggggccagctgaaccccgcccagaaggacctgtacagggaggtgatgctggagaacttcaggaacctggccttcctgggcctgcccgtgagcaagccctacgtgatctgccagctggaggagggcggcgagcccttcatcgtggagagggaggtgagcaccggcgcctacagcgactgggagaggaggagcaagagcaagaccagccccaagaaaaagagaaaagtctaagctgccttctgcggggcttgccttctggccatgcccttcttctctcccttgcacctgtacctcttggtctttgaataaagcctgagtaggaaggctagcaaaaaaaaaaaaaaaaaaaaaaaaaaaaaaaaaaaaaaaaaaaaaaaaaaaaaaaaaaaaaaaaaaaaaaaaaaaaaaaa

SEQ ID NO: 6283 - RNA, 5797 nt, synthetic construct
  source 1..5797: mol_type = other RNA
aggaaataagagagaaaagaagagtaagaagaaatataagagccaccatggcccctaagaagaagcgtaaagtgagccggatggaacgcctcgtctacgaggtgcggcagaagtgcagaaacatcgaggacatctgcatctcctgcggatctctgaacgtgaccctggagcacccactgttcatcggcggcatgtgccagaactgtaaaaactgttttctggagtgtgcctatcaatacgacgatgacggctaccagagctactgcaccatctgttgcggcggaagagaggtgctgatgtgtggaaataacaactgctgccggtgcttctgcgtggaatgcgtggacctgctggtgggccccggcgccgcccaggccgctattaaggaagatccttggaactgctacatgtgcggccacaagggcacatacggcctgctgagacggagagaggactggcctagcagactgcagatgttcttcgccaataaccacgaccaggagttcgacccccctaaggtgtaccctcccgtccccgccgagaagagaaagcccatccgggtcctgagcctgttcgatggcatcgccaccggtctgctggtgctgaaggacctgggcatccaggtggataggtacattgcctccgaggtgtgcgaggactccatcaccgtgggaatggtgcgtcatcagggcaagatcatgtacgtgggcgacgtgcggagcgtgacacagaagcatatccaggagtggggccctttcgacctggtgatcggcggcagcccttgcaatgacctgagcatcgtgaacccagcccggaagggcctgtacgagggaaccggcagactgttcttcgagttttacagactgctgcacgacgcccggcctaaggaaggcgacgaccggcccttcttttggctgttcgagaatgtggtggccatgggagtcagcgacaagcgggatattagccggttcctggagagcaaccccgtgatgatcgatgccaaggaagtgagcgccgcccaccgggccagatacttctggggcaatctgcctggcatgaacagacccctggccagcaccgtgaacgacaagctggagctgcaggagtgcctggagcacggccggatcgccaagttcagcaaggtgagaaccatcaccacccgaagcaacagcatcaaacaaggcaaggaccagcactttcctgtgttcatgaacgagaaggaggacatcctgtggtgtaccgagatggagagagtgttcgggttcccagtccactacacagatgtcagcaacatgtctagactggccagacagagactgctgggaagaagctggtccgtccctgtgatcagacacctgttcgcccctctgaaggagtacttcgcctgcgtgagcagcggcaacagcaacgccaacagccggggccccagcttctctagcggcctggtgccactgtccctgagagggagccacatgggccccatggagatctacaaaaccgtgagcgcctggaagcggcagcctgtgcgcgtgctgagcctgtttcggaatatcgataaagtcctgaaaagcctgggattcctggagagcggctctggctccggcggtggcaccctgaagtacgtggaggatgtgacaaacgtggtcagacgggatgtggagaagtggggccccttcgatctggtgtacggcagcacccaacccctgggcagctcttgtgaccggtgccctggctggtacatgtttcagttccaccggatcctgcagtacgccctgccgagacaggagtcccagcggccattcttttggattttcatggacaacttgctgctgaccgaggatgaccaggaaactaccactcggttcctgcagaccgaagccgtgaccctgcaggacgtgagaggccgggactaccagaacgccatgcgggtgtggtccaacatccctggactgaaaagcaagcacgcacctctgacccctaaagaagaggagtacctgcaggcccaggtgcggagcagaagcaagctggacgcccctaaggtggatctgctggtgaagaattgcctcctgcccctgagagagtacttcaagtatttcagccagaatagtctgcccctgggcggcccaagcagcggcgcccctcctcccagcggcggcagcccagccggctccccaacctctaccgaggagggcacctctgagtccgccacccccgagagcggccctggcacctccaccgagcccagcgagggcagcgcacccggcagccctgccggcagccccacctccacagaggagggaaccagcaccgagcccagcgaaggcagcgccccaggcaccagcaccgagcctagtgagggcggctctggcggcggcagcgcccaggagattaaacggatcaacaagatcagaagaagacttgtgaaagacagcaacaccaagaaggccggcaagacaggccccatgaaaaccctgctggttagagtgatgacacccgatctgagagagcggctggaaaacctgagaaagaagcctgaaaatatcccccagcccatcagcaatacatctagagccaacctgaataagctgctgaccgattacaccgaaatgaagaaggcgatcctgcatgtgtactgggaagagttccagaaggaccctgtgggcctgatgagccgggtggcccagcctgccagcaagaagatcgatcagaacaagctgaaacctgagatggacgagaagggcaacctgaccaccgccggctttgcctgctctcagtgtggccagcccctgttcgtgtacaagctggagcaggtgtctgagaagggcaaggcttacaccaactacttcggacggtgcaatgtggccgagcacgaaaagctgatcctgctggcccagctgaagcccgagaaggatagcgacgaagccgtgacatatagcctgggaaagtttgggcagagggccctggatttctacagcattcatgtgaccaaggagtccacccaccccgtgaagcccctggcccagatcgccggaaacagatacgcctccggacctgtgggaaaggccctgagcgacgcatgtatgggcacaatcgcctccttcctgtctaagtaccaggacatcatcatcgaacaccagaaggtggtgaagggcaaccagaagagactggagagcctgcgggagctggccggcaaggaaaacctggaataccctagcgtgaccctgccacctcagcctcacaccaaggagggcgttgatgcctacaacgaagtgatcgcccgggtgcgaatgtgggtgaacctgaacctgtggcagaagctgaagctaagcagagatgatgccaagcctctgctgagactgaagggattcccttcctttcctctggtcgagagacaggccaacgaagtggactggtgggacatggtgtgtaacgtgaagaagctgatcaacgagaaaaaggaggatggcaaggtgttttggcagaatctggctggctacaagagacaggaagccctgagaccatacctgagcagcgaggaagatcggaagaagggaaagaaattcgctcggtaccagctgggcgacctgctgctgcacctggaaaagaagcacggcgaggactggggaaaggtgtacgacgaggcctgggagcggattgacaagaaagtggaaggcctgagcaagcacatcaagctggaagaggaacggagaagcgaggacgcccagagcaaggccgccctgaccgactggctgcgggctaaggccagcttcgtgatcgagggcctgaaggaggccgacaaggacgagttctgcagatgcgagctgaagctgcagaagtggtacggggacctgcggggaaagcccttcgccatcgaagccgagaacagcatcctggacatcagcggcttcagcaagcagtacaactgtgccttcatctggcagaaggacggcgtgaagaagctgaacctgtacctgatcatcaactacttcaagggcggcaagctgcggttcaagaagatcaaacctgaagccttcgaagccaacagattctacaccgtgatcaacaaaaagagcggcgagatcgtgcccatggaggtgaacttcaacttcgacgaccccaacctgatcatcctgcctctggcctttggcaagagacagggcagagaattcatctggaacgacctgctgtccctggaaaccggcagcctgaagctggccaacggaagagtgatcgagaagacactgtacaacagaagaacccggcaggatgagcctgccctgttcgtggccctgaccttcgagcggcgggaggtcctggactcctccaatatcaaaccaatgaacctgatcggcgtggcaagaggcgaaaacatccccgccgtgatcgccctgaccgaccccgagggctgcccactgagccggtttaaggatagcctgggaaacccaacccacatcctgagaatcggcgagagctataaggagaagcagcggaccatccaggccaagaaggaggtggagcagcggagagccggcggctacagccggaagtacgccagcaaagccaagaatctggcagacgatatggtgagaaacaccgctagagatctgctgtactacgccgtgacccaggatgccatgctgatcttcgccaacctgagccggggcttcggccggcagggcaagcggaccttcatggccgagagacagtacacacggatggaggactggctgaccgccaagctggcctacgagggcctgagcaagacctacctgtccaagacactggcccagtacacctccaagacatgcagcaactgtgggtttaccatcaccagcgccgactacgacagggtgctggagaagctgaagaagacagcaacaggctggatgaccacaattaacggcaaggagctgaaggtggagggccagattacctactacaacagatacaagagacagaacgtagtcaaggacctgtccgtcgagctggatagactgagcgaagaatctgtgaacaacgacatctcctcctggacaaagggcagaagcggagaagctctgagcctcctgaagaaaagattctcccatagacccgtgcaggagaagttcgtgtgcctgaactgcggcttcgagacacacgcagccgagcaagccgccctgaacatcgccagatcctggctgttcctgcggagccaggagtacaagaaataccagacaaacaagacaaccggcaacaccgataagagagccttcgtcgagacctggcagtccttttaccggaagaagcttaaggaggtgtggaaacctgccgtgcggtctggcggatctggcggaggctccacaagcctgcagaagagcgtgaccttcgaggacgtggccgtgtacttcacccagaccgagtgggacggcctgagccccgcccagagggccctgtacagggacgtgatgctggagaactacggcaacgtggccagcctgggcttcagcctgttcaagcccgccgtgatcagccagctggagggcgccggcgagctgggcggccccagccccctggtggacggcaccgagaccggcccccagggcctgtggaccagccccaagaaaaagagaaaagtctaagctgccttctgcggggcttgccttctggccatgcccttcttctctcccttgcacctgtacctcttggtctttgaataaagcctgagtaggaaggctagcaaaaaaaaaaaaaaaaaaaaaaaaaaaaaaaaaaaaaaaaaaaaaaaaaaaaaaaaaaaaaaaaaaaaaaaaaaaaaaaa

SEQ ID NO: 6284 - RNA, 5797 nt, synthetic construct
  source 1..5797: mol_type = other RNA
aggaaataagagagaaaagaagagtaagaagaaatataagagccaccatggcccctaagaagaagcgtaaagtgagccggatggaacgcctcgtctacgaggtgcggcagaagtgcagaaacatcgaggacatctgcatctcctgcggatctctgaacgtgaccctggagcacccactgttcatcggcggcatgtgccagaactgtaaaaactgttttctggagtgtgcctatcaatacgacgatgacggctaccagagctactgcaccatctgttgcggcggaagagaggtgctgatgtgtggaaataacaactgctgccggtgcttctgcgtggaatgcgtggacctgctggtgggccccggcgccgcccaggccgctattaaggaagatccttggaactgctacatgtgcggccacaagggcacatacggcctgctgagacggagagaggactggcctagcagactgcagatgttcttcgccaataaccacgaccaggagttcgacccccctaaggtgtaccctcccgtccccgccgagaagagaaagcccatccgggtcctgagcctgttcgatggcatcgccaccggtctgctggtgctgaaggacctgggcatccaggtggataggtacattgcctccgaggtgtgcgaggactccatcaccgtgggaatggtgcgtcatcagggcaagatcatgtacgtgggcgacgtgcggagcgtgacacagaagcatatccaggagtggggccctttcgacctggtgatcggcggcagcccttgcaatgacctgagcatcgtgaacccagcccggaagggcctgtacgagggaaccggcagactgttcttcgagttttacagactgctgcacgacgcccggcctaaggaaggcgacgaccggcccttcttttggctgttcgagaatgtggtggccatgggagtcagcgacaagcgggatattagccggttcctggagagcaaccccgtgatgatcgatgccaaggaagtgagcgccgcccaccgggccagatacttctggggcaatctgcctggcatgaacagacccctggccagcaccgtgaacgacaagctggagctgcaggagtgcctggagcacggccggatcgccaagttcagcaaggtgagaaccatcaccacccgaagcaacagcatcaaacaaggcaaggaccagcactttcctgtgttcatgaacgagaaggaggacatcctgtggtgtaccgagatggagagagtgttcgggttcccagtccactacacagatgtcagcaacatgtctagactggccagacagagactgctgggaagaagctggtccgtccctgtgatcagacacctgttcgcccctctgaaggagtacttcgcctgcgtgagcagcggcaacagcaacgccaacagccggggccccagcttctctagcggcctggtgccactgtccctgagagggagccacatgggccccatggagatctacaaaaccgtgagcgcctggaagcggcagcctgtgcgcgtgctgagcctgtttcggaatatcgataaagtcctgaaaagcctgggattcctggagagcggctctggctccggcggtggcaccctgaagtacgtggaggatgtgacaaacgtggtcagacgggatgtggagaagtggggccccttcgatctggtgtacggcagcacccaacccctgggcagctcttgtgaccggtgccctggctggtacatgtttcagttccaccggatcctgcagtacgccctgccgagacaggagtcccagcggccattcttttggattttcatggacaacttgctgctgaccgaggatgaccaggaaactaccactcggttcctgcagaccgaagccgtgaccctgcaggacgtgagaggccgggactaccagaacgccatgcgggtgtggtccaacatccctggactgaaaagcaagcacgcacctctgacccctaaagaagaggagtacctgcaggcccaggtgcggagcagaagcaagctggacgcccctaaggtggatctgctggtgaagaattgcctcctgcccctgagagagtacttcaagtatttcagccagaatagtctgcccctgggcggcccaagcagcggcgcccctcctcccagcggcggcagcccagccggctccccaacctctaccgaggagggcacctctgagtccgccacccccgagagcggccctggcacctccaccgagcccagcgagggcagcgcacccggcagccctgccggcagccccacctccacagaggagggaaccagcaccgagcccagcgaaggcagcgccccaggcaccagcaccgagcctagtgagggcggctctggcggcggcagcgcccaggagattaaacggatcaacaagatcagaagaagacttgtgaaagacagcaacaccaagaaggccggcaagacaggccccatgaaaaccctgctggttagagtgatgacacccgatctgagagagcggctggaaaacctgagaaagaagcctgaaaatatcccccagcccatcagcaatacatctagagccaacctgaataagctgctgaccgattacaccgaaatgaagaaggcgatcctgcatgtgtactgggaagagttccagaaggaccctgtgggcctgatgagccgggtggcccagcctgccagcaagaagatcgatcagaacaagctgaaacctgagatggacgagaagggcaacctgaccaccgccggctttgcctgctctcagtgtggccagcccctgttcgtgtacaagctggagcaggtgtctgagaagggcaaggcttacaccaactacttcggacggtgcaatgtggccgagcacgaaaagctgatcctgctggcccagctgaagcccgagaaggatagcgacgaagccgtgacatatagcctgggaaagtttgggcagagggccctggatttctacagcattcatgtgaccaaggagtccacccaccccgtgaagcccctggcccagatcgccggaaacagatacgcctccggacctgtgggaaaggccctgagcgacgcatgtatgggcacaatcgcctccttcctgtctaagtaccaggacatcatcatcgaacaccagaaggtggtgaagggcaaccagaagagactggagagcctgcgggagctggccggcaaggaaaacctggaataccctagcgtgaccctgccacctcagcctcacaccaaggagggcgttgatgcctacaacgaagtgatcgcccgggtgcgaatgtgggtgaacctgaacctgtggcagaagctgaagctaagcagagatgatgccaagcctctgctgagactgaagggattcccttcctttcctctggtcgagagacaggccaacgaagtggactggtgggacatggtgtgtaacgtgaagaagctgatcaacgagaaaaaggaggatggcaaggtgttttggcagaatctggctggctacaagagacaggaagccctgagaccatacctgagcagcgaggaagatcggaagaagggaaagaaattcgctcggtaccagctgggcgacctgctgctgcacctggaaaagaagcacggcgaggactggggaaaggtgtacgacgaggcctgggagcggattgacaagaaagtggaaggcctgagcaagcacatcaagctggaagaggaacggagaagcgaggacgcccagagcaaggccgccctgaccgactggctgcgggctaaggccagcttcgtgatcgagggcctgaaggaggccgacaaggacgagttctgcagatgcgagctgaagctgcagaagtggtacggggacctgcggggaaagcccttcgccatcgaagccgagaacagcatcctggacatcagcggcttcagcaagcagtacaactgtgccttcatctggcagaaggacggcgtgaagaagctgaacctgtacctgatcatcaactacttcaagggcggcaagctgcggttcaagaagatcaaacctgaagccttcgaagccaacagattctacaccgtgatcaacaaaaagagcggcgagatcgtgcccatggaggtgaacttcaacttcgacgaccccaacctgatcatcctgcctctggcctttggcaagagacagggcagagaattcatctggaacgacctgctgtccctggaaaccggcagcctgaagctggccaacggaagagtgatcgagaagacactgtacaacagaagaacccggcaggatgagcctgccctgttcgtggccctgaccttcgagcggcgggaggtcctggactcctccaatatcaaaccaatgaacctgatcggcgtggcaagaggcgaaaacatccccgccgtgatcgccctgaccgaccccgagggctgcccactgagccggtttaaggatagcctgggaaacccaacccacatcctgagaatcggcgagagctataaggagaagcagcggaccatccaggccaagaaggaggtggagcagcggagagccggcggctacagccggaagtacgccagcaaagccaagaatctggcagacgatatggtgagaaacaccgctagagatctgctgtactacgccgtgacccaggatgccatgctgatcttcgccaacctgagccggggcttcggccggcagggcaagcggaccttcatggccgagagacagtacacacggatggaggactggctgaccgccaagctggcctacgagggcctgagcaagacctacctgtccaagacactggcccagtacacctccaagacatgcagcaactgtgggtttaccatcaccagcgccgactacgacagggtgctggagaagctgaagaagacagcaacaggctggatgaccacaattaacggcaaggagctgaaggtggagggccagattacctactacaacagatacaagagacagaacgtagtcaaggacctgtccgtcgagctggatagactgagcgaagaatctgtgaacaacgacatctcctcctggacaaagggcagaagcggagaagctctgagcctcctgaagaaaagattctcccatagacccgtgcaggagaagttcgtgtgcctgaactgcggcttcgagacacacgcagccgagcaagccgccctgaacatcgccagatcctggctgttcctgcggagccaggagtacaagaaataccagacaaacaagacaaccggcaacaccgataagagagccttcgtcgagacctggcagtccttttaccggaagaagcttaaggaggtgtggaaacctgccgtgcggtctggcggatctggcggaggctccacaagcatccagggcagcctgaccttcaaggacgtggccgtggacttcacccaggacgagtggtgcctgctggacaacagccagaaggagctgtacctggaggtgatgctggagaacgtgcagaacctgctgagcgtgggcctgcccgtgcccagggagtacctgaccagctgcttccagcagggcgaggccccctggctgctggagcaggaggtgcccaggagcagctgccccgaggccgagaccaacaccagccccaagaaaaagagaaaagtctaagctgccttctgcggggcttgccttctggccatgcccttcttctctcccttgcacctgtacctcttggtctttgaataaagcctgagtaggaaggctagcaaaaaaaaaaaaaaaaaaaaaaaaaaaaaaaaaaaaaaaaaaaaaaaaaaaaaaaaaaaaaaaaaaaaaaaaaaaaaaaa

SEQ ID NO: 6285 - RNA, 5797 nt, synthetic construct
  source 1..5797: mol_type = other RNA
aggaaataagagagaaaagaagagtaagaagaaatataagagccaccatggcccctaagaagaagcgtaaagtgagccggatggaacgcctcgtctacgaggtgcggcagaagtgcagaaacatcgaggacatctgcatctcctgcggatctctgaacgtgaccctggagcacccactgttcatcggcggcatgtgccagaactgtaaaaactgttttctggagtgtgcctatcaatacgacgatgacggctaccagagctactgcaccatctgttgcggcggaagagaggtgctgatgtgtggaaataacaactgctgccggtgcttctgcgtggaatgcgtggacctgctggtgggccccggcgccgcccaggccgctattaaggaagatccttggaactgctacatgtgcggccacaagggcacatacggcctgctgagacggagagaggactggcctagcagactgcagatgttcttcgccaataaccacgaccaggagttcgacccccctaaggtgtaccctcccgtccccgccgagaagagaaagcccatccgggtcctgagcctgttcgatggcatcgccaccggtctgctggtgctgaaggacctgggcatccaggtggataggtacattgcctccgaggtgtgcgaggactccatcaccgtgggaatggtgcgtcatcagggcaagatcatgtacgtgggcgacgtgcggagcgtgacacagaagcatatccaggagtggggccctttcgacctggtgatcggcggcagcccttgcaatgacctgagcatcgtgaacccagcccggaagggcctgtacgagggaaccggcagactgttcttcgagttttacagactgctgcacgacgcccggcctaaggaaggcgacgaccggcccttcttttggctgttcgagaatgtggtggccatgggagtcagcgacaagcgggatattagccggttcctggagagcaaccccgtgatgatcgatgccaaggaagtgagcgccgcccaccgggccagatacttctggggcaatctgcctggcatgaacagacccctggccagcaccgtgaacgacaagctggagctgcaggagtgcctggagcacggccggatcgccaagttcagcaaggtgagaaccatcaccacccgaagcaacagcatcaaacaaggcaaggaccagcactttcctgtgttcatgaacgagaaggaggacatcctgtggtgtaccgagatggagagagtgttcgggttcccagtccactacacagatgtcagcaacatgtctagactggccagacagagactgctgggaagaagctggtccgtccctgtgatcagacacctgttcgcccctctgaaggagtacttcgcctgcgtgagcagcggcaacagcaacgccaacagccggggccccagcttctctagcggcctggtgccactgtccctgagagggagccacatgggccccatggagatctacaaaaccgtgagcgcctggaagcggcagcctgtgcgcgtgctgagcctgtttcggaatatcgataaagtcctgaaaagcctgggattcctggagagcggctctggctccggcggtggcaccctgaagtacgtggaggatgtgacaaacgtggtcagacgggatgtggagaagtggggccccttcgatctggtgtacggcagcacccaacccctgggcagctcttgtgaccggtgccctggctggtacatgtttcagttccaccggatcctgcagtacgccctgccgagacaggagtcccagcggccattcttttggattttcatggacaacttgctgctgaccgaggatgaccaggaaactaccactcggttcctgcagaccgaagccgtgaccctgcaggacgtgagaggccgggactaccagaacgccatgcgggtgtggtccaacatccctggactgaaaagcaagcacgcacctctgacccctaaagaagaggagtacctgcaggcccaggtgcggagcagaagcaagctggacgcccctaaggtggatctgctggtgaagaattgcctcctgcccctgagagagtacttcaagtatttcagccagaatagtctgcccctgggcggcccaagcagcggcgcccctcctcccagcggcggcagcccagccggctccccaacctctaccgaggagggcacctctgagtccgccacccccgagagcggccctggcacctccaccgagcccagcgagggcagcgcacccggcagccctgccggcagccccacctccacagaggagggaaccagcaccgagcccagcgaaggcagcgccccaggcaccagcaccgagcctagtgagggcggctctggcggcggcagcgcccaggagattaaacggatcaacaagatcagaagaagacttgtgaaagacagcaacaccaagaaggccggcaagacaggccccatgaaaaccctgctggttagagtgatgacacccgatctgagagagcggctggaaaacctgagaaagaagcctgaaaatatcccccagcccatcagcaatacatctagagccaacctgaataagctgctgaccgattacaccgaaatgaagaaggcgatcctgcatgtgtactgggaagagttccagaaggaccctgtgggcctgatgagccgggtggcccagcctgccagcaagaagatcgatcagaacaagctgaaacctgagatggacgagaagggcaacctgaccaccgccggctttgcctgctctcagtgtggccagcccctgttcgtgtacaagctggagcaggtgtctgagaagggcaaggcttacaccaactacttcggacggtgcaatgtggccgagcacgaaaagctgatcctgctggcccagctgaagcccgagaaggatagcgacgaagccgtgacatatagcctgggaaagtttgggcagagggccctggatttctacagcattcatgtgaccaaggagtccacccaccccgtgaagcccctggcccagatcgccggaaacagatacgcctccggacctgtgggaaaggccctgagcgacgcatgtatgggcacaatcgcctccttcctgtctaagtaccaggacatcatcatcgaacaccagaaggtggtgaagggcaaccagaagagactggagagcctgcgggagctggccggcaaggaaaacctggaataccctagcgtgaccctgccacctcagcctcacaccaaggagggcgttgatgcctacaacgaagtgatcgcccgggtgcgaatgtgggtgaacctgaacctgtggcagaagctgaagctaagcagagatgatgccaagcctctgctgagactgaagggattcccttcctttcctctggtcgagagacaggccaacgaagtggactggtgggacatggtgtgtaacgtgaagaagctgatcaacgagaaaaaggaggatggcaaggtgttttggcagaatctggctggctacaagagacaggaagccctgagaccatacctgagcagcgaggaagatcggaagaagggaaagaaattcgctcggtaccagctgggcgacctgctgctgcacctggaaaagaagcacggcgaggactggggaaaggtgtacgacgaggcctgggagcggattgacaagaaagtggaaggcctgagcaagcacatcaagctggaagaggaacggagaagcgaggacgcccagagcaaggccgccctgaccgactggctgcgggctaaggccagcttcgtgatcgagggcctgaaggaggccgacaaggacgagttctgcagatgcgagctgaagctgcagaagtggtacggggacctgcggggaaagcccttcgccatcgaagccgagaacagcatcctggacatcagcggcttcagcaagcagtacaactgtgccttcatctggcagaaggacggcgtgaagaagctgaacctgtacctgatcatcaactacttcaagggcggcaagctgcggttcaagaagatcaaacctgaagccttcgaagccaacagattctacaccgtgatcaacaaaaagagcggcgagatcgtgcccatggaggtgaacttcaacttcgacgaccccaacctgatcatcctgcctctggcctttggcaagagacagggcagagaattcatctggaacgacctgctgtccctggaaaccggcagcctgaagctggccaacggaagagtgatcgagaagacactgtacaacagaagaacccggcaggatgagcctgccctgttcgtggccctgaccttcgagcggcgggaggtcctggactcctccaatatcaaaccaatgaacctgatcggcgtggcaagaggcgaaaacatccccgccgtgatcgccctgaccgaccccgagggctgcccactgagccggtttaaggatagcctgggaaacccaacccacatcctgagaatcggcgagagctataaggagaagcagcggaccatccaggccaagaaggaggtggagcagcggagagccggcggctacagccggaagtacgccagcaaagccaagaatctggcagacgatatggtgagaaacaccgctagagatctgctgtactacgccgtgacccaggatgccatgctgatcttcgccaacctgagccggggcttcggccggcagggcaagcggaccttcatggccgagagacagtacacacggatggaggactggctgaccgccaagctggcctacgagggcctgagcaagacctacctgtccaagacactggcccagtacacctccaagacatgcagcaactgtgggtttaccatcaccagcgccgactacgacagggtgctggagaagctgaagaagacagcaacaggctggatgaccacaattaacggcaaggagctgaaggtggagggccagattacctactacaacagatacaagagacagaacgtagtcaaggacctgtccgtcgagctggatagactgagcgaagaatctgtgaacaacgacatctcctcctggacaaagggcagaagcggagaagctctgagcctcctgaagaaaagattctcccatagacccgtgcaggagaagttcgtgtgcctgaactgcggcttcgagacacacgcagccgagcaagccgccctgaacatcgccagatcctggctgttcctgcggagccaggagtacaagaaataccagacaaacaagacaaccggcaacaccgataagagagccttcgtcgagacctggcagtccttttaccggaagaagcttaaggaggtgtggaaacctgccgtgcggtctggcggatctggcggaggctccacaagcttccagggcagcgtgaccttcagggacgtggccatcgacttcagccaggaggagtggaagtggctgcagcccgcccagagggacctgtacaggtgcgtgatgctggagaactacggccacctggtgagcctgggcctgagcatcagcaagcccgacgtggtgagcctgctggagcagggcaaggagccctggctgggcaagaggaacgtgaacagggacctgcaggccctgtgcatccccatcaccagccccaagaaaaagagaaaagtctaagctgccttctgcggggcttgccttctggccatgcccttcttctctcccttgcacctgtacctcttggtctttgaataaagcctgagtaggaaggctagcaaaaaaaaaaaaaaaaaaaaaaaaaaaaaaaaaaaaaaaaaaaaaaaaaaaaaaaaaaaaaaaaaaaaaaaaaaaaaaaa

SEQ ID NO: 6286 - RNA, 5797 nt, synthetic construct
  source 1..5797: mol_type = other RNA
aggaaataagagagaaaagaagagtaagaagaaatataagagccaccatggcccctaagaagaagcgtaaagtgagccggatggaacgcctcgtctacgaggtgcggcagaagtgcagaaacatcgaggacatctgcatctcctgcggatctctgaacgtgaccctggagcacccactgttcatcggcggcatgtgccagaactgtaaaaactgttttctggagtgtgcctatcaatacgacgatgacggctaccagagctactgcaccatctgttgcggcggaagagaggtgctgatgtgtggaaataacaactgctgccggtgcttctgcgtggaatgcgtggacctgctggtgggccccggcgccgcccaggccgctattaaggaagatccttggaactgctacatgtgcggccacaagggcacatacggcctgctgagacggagagaggactggcctagcagactgcagatgttcttcgccaataaccacgaccaggagttcgacccccctaaggtgtaccctcccgtccccgccgagaagagaaagcccatccgggtcctgagcctgttcgatggcatcgccaccggtctgctggtgctgaaggacctgggcatccaggtggataggtacattgcctccgaggtgtgcgaggactccatcaccgtgggaatggtgcgtcatcagggcaagatcatgtacgtgggcgacgtgcggagcgtgacacagaagcatatccaggagtggggccctttcgacctggtgatcggcggcagcccttgcaatgacctgagcatcgtgaacccagcccggaagggcctgtacgagggaaccggcagactgttcttcgagttttacagactgctgcacgacgcccggcctaaggaaggcgacgaccggcccttcttttggctgttcgagaatgtggtggccatgggagtcagcgacaagcgggatattagccggttcctggagagcaaccccgtgatgatcgatgccaaggaagtgagcgccgcccaccgggccagatacttctggggcaatctgcctggcatgaacagacccctggccagcaccgtgaacgacaagctggagctgcaggagtgcctggagcacggccggatcgccaagttcagcaaggtgagaaccatcaccacccgaagcaacagcatcaaacaaggcaaggaccagcactttcctgtgttcatgaacgagaaggaggacatcctgtggtgtaccgagatggagagagtgttcgggttcccagtccactacacagatgtcagcaacatgtctagactggccagacagagactgctgggaagaagctggtccgtccctgtgatcagacacctgttcgcccctctgaaggagtacttcgcctgcgtgagcagcggcaacagcaacgccaacagccggggccccagcttctctagcggcctggtgccactgtccctgagagggagccacatgggccccatggagatctacaaaaccgtgagcgcctggaagcggcagcctgtgcgcgtgctgagcctgtttcggaatatcgataaagtcctgaaaagcctgggattcctggagagcggctctggctccggcggtggcaccctgaagtacgtggaggatgtgacaaacgtggtcagacgggatgtggagaagtggggccccttcgatctggtgtacggcagcacccaacccctgggcagctcttgtgaccggtgccctggctggtacatgtttcagttccaccggatcctgcagtacgccctgccgagacaggagtcccagcggccattcttttggattttcatggacaacttgctgctgaccgaggatgaccaggaaactaccactcggttcctgcagaccgaagccgtgaccctgcaggacgtgagaggccgggactaccagaacgccatgcgggtgtggtccaacatccctggactgaaaagcaagcacgcacctctgacccctaaagaagaggagtacctgcaggcccaggtgcggagcagaagcaagctggacgcccctaaggtggatctgctggtgaagaattgcctcctgcccctgagagagtacttcaagtatttcagccagaatagtctgcccctgggcggcccaagcagcggcgcccctcctcccagcggcggcagcccagccggctccccaacctctaccgaggagggcacctctgagtccgccacccccgagagcggccctggcacctccaccgagcccagcgagggcagcgcacccggcagccctgccggcagccccacctccacagaggagggaaccagcaccgagcccagcgaaggcagcgccccaggcaccagcaccgagcctagtgagggcggctctggcggcggcagcgcccaggagattaaacggatcaacaagatcagaagaagacttgtgaaagacagcaacaccaagaaggccggcaagacaggccccatgaaaaccctgctggttagagtgatgacacccgatctgagagagcggctggaaaacctgagaaagaagcctgaaaatatcccccagcccatcagcaatacatctagagccaacctgaataagctgctgaccgattacaccgaaatgaagaaggcgatcctgcatgtgtactgggaagagttccagaaggaccctgtgggcctgatgagccgggtggcccagcctgccagcaagaagatcgatcagaacaagctgaaacctgagatggacgagaagggcaacctgaccaccgccggctttgcctgctctcagtgtggccagcccctgttcgtgtacaagctggagcaggtgtctgagaagggcaaggcttacaccaactacttcggacggtgcaatgtggccgagcacgaaaagctgatcctgctggcccagctgaagcccgagaaggatagcgacgaagccgtgacatatagcctgggaaagtttgggcagagggccctggatttctacagcattcatgtgaccaaggagtccacccaccccgtgaagcccctggcccagatcgccggaaacagatacgcctccggacctgtgggaaaggccctgagcgacgcatgtatgggcacaatcgcctccttcctgtctaagtaccaggacatcatcatcgaacaccagaaggtggtgaagggcaaccagaagagactggagagcctgcgggagctggccggcaaggaaaacctggaataccctagcgtgaccctgccacctcagcctcacaccaaggagggcgttgatgcctacaacgaagtgatcgcccgggtgcgaatgtgggtgaacctgaacctgtggcagaagctgaagctaagcagagatgatgccaagcctctgctgagactgaagggattcccttcctttcctctggtcgagagacaggccaacgaagtggactggtgggacatggtgtgtaacgtgaagaagctgatcaacgagaaaaaggaggatggcaaggtgttttggcagaatctggctggctacaagagacaggaagccctgagaccatacctgagcagcgaggaagatcggaagaagggaaagaaattcgctcggtaccagctgggcgacctgctgctgcacctggaaaagaagcacggcgaggactggggaaaggtgtacgacgaggcctgggagcggattgacaagaaagtggaaggcctgagcaagcacatcaagctggaagaggaacggagaagcgaggacgcccagagcaaggccgccctgaccgactggctgcgggctaaggccagcttcgtgatcgagggcctgaaggaggccgacaaggacgagttctgcagatgcgagctgaagctgcagaagtggtacggggacctgcggggaaagcccttcgccatcgaagccgagaacagcatcctggacatcagcggcttcagcaagcagtacaactgtgccttcatctggcagaaggacggcgtgaagaagctgaacctgtacctgatcatcaactacttcaagggcggcaagctgcggttcaagaagatcaaacctgaagccttcgaagccaacagattctacaccgtgatcaacaaaaagagcggcgagatcgtgcccatggaggtgaacttcaacttcgacgaccccaacctgatcatcctgcctctggcctttggcaagagacagggcagagaattcatctggaacgacctgctgtccctggaaaccggcagcctgaagctggccaacggaagagtgatcgagaagacactgtacaacagaagaacccggcaggatgagcctgccctgttcgtggccctgaccttcgagcggcgggaggtcctggactcctccaatatcaaaccaatgaacctgatcggcgtggcaagaggcgaaaacatccccgccgtgatcgccctgaccgaccccgagggctgcccactgagccggtttaaggatagcctgggaaacccaacccacatcctgagaatcggcgagagctataaggagaagcagcggaccatccaggccaagaaggaggtggagcagcggagagccggcggctacagccggaagtacgccagcaaagccaagaatctggcagacgatatggtgagaaacaccgctagagatctgctgtactacgccgtgacccaggatgccatgctgatcttcgccaacctgagccggggcttcggccggcagggcaagcggaccttcatggccgagagacagtacacacggatggaggactggctgaccgccaagctggcctacgagggcctgagcaagacctacctgtccaagacactggcccagtacacctccaagacatgcagcaactgtgggtttaccatcaccagcgccgactacgacagggtgctggagaagctgaagaagacagcaacaggctggatgaccacaattaacggcaaggagctgaaggtggagggccagattacctactacaacagatacaagagacagaacgtagtcaaggacctgtccgtcgagctggatagactgagcgaagaatctgtgaacaacgacatctcctcctggacaaagggcagaagcggagaagctctgagcctcctgaagaaaagattctcccatagacccgtgcaggagaagttcgtgtgcctgaactgcggcttcgagacacacgcagccgagcaagccgccctgaacatcgccagatcctggctgttcctgcggagccaggagtacaagaaataccagacaaacaagacaaccggcaacaccgataagagagccttcgtcgagacctggcagtccttttaccggaagaagcttaaggaggtgtggaaacctgccgtgcggtctggcggatctggcggaggctccacaagcaacctggaggccgtgaccttccaggacgtggccgtggagttcacctgcgaggagtggaggcacctggcccccccccagaaggagctgtacagggacgtgatgctggagaactacaagaacctggtgaggctgggcctggccgtgagcaagcccgacgtgatcagccagctggagaggagggaggccccctggatgcccggcggcatccagaggagcaggtgccccgactgggaggccagctgcaccagccccaagaaaaagagaaaagtctaagctgccttctgcggggcttgccttctggccatgcccttcttctctcccttgcacctgtacctcttggtctttgaataaagcctgagtaggaaggctagcaaaaaaaaaaaaaaaaaaaaaaaaaaaaaaaaaaaaaaaaaaaaaaaaaaaaaaaaaaaaaaaaaaaaaaaaaaaaaaaa

SEQ ID NO: 6287 - RNA, 5797 nt, synthetic construct
  source 1..5797: mol_type = other RNA
aggaaataagagagaaaagaagagtaagaagaaatataagagccaccatggcccctaagaagaagcgtaaagtgagccggatggaacgcctcgtctacgaggtgcggcagaagtgcagaaacatcgaggacatctgcatctcctgcggatctctgaacgtgaccctggagcacccactgttcatcggcggcatgtgccagaactgtaaaaactgttttctggagtgtgcctatcaatacgacgatgacggctaccagagctactgcaccatctgttgcggcggaagagaggtgctgatgtgtggaaataacaactgctgccggtgcttctgcgtggaatgcgtggacctgctggtgggccccggcgccgcccaggccgctattaaggaagatccttggaactgctacatgtgcggccacaagggcacatacggcctgctgagacggagagaggactggcctagcagactgcagatgttcttcgccaataaccacgaccaggagttcgacccccctaaggtgtaccctcccgtccccgccgagaagagaaagcccatccgggtcctgagcctgttcgatggcatcgccaccggtctgctggtgctgaaggacctgggcatccaggtggataggtacattgcctccgaggtgtgcgaggactccatcaccgtgggaatggtgcgtcatcagggcaagatcatgtacgtgggcgacgtgcggagcgtgacacagaagcatatccaggagtggggccctttcgacctggtgatcggcggcagcccttgcaatgacctgagcatcgtgaacccagcccggaagggcctgtacgagggaaccggcagactgttcttcgagttttacagactgctgcacgacgcccggcctaaggaaggcgacgaccggcccttcttttggctgttcgagaatgtggtggccatgggagtcagcgacaagcgggatattagccggttcctggagagcaaccccgtgatgatcgatgccaaggaagtgagcgccgcccaccgggccagatacttctggggcaatctgcctggcatgaacagacccctggccagcaccgtgaacgacaagctggagctgcaggagtgcctggagcacggccggatcgccaagttcagcaaggtgagaaccatcaccacccgaagcaacagcatcaaacaaggcaaggaccagcactttcctgtgttcatgaacgagaaggaggacatcctgtggtgtaccgagatggagagagtgttcgggttcccagtccactacacagatgtcagcaacatgtctagactggccagacagagactgctgggaagaagctggtccgtccctgtgatcagacacctgttcgcccctctgaaggagtacttcgcctgcgtgagcagcggcaacagcaacgccaacagccggggccccagcttctctagcggcctggtgccactgtccctgagagggagccacatgggccccatggagatctacaaaaccgtgagcgcctggaagcggcagcctgtgcgcgtgctgagcctgtttcggaatatcgataaagtcctgaaaagcctgggattcctggagagcggctctggctccggcggtggcaccctgaagtacgtggaggatgtgacaaacgtggtcagacgggatgtggagaagtggggccccttcgatctggtgtacggcagcacccaacccctgggcagctcttgtgaccggtgccctggctggtacatgtttcagttccaccggatcctgcagtacgccctgccgagacaggagtcccagcggccattcttttggattttcatggacaacttgctgctgaccgaggatgaccaggaaactaccactcggttcctgcagaccgaagccgtgaccctgcaggacgtgagaggccgggactaccagaacgccatgcgggtgtggtccaacatccctggactgaaaagcaagcacgcacctctgacccctaaagaagaggagtacctgcaggcccaggtgcggagcagaagcaagctggacgcccctaaggtggatctgctggtgaagaattgcctcctgcccctgagagagtacttcaagtatttcagccagaatagtctgcccctgggcggcccaagcagcggcgcccctcctcccagcggcggcagcccagccggctccccaacctctaccgaggagggcacctctgagtccgccacccccgagagcggccctggcacctccaccgagcccagcgagggcagcgcacccggcagccctgccggcagccccacctccacagaggagggaaccagcaccgagcccagcgaaggcagcgccccaggcaccagcaccgagcctagtgagggcggctctggcggcggcagcgcccaggagattaaacggatcaacaagatcagaagaagacttgtgaaagacagcaacaccaagaaggccggcaagacaggccccatgaaaaccctgctggttagagtgatgacacccgatctgagagagcggctggaaaacctgagaaagaagcctgaaaatatcccccagcccatcagcaatacatctagagccaacctgaataagctgctgaccgattacaccgaaatgaagaaggcgatcctgcatgtgtactgggaagagttccagaaggaccctgtgggcctgatgagccgggtggcccagcctgccagcaagaagatcgatcagaacaagctgaaacctgagatggacgagaagggcaacctgaccaccgccggctttgcctgctctcagtgtggccagcccctgttcgtgtacaagctggagcaggtgtctgagaagggcaaggcttacaccaactacttcggacggtgcaatgtggccgagcacgaaaagctgatcctgctggcccagctgaagcccgagaaggatagcgacgaagccgtgacatatagcctgggaaagtttgggcagagggccctggatttctacagcattcatgtgaccaaggagtccacccaccccgtgaagcccctggcccagatcgccggaaacagatacgcctccggacctgtgggaaaggccctgagcgacgcatgtatgggcacaatcgcctccttcctgtctaagtaccaggacatcatcatcgaacaccagaaggtggtgaagggcaaccagaagagactggagagcctgcgggagctggccggcaaggaaaacctggaataccctagcgtgaccctgccacctcagcctcacaccaaggagggcgttgatgcctacaacgaagtgatcgcccgggtgcgaatgtgggtgaacctgaacctgtggcagaagctgaagctaagcagagatgatgccaagcctctgctgagactgaagggattcccttcctttcctctggtcgagagacaggccaacgaagtggactggtgggacatggtgtgtaacgtgaagaagctgatcaacgagaaaaaggaggatggcaaggtgttttggcagaatctggctggctacaagagacaggaagccctgagaccatacctgagcagcgaggaagatcggaagaagggaaagaaattcgctcggtaccagctgggcgacctgctgctgcacctggaaaagaagcacggcgaggactggggaaaggtgtacgacgaggcctgggagcggattgacaagaaagtggaaggcctgagcaagcacatcaagctggaagaggaacggagaagcgaggacgcccagagcaaggccgccctgaccgactggctgcgggctaaggccagcttcgtgatcgagggcctgaaggaggccgacaaggacgagttctgcagatgcgagctgaagctgcagaagtggtacggggacctgcggggaaagcccttcgccatcgaagccgagaacagcatcctggacatcagcggcttcagcaagcagtacaactgtgccttcatctggcagaaggacggcgtgaagaagctgaacctgtacctgatcatcaactacttcaagggcggcaagctgcggttcaagaagatcaaacctgaagccttcgaagccaacagattctacaccgtgatcaacaaaaagagcggcgagatcgtgcccatggaggtgaacttcaacttcgacgaccccaacctgatcatcctgcctctggcctttggcaagagacagggcagagaattcatctggaacgacctgctgtccctggaaaccggcagcctgaagctggccaacggaagagtgatcgagaagacactgtacaacagaagaacccggcaggatgagcctgccctgttcgtggccctgaccttcgagcggcgggaggtcctggactcctccaatatcaaaccaatgaacctgatcggcgtggcaagaggcgaaaacatccccgccgtgatcgccctgaccgaccccgagggctgcccactgagccggtttaaggatagcctgggaaacccaacccacatcctgagaatcggcgagagctataaggagaagcagcggaccatccaggccaagaaggaggtggagcagcggagagccggcggctacagccggaagtacgccagcaaagccaagaatctggcagacgatatggtgagaaacaccgctagagatctgctgtactacgccgtgacccaggatgccatgctgatcttcgccaacctgagccggggcttcggccggcagggcaagcggaccttcatggccgagagacagtacacacggatggaggactggctgaccgccaagctggcctacgagggcctgagcaagacctacctgtccaagacactggcccagtacacctccaagacatgcagcaactgtgggtttaccatcaccagcgccgactacgacagggtgctggagaagctgaagaagacagcaacaggctggatgaccacaattaacggcaaggagctgaaggtggagggccagattacctactacaacagatacaagagacagaacgtagtcaaggacctgtccgtcgagctggatagactgagcgaagaatctgtgaacaacgacatctcctcctggacaaagggcagaagcggagaagctctgagcctcctgaagaaaagattctcccatagacccgtgcaggagaagttcgtgtgcctgaactgcggcttcgagacacacgcagccgagcaagccgccctgaacatcgccagatcctggctgttcctgcggagccaggagtacaagaaataccagacaaacaagacaaccggcaacaccgataagagagccttcgtcgagacctggcagtccttttaccggaagaagcttaaggaggtgtggaaacctgccgtgcggtctggcggatctggcggaggctccacaagcaggcccagggccgtgaagttcgccgacgtggccgtgtacttcagccccgaggagtggggctgcctgaggcccgcccagagggccctgtacagggacgtgatgagggagacctacggccacctgagcgccctgggctgcagcggccccaagcccgccctgatcagctggctggagaggaacaccgacgactgggagcccgccgccctggacccccaggagtgccccaggggcctgaccgtgcagaccagccccaagaaaaagagaaaagtctaagctgccttctgcggggcttgccttctggccatgcccttcttctctcccttgcacctgtacctcttggtctttgaataaagcctgagtaggaaggctagcaaaaaaaaaaaaaaaaaaaaaaaaaaaaaaaaaaaaaaaaaaaaaaaaaaaaaaaaaaaaaaaaaaaaaaaaaaaaaaaa

SEQ ID NO: 6288 - RNA, 5797 nt, synthetic construct
  source 1..5797: mol_type = other RNA
aggaaataagagagaaaagaagagtaagaagaaatataagagccaccatggcccctaagaagaagcgtaaagtgagccggatggaacgcctcgtctacgaggtgcggcagaagtgcagaaacatcgaggacatctgcatctcctgcggatctctgaacgtgaccctggagcacccactgttcatcggcggcatgtgccagaactgtaaaaactgttttctggagtgtgcctatcaatacgacgatgacggctaccagagctactgcaccatctgttgcggcggaagagaggtgctgatgtgtggaaataacaactgctgccggtgcttctgcgtggaatgcgtggacctgctggtgggccccggcgccgcccaggccgctattaaggaagatccttggaactgctacatgtgcggccacaagggcacatacggcctgctgagacggagagaggactggcctagcagactgcagatgttcttcgccaataaccacgaccaggagttcgacccccctaaggtgtaccctcccgtccccgccgagaagagaaagcccatccgggtcctgagcctgttcgatggcatcgccaccggtctgctggtgctgaaggacctgggcatccaggtggataggtacattgcctccgaggtgtgcgaggactccatcaccgtgggaatggtgcgtcatcagggcaagatcatgtacgtgggcgacgtgcggagcgtgacacagaagcatatccaggagtggggccctttcgacctggtgatcggcggcagcccttgcaatgacctgagcatcgtgaacccagcccggaagggcctgtacgagggaaccggcagactgttcttcgagttttacagactgctgcacgacgcccggcctaaggaaggcgacgaccggcccttcttttggctgttcgagaatgtggtggccatgggagtcagcgacaagcgggatattagccggttcctggagagcaaccccgtgatgatcgatgccaaggaagtgagcgccgcccaccgggccagatacttctggggcaatctgcctggcatgaacagacccctggccagcaccgtgaacgacaagctggagctgcaggagtgcctggagcacggccggatcgccaagttcagcaaggtgagaaccatcaccacccgaagcaacagcatcaaacaaggcaaggaccagcactttcctgtgttcatgaacgagaaggaggacatcctgtggtgtaccgagatggagagagtgttcgggttcccagtccactacacagatgtcagcaacatgtctagactggccagacagagactgctgggaagaagctggtccgtccctgtgatcagacacctgttcgcccctctgaaggagtacttcgcctgcgtgagcagcggcaacagcaacgccaacagccggggccccagcttctctagcggcctggtgccactgtccctgagagggagccacatgggccccatggagatctacaaaaccgtgagcgcctggaagcggcagcctgtgcgcgtgctgagcctgtttcggaatatcgataaagtcctgaaaagcctgggattcctggagagcggctctggctccggcggtggcaccctgaagtacgtggaggatgtgacaaacgtggtcagacgggatgtggagaagtggggccccttcgatctggtgtacggcagcacccaacccctgggcagctcttgtgaccggtgccctggctggtacatgtttcagttccaccggatcctgcagtacgccctgccgagacaggagtcccagcggccattcttttggattttcatggacaacttgctgctgaccgaggatgaccaggaaactaccactcggttcctgcagaccgaagccgtgaccctgcaggacgtgagaggccgggactaccagaacgccatgcgggtgtggtccaacatccctggactgaaaagcaagcacgcacctctgacccctaaagaagaggagtacctgcaggcccaggtgcggagcagaagcaagctggacgcccctaaggtggatctgctggtgaagaattgcctcctgcccctgagagagtacttcaagtatttcagccagaatagtctgcccctgggcggcccaagcagcggcgcccctcctcccagcggcggcagcccagccggctccccaacctctaccgaggagggcacctctgagtccgccacccccgagagcggccctggcacctccaccgagcccagcgagggcagcgcacccggcagccctgccggcagccccacctccacagaggagggaaccagcaccgagcccagcgaaggcagcgccccaggcaccagcaccgagcctagtgagggcggctctggcggcggcagcgcccaggagattaaacggatcaacaagatcagaagaagacttgtgaaagacagcaacaccaagaaggccggcaagacaggccccatgaaaaccctgctggttagagtgatgacacccgatctgagagagcggctggaaaacctgagaaagaagcctgaaaatatcccccagcccatcagcaatacatctagagccaacctgaataagctgctgaccgattacaccgaaatgaagaaggcgatcctgcatgtgtactgggaagagttccagaaggaccctgtgggcctgatgagccgggtggcccagcctgccagcaagaagatcgatcagaacaagctgaaacctgagatggacgagaagggcaacctgaccaccgccggctttgcctgctctcagtgtggccagcccctgttcgtgtacaagctggagcaggtgtctgagaagggcaaggcttacaccaactacttcggacggtgcaatgtggccgagcacgaaaagctgatcctgctggcccagctgaagcccgagaaggatagcgacgaagccgtgacatatagcctgggaaagtttgggcagagggccctggatttctacagcattcatgtgaccaaggagtccacccaccccgtgaagcccctggcccagatcgccggaaacagatacgcctccggacctgtgggaaaggccctgagcgacgcatgtatgggcacaatcgcctccttcctgtctaagtaccaggacatcatcatcgaacaccagaaggtggtgaagggcaaccagaagagactggagagcctgcgggagctggccggcaaggaaaacctggaataccctagcgtgaccctgccacctcagcctcacaccaaggagggcgttgatgcctacaacgaagtgatcgcccgggtgcgaatgtgggtgaacctgaacctgtggcagaagctgaagctaagcagagatgatgccaagcctctgctgagactgaagggattcccttcctttcctctggtcgagagacaggccaacgaagtggactggtgggacatggtgtgtaacgtgaagaagctgatcaacgagaaaaaggaggatggcaaggtgttttggcagaatctggctggctacaagagacaggaagccctgagaccatacctgagcagcgaggaagatcggaagaagggaaagaaattcgctcggtaccagctgggcgacctgctgctgcacctggaaaagaagcacggcgaggactggggaaaggtgtacgacgaggcctgggagcggattgacaagaaagtggaaggcctgagcaagcacatcaagctggaagaggaacggagaagcgaggacgcccagagcaaggccgccctgaccgactggctgcgggctaaggccagcttcgtgatcgagggcctgaaggaggccgacaaggacgagttctgcagatgcgagctgaagctgcagaagtggtacggggacctgcggggaaagcccttcgccatcgaagccgagaacagcatcctggacatcagcggcttcagcaagcagtacaactgtgccttcatctggcagaaggacggcgtgaagaagctgaacctgtacctgatcatcaactacttcaagggcggcaagctgcggttcaagaagatcaaacctgaagccttcgaagccaacagattctacaccgtgatcaacaaaaagagcggcgagatcgtgcccatggaggtgaacttcaacttcgacgaccccaacctgatcatcctgcctctggcctttggcaagagacagggcagagaattcatctggaacgacctgctgtccctggaaaccggcagcctgaagctggccaacggaagagtgatcgagaagacactgtacaacagaagaacccggcaggatgagcctgccctgttcgtggccctgaccttcgagcggcgggaggtcctggactcctccaatatcaaaccaatgaacctgatcggcgtggcaagaggcgaaaacatccccgccgtgatcgccctgaccgaccccgagggctgcccactgagccggtttaaggatagcctgggaaacccaacccacatcctgagaatcggcgagagctataaggagaagcagcggaccatccaggccaagaaggaggtggagcagcggagagccggcggctacagccggaagtacgccagcaaagccaagaatctggcagacgatatggtgagaaacaccgctagagatctgctgtactacgccgtgacccaggatgccatgctgatcttcgccaacctgagccggggcttcggccggcagggcaagcggaccttcatggccgagagacagtacacacggatggaggactggctgaccgccaagctggcctacgagggcctgagcaagacctacctgtccaagacactggcccagtacacctccaagacatgcagcaactgtgggtttaccatcaccagcgccgactacgacagggtgctggagaagctgaagaagacagcaacaggctggatgaccacaattaacggcaaggagctgaaggtggagggccagattacctactacaacagatacaagagacagaacgtagtcaaggacctgtccgtcgagctggatagactgagcgaagaatctgtgaacaacgacatctcctcctggacaaagggcagaagcggagaagctctgagcctcctgaagaaaagattctcccatagacccgtgcaggagaagttcgtgtgcctgaactgcggcttcgagacacacgcagccgagcaagccgccctgaacatcgccagatcctggctgttcctgcggagccaggagtacaagaaataccagacaaacaagacaaccggcaacaccgataagagagccttcgtcgagacctggcagtccttttaccggaagaagcttaaggaggtgtggaaacctgccgtgcggtctggcggatctggcggaggctccacaagcaggcagggcagcgtgaccttccaggacgtggccgtggacttcagctgggaggagtggggcaggctgggccccacccagaaggagctgtacagggaggtgatgctggagaactacaggaacctggtgtgcctgggcctggaggtgagcaagcccgacgtggtgtaccagctggagaggggcgaggccccctggatgcccgagggcgccgtgaggaggagctgcagccagaactggggcgccaggaccagccccaagaaaaagagaaaagtctaagctgccttctgcggggcttgccttctggccatgcccttcttctctcccttgcacctgtacctcttggtctttgaataaagcctgagtaggaaggctagcaaaaaaaaaaaaaaaaaaaaaaaaaaaaaaaaaaaaaaaaaaaaaaaaaaaaaaaaaaaaaaaaaaaaaaaaaaaaaaaa

SEQ ID NO: 6289 - RNA, 5797 nt, synthetic construct
  source 1..5797: mol_type = other RNA
aggaaataagagagaaaagaagagtaagaagaaatataagagccaccatggcccctaagaagaagcgtaaagtgagccggatggaacgcctcgtctacgaggtgcggcagaagtgcagaaacatcgaggacatctgcatctcctgcggatctctgaacgtgaccctggagcacccactgttcatcggcggcatgtgccagaactgtaaaaactgttttctggagtgtgcctatcaatacgacgatgacggctaccagagctactgcaccatctgttgcggcggaagagaggtgctgatgtgtggaaataacaactgctgccggtgcttctgcgtggaatgcgtggacctgctggtgggccccggcgccgcccaggccgctattaaggaagatccttggaactgctacatgtgcggccacaagggcacatacggcctgctgagacggagagaggactggcctagcagactgcagatgttcttcgccaataaccacgaccaggagttcgacccccctaaggtgtaccctcccgtccccgccgagaagagaaagcccatccgggtcctgagcctgttcgatggcatcgccaccggtctgctggtgctgaaggacctgggcatccaggtggataggtacattgcctccgaggtgtgcgaggactccatcaccgtgggaatggtgcgtcatcagggcaagatcatgtacgtgggcgacgtgcggagcgtgacacagaagcatatccaggagtggggccctttcgacctggtgatcggcggcagcccttgcaatgacctgagcatcgtgaacccagcccggaagggcctgtacgagggaaccggcagactgttcttcgagttttacagactgctgcacgacgcccggcctaaggaaggcgacgaccggcccttcttttggctgttcgagaatgtggtggccatgggagtcagcgacaagcgggatattagccggttcctggagagcaaccccgtgatgatcgatgccaaggaagtgagcgccgcccaccgggccagatacttctggggcaatctgcctggcatgaacagacccctggccagcaccgtgaacgacaagctggagctgcaggagtgcctggagcacggccggatcgccaagttcagcaaggtgagaaccatcaccacccgaagcaacagcatcaaacaaggcaaggaccagcactttcctgtgttcatgaacgagaaggaggacatcctgtggtgtaccgagatggagagagtgttcgggttcccagtccactacacagatgtcagcaacatgtctagactggccagacagagactgctgggaagaagctggtccgtccctgtgatcagacacctgttcgcccctctgaaggagtacttcgcctgcgtgagcagcggcaacagcaacgccaacagccggggccccagcttctctagcggcctggtgccactgtccctgagagggagccacatgggccccatggagatctacaaaaccgtgagcgcctggaagcggcagcctgtgcgcgtgctgagcctgtttcggaatatcgataaagtcctgaaaagcctgggattcctggagagcggctctggctccggcggtggcaccctgaagtacgtggaggatgtgacaaacgtggtcagacgggatgtggagaagtggggccccttcgatctggtgtacggcagcacccaacccctgggcagctcttgtgaccggtgccctggctggtacatgtttcagttccaccggatcctgcagtacgccctgccgagacaggagtcccagcggccattcttttggattttcatggacaacttgctgctgaccgaggatgaccaggaaactaccactcggttcctgcagaccgaagccgtgaccctgcaggacgtgagaggccgggactaccagaacgccatgcgggtgtggtccaacatccctggactgaaaagcaagcacgcacctctgacccctaaagaagaggagtacctgcaggcccaggtgcggagcagaagcaagctggacgcccctaaggtggatctgctggtgaagaattgcctcctgcccctgagagagtacttcaagtatttcagccagaatagtctgcccctgggcggcccaagcagcggcgcccctcctcccagcggcggcagcccagccggctccccaacctctaccgaggagggcacctctgagtccgccacccccgagagcggccctggcacctccaccgagcccagcgagggcagcgcacccggcagccctgccggcagccccacctccacagaggagggaaccagcaccgagcccagcgaaggcagcgccccaggcaccagcaccgagcctagtgagggcggctctggcggcggcagcgcccaggagattaaacggatcaacaagatcagaagaagacttgtgaaagacagcaacaccaagaaggccggcaagacaggccccatgaaaaccctgctggttagagtgatgacacccgatctgagagagcggctggaaaacctgagaaagaagcctgaaaatatcccccagcccatcagcaatacatctagagccaacctgaataagctgctgaccgattacaccgaaatgaagaaggcgatcctgcatgtgtactgggaagagttccagaaggaccctgtgggcctgatgagccgggtggcccagcctgccagcaagaagatcgatcagaacaagctgaaacctgagatggacgagaagggcaacctgaccaccgccggctttgcctgctctcagtgtggccagcccctgttcgtgtacaagctggagcaggtgtctgagaagggcaaggcttacaccaactacttcggacggtgcaatgtggccgagcacgaaaagctgatcctgctggcccagctgaagcccgagaaggatagcgacgaagccgtgacatatagcctgggaaagtttgggcagagggccctggatttctacagcattcatgtgaccaaggagtccacccaccccgtgaagcccctggcccagatcgccggaaacagatacgcctccggacctgtgggaaaggccctgagcgacgcatgtatgggcacaatcgcctccttcctgtctaagtaccaggacatcatcatcgaacaccagaaggtggtgaagggcaaccagaagagactggagagcctgcgggagctggccggcaaggaaaacctggaataccctagcgtgaccctgccacctcagcctcacaccaaggagggcgttgatgcctacaacgaagtgatcgcccgggtgcgaatgtgggtgaacctgaacctgtggcagaagctgaagctaagcagagatgatgccaagcctctgctgagactgaagggattcccttcctttcctctggtcgagagacaggccaacgaagtggactggtgggacatggtgtgtaacgtgaagaagctgatcaacgagaaaaaggaggatggcaaggtgttttggcagaatctggctggctacaagagacaggaagccctgagaccatacctgagcagcgaggaagatcggaagaagggaaagaaattcgctcggtaccagctgggcgacctgctgctgcacctggaaaagaagcacggcgaggactggggaaaggtgtacgacgaggcctgggagcggattgacaagaaagtggaaggcctgagcaagcacatcaagctggaagaggaacggagaagcgaggacgcccagagcaaggccgccctgaccgactggctgcgggctaaggccagcttcgtgatcgagggcctgaaggaggccgacaaggacgagttctgcagatgcgagctgaagctgcagaagtggtacggggacctgcggggaaagcccttcgccatcgaagccgagaacagcatcctggacatcagcggcttcagcaagcagtacaactgtgccttcatctggcagaaggacggcgtgaagaagctgaacctgtacctgatcatcaactacttcaagggcggcaagctgcggttcaagaagatcaaacctgaagccttcgaagccaacagattctacaccgtgatcaacaaaaagagcggcgagatcgtgcccatggaggtgaacttcaacttcgacgaccccaacctgatcatcctgcctctggcctttggcaagagacagggcagagaattcatctggaacgacctgctgtccctggaaaccggcagcctgaagctggccaacggaagagtgatcgagaagacactgtacaacagaagaacccggcaggatgagcctgccctgttcgtggccctgaccttcgagcggcgggaggtcctggactcctccaatatcaaaccaatgaacctgatcggcgtggcaagaggcgaaaacatccccgccgtgatcgccctgaccgaccccgagggctgcccactgagccggtttaaggatagcctgggaaacccaacccacatcctgagaatcggcgagagctataaggagaagcagcggaccatccaggccaagaaggaggtggagcagcggagagccggcggctacagccggaagtacgccagcaaagccaagaatctggcagacgatatggtgagaaacaccgctagagatctgctgtactacgccgtgacccaggatgccatgctgatcttcgccaacctgagccggggcttcggccggcagggcaagcggaccttcatggccgagagacagtacacacggatggaggactggctgaccgccaagctggcctacgagggcctgagcaagacctacctgtccaagacactggcccagtacacctccaagacatgcagcaactgtgggtttaccatcaccagcgccgactacgacagggtgctggagaagctgaagaagacagcaacaggctggatgaccacaattaacggcaaggagctgaaggtggagggccagattacctactacaacagatacaagagacagaacgtagtcaaggacctgtccgtcgagctggatagactgagcgaagaatctgtgaacaacgacatctcctcctggacaaagggcagaagcggagaagctctgagcctcctgaagaaaagattctcccatagacccgtgcaggagaagttcgtgtgcctgaactgcggcttcgagacacacgcagccgagcaagccgccctgaacatcgccagatcctggctgttcctgcggagccaggagtacaagaaataccagacaaacaagacaaccggcaacaccgataagagagccttcgtcgagacctggcagtccttttaccggaagaagcttaaggaggtgtggaaacctgccgtgcggtctggcggatctggcggaggctccacaagccaggccgaggtgaccttcgaggacgtggccgtgctgctgagcagggaggagtggggcaggctgggccccgcccagaagggcctgtacagggacgtgatgctggagacctacaggaacctggtgagcctgggcgccggccacgccggccccaagcccggcgtgatcgcccagctggagaggggcgacgagccctgggtgctggacatgcagggcagggagcagagcaccatcgacggcagcgccaccagccccaagaaaaagagaaaagtctaagctgccttctgcggggcttgccttctggccatgcccttcttctctcccttgcacctgtacctcttggtctttgaataaagcctgagtaggaaggctagcaaaaaaaaaaaaaaaaaaaaaaaaaaaaaaaaaaaaaaaaaaaaaaaaaaaaaaaaaaaaaaaaaaaaaaaaaaaaaaaa

SEQ ID NO: 6290 - RNA, 5797 nt, synthetic construct
  source 1..5797: mol_type = other RNA
aggaaataagagagaaaagaagagtaagaagaaatataagagccaccatggcccctaagaagaagcgtaaagtgagccggatggaacgcctcgtctacgaggtgcggcagaagtgcagaaacatcgaggacatctgcatctcctgcggatctctgaacgtgaccctggagcacccactgttcatcggcggcatgtgccagaactgtaaaaactgttttctggagtgtgcctatcaatacgacgatgacggctaccagagctactgcaccatctgttgcggcggaagagaggtgctgatgtgtggaaataacaactgctgccggtgcttctgcgtggaatgcgtggacctgctggtgggccccggcgccgcccaggccgctattaaggaagatccttggaactgctacatgtgcggccacaagggcacatacggcctgctgagacggagagaggactggcctagcagactgcagatgttcttcgccaataaccacgaccaggagttcgacccccctaaggtgtaccctcccgtccccgccgagaagagaaagcccatccgggtcctgagcctgttcgatggcatcgccaccggtctgctggtgctgaaggacctgggcatccaggtggataggtacattgcctccgaggtgtgcgaggactccatcaccgtgggaatggtgcgtcatcagggcaagatcatgtacgtgggcgacgtgcggagcgtgacacagaagcatatccaggagtggggccctttcgacctggtgatcggcggcagcccttgcaatgacctgagcatcgtgaacccagcccggaagggcctgtacgagggaaccggcagactgttcttcgagttttacagactgctgcacgacgcccggcctaaggaaggcgacgaccggcccttcttttggctgttcgagaatgtggtggccatgggagtcagcgacaagcgggatattagccggttcctggagagcaaccccgtgatgatcgatgccaaggaagtgagcgccgcccaccgggccagatacttctggggcaatctgcctggcatgaacagacccctggccagcaccgtgaacgacaagctggagctgcaggagtgcctggagcacggccggatcgccaagttcagcaaggtgagaaccatcaccacccgaagcaacagcatcaaacaaggcaaggaccagcactttcctgtgttcatgaacgagaaggaggacatcctgtggtgtaccgagatggagagagtgttcgggttcccagtccactacacagatgtcagcaacatgtctagactggccagacagagactgctgggaagaagctggtccgtccctgtgatcagacacctgttcgcccctctgaaggagtacttcgcctgcgtgagcagcggcaacagcaacgccaacagccggggccccagcttctctagcggcctggtgccactgtccctgagagggagccacatgggccccatggagatctacaaaaccgtgagcgcctggaagcggcagcctgtgcgcgtgctgagcctgtttcggaatatcgataaagtcctgaaaagcctgggattcctggagagcggctctggctccggcggtggcaccctgaagtacgtggaggatgtgacaaacgtggtcagacgggatgtggagaagtggggccccttcgatctggtgtacggcagcacccaacccctgggcagctcttgtgaccggtgccctggctggtacatgtttcagttccaccggatcctgcagtacgccctgccgagacaggagtcccagcggccattcttttggattttcatggacaacttgctgctgaccgaggatgaccaggaaactaccactcggttcctgcagaccgaagccgtgaccctgcaggacgtgagaggccgggactaccagaacgccatgcgggtgtggtccaacatccctggactgaaaagcaagcacgcacctctgacccctaaagaagaggagtacctgcaggcccaggtgcggagcagaagcaagctggacgcccctaaggtggatctgctggtgaagaattgcctcctgcccctgagagagtacttcaagtatttcagccagaatagtctgcccctgggcggcccaagcagcggcgcccctcctcccagcggcggcagcccagccggctccccaacctctaccgaggagggcacctctgagtccgccacccccgagagcggccctggcacctccaccgagcccagcgagggcagcgcacccggcagccctgccggcagccccacctccacagaggagggaaccagcaccgagcccagcgaaggcagcgccccaggcaccagcaccgagcctagtgagggcggctctggcggcggcagcgcccaggagattaaacggatcaacaagatcagaagaagacttgtgaaagacagcaacaccaagaaggccggcaagacaggccccatgaaaaccctgctggttagagtgatgacacccgatctgagagagcggctggaaaacctgagaaagaagcctgaaaatatcccccagcccatcagcaatacatctagagccaacctgaataagctgctgaccgattacaccgaaatgaagaaggcgatcctgcatgtgtactgggaagagttccagaaggaccctgtgggcctgatgagccgggtggcccagcctgccagcaagaagatcgatcagaacaagctgaaacctgagatggacgagaagggcaacctgaccaccgccggctttgcctgctctcagtgtggccagcccctgttcgtgtacaagctggagcaggtgtctgagaagggcaaggcttacaccaactacttcggacggtgcaatgtggccgagcacgaaaagctgatcctgctggcccagctgaagcccgagaaggatagcgacgaagccgtgacatatagcctgggaaagtttgggcagagggccctggatttctacagcattcatgtgaccaaggagtccacccaccccgtgaagcccctggcccagatcgccggaaacagatacgcctccggacctgtgggaaaggccctgagcgacgcatgtatgggcacaatcgcctccttcctgtctaagtaccaggacatcatcatcgaacaccagaaggtggtgaagggcaaccagaagagactggagagcctgcgggagctggccggcaaggaaaacctggaataccctagcgtgaccctgccacctcagcctcacaccaaggagggcgttgatgcctacaacgaagtgatcgcccgggtgcgaatgtgggtgaacctgaacctgtggcagaagctgaagctaagcagagatgatgccaagcctctgctgagactgaagggattcccttcctttcctctggtcgagagacaggccaacgaagtggactggtgggacatggtgtgtaacgtgaagaagctgatcaacgagaaaaaggaggatggcaaggtgttttggcagaatctggctggctacaagagacaggaagccctgagaccatacctgagcagcgaggaagatcggaagaagggaaagaaattcgctcggtaccagctgggcgacctgctgctgcacctggaaaagaagcacggcgaggactggggaaaggtgtacgacgaggcctgggagcggattgacaagaaagtggaaggcctgagcaagcacatcaagctggaagaggaacggagaagcgaggacgcccagagcaaggccgccctgaccgactggctgcgggctaaggccagcttcgtgatcgagggcctgaaggaggccgacaaggacgagttctgcagatgcgagctgaagctgcagaagtggtacggggacctgcggggaaagcccttcgccatcgaagccgagaacagcatcctggacatcagcggcttcagcaagcagtacaactgtgccttcatctggcagaaggacggcgtgaagaagctgaacctgtacctgatcatcaactacttcaagggcggcaagctgcggttcaagaagatcaaacctgaagccttcgaagccaacagattctacaccgtgatcaacaaaaagagcggcgagatcgtgcccatggaggtgaacttcaacttcgacgaccccaacctgatcatcctgcctctggcctttggcaagagacagggcagagaattcatctggaacgacctgctgtccctggaaaccggcagcctgaagctggccaacggaagagtgatcgagaagacactgtacaacagaagaacccggcaggatgagcctgccctgttcgtggccctgaccttcgagcggcgggaggtcctggactcctccaatatcaaaccaatgaacctgatcggcgtggcaagaggcgaaaacatccccgccgtgatcgccctgaccgaccccgagggctgcccactgagccggtttaaggatagcctgggaaacccaacccacatcctgagaatcggcgagagctataaggagaagcagcggaccatccaggccaagaaggaggtggagcagcggagagccggcggctacagccggaagtacgccagcaaagccaagaatctggcagacgatatggtgagaaacaccgctagagatctgctgtactacgccgtgacccaggatgccatgctgatcttcgccaacctgagccggggcttcggccggcagggcaagcggaccttcatggccgagagacagtacacacggatggaggactggctgaccgccaagctggcctacgagggcctgagcaagacctacctgtccaagacactggcccagtacacctccaagacatgcagcaactgtgggtttaccatcaccagcgccgactacgacagggtgctggagaagctgaagaagacagcaacaggctggatgaccacaattaacggcaaggagctgaaggtggagggccagattacctactacaacagatacaagagacagaacgtagtcaaggacctgtccgtcgagctggatagactgagcgaagaatctgtgaacaacgacatctcctcctggacaaagggcagaagcggagaagctctgagcctcctgaagaaaagattctcccatagacccgtgcaggagaagttcgtgtgcctgaactgcggcttcgagacacacgcagccgagcaagccgccctgaacatcgccagatcctggctgttcctgcggagccaggagtacaagaaataccagacaaacaagacaaccggcaacaccgataagagagccttcgtcgagacctggcagtccttttaccggaagaagcttaaggaggtgtggaaacctgccgtgcggtctggcggatctggcggaggctccacaagcagcagccaggagctgctgaccttcagggacgtggccatcgagttcagccaggaggagtggaggtgcctgaaccacacccagagggagctgtacagggacgtgatgctggagaactacggccacctgctgttcctgggcctgatcgtgagcaagcccgacctggtgagcttcctggagcagaccaaggacccctgggacggcaagagcaagaagaccgtggccttccaccccggcaggtgggagaccagccccaagaaaaagagaaaagtctaagctgccttctgcggggcttgccttctggccatgcccttcttctctcccttgcacctgtacctcttggtctttgaataaagcctgagtaggaaggctagcaaaaaaaaaaaaaaaaaaaaaaaaaaaaaaaaaaaaaaaaaaaaaaaaaaaaaaaaaaaaaaaaaaaaaaaaaaaaaaaa

SEQ ID NO: 6291 - RNA, 5797 nt, synthetic construct
  source 1..5797: mol_type = other RNA
aggaaataagagagaaaagaagagtaagaagaaatataagagccaccatggcccctaagaagaagcgtaaagtgagccggatggaacgcctcgtctacgaggtgcggcagaagtgcagaaacatcgaggacatctgcatctcctgcggatctctgaacgtgaccctggagcacccactgttcatcggcggcatgtgccagaactgtaaaaactgttttctggagtgtgcctatcaatacgacgatgacggctaccagagctactgcaccatctgttgcggcggaagagaggtgctgatgtgtggaaataacaactgctgccggtgcttctgcgtggaatgcgtggacctgctggtgggccccggcgccgcccaggccgctattaaggaagatccttggaactgctacatgtgcggccacaagggcacatacggcctgctgagacggagagaggactggcctagcagactgcagatgttcttcgccaataaccacgaccaggagttcgacccccctaaggtgtaccctcccgtccccgccgagaagagaaagcccatccgggtcctgagcctgttcgatggcatcgccaccggtctgctggtgctgaaggacctgggcatccaggtggataggtacattgcctccgaggtgtgcgaggactccatcaccgtgggaatggtgcgtcatcagggcaagatcatgtacgtgggcgacgtgcggagcgtgacacagaagcatatccaggagtggggccctttcgacctggtgatcggcggcagcccttgcaatgacctgagcatcgtgaacccagcccggaagggcctgtacgagggaaccggcagactgttcttcgagttttacagactgctgcacgacgcccggcctaaggaaggcgacgaccggcccttcttttggctgttcgagaatgtggtggccatgggagtcagcgacaagcgggatattagccggttcctggagagcaaccccgtgatgatcgatgccaaggaagtgagcgccgcccaccgggccagatacttctggggcaatctgcctggcatgaacagacccctggccagcaccgtgaacgacaagctggagctgcaggagtgcctggagcacggccggatcgccaagttcagcaaggtgagaaccatcaccacccgaagcaacagcatcaaacaaggcaaggaccagcactttcctgtgttcatgaacgagaaggaggacatcctgtggtgtaccgagatggagagagtgttcgggttcccagtccactacacagatgtcagcaacatgtctagactggccagacagagactgctgggaagaagctggtccgtccctgtgatcagacacctgttcgcccctctgaaggagtacttcgcctgcgtgagcagcggcaacagcaacgccaacagccggggccccagcttctctagcggcctggtgccactgtccctgagagggagccacatgggccccatggagatctacaaaaccgtgagcgcctggaagcggcagcctgtgcgcgtgctgagcctgtttcggaatatcgataaagtcctgaaaagcctgggattcctggagagcggctctggctccggcggtggcaccctgaagtacgtggaggatgtgacaaacgtggtcagacgggatgtggagaagtggggccccttcgatctggtgtacggcagcacccaacccctgggcagctcttgtgaccggtgccctggctggtacatgtttcagttccaccggatcctgcagtacgccctgccgagacaggagtcccagcggccattcttttggattttcatggacaacttgctgctgaccgaggatgaccaggaaactaccactcggttcctgcagaccgaagccgtgaccctgcaggacgtgagaggccgggactaccagaacgccatgcgggtgtggtccaacatccctggactgaaaagcaagcacgcacctctgacccctaaagaagaggagtacctgcaggcccaggtgcggagcagaagcaagctggacgcccctaaggtggatctgctggtgaagaattgcctcctgcccctgagagagtacttcaagtatttcagccagaatagtctgcccctgggcggcccaagcagcggcgcccctcctcccagcggcggcagcccagccggctccccaacctctaccgaggagggcacctctgagtccgccacccccgagagcggccctggcacctccaccgagcccagcgagggcagcgcacccggcagccctgccggcagccccacctccacagaggagggaaccagcaccgagcccagcgaaggcagcgccccaggcaccagcaccgagcctagtgagggcggctctggcggcggcagcgcccaggagattaaacggatcaacaagatcagaagaagacttgtgaaagacagcaacaccaagaaggccggcaagacaggccccatgaaaaccctgctggttagagtgatgacacccgatctgagagagcggctggaaaacctgagaaagaagcctgaaaatatcccccagcccatcagcaatacatctagagccaacctgaataagctgctgaccgattacaccgaaatgaagaaggcgatcctgcatgtgtactgggaagagttccagaaggaccctgtgggcctgatgagccgggtggcccagcctgccagcaagaagatcgatcagaacaagctgaaacctgagatggacgagaagggcaacctgaccaccgccggctttgcctgctctcagtgtggccagcccctgttcgtgtacaagctggagcaggtgtctgagaagggcaaggcttacaccaactacttcggacggtgcaatgtggccgagcacgaaaagctgatcctgctggcccagctgaagcccgagaaggatagcgacgaagccgtgacatatagcctgggaaagtttgggcagagggccctggatttctacagcattcatgtgaccaaggagtccacccaccccgtgaagcccctggcccagatcgccggaaacagatacgcctccggacctgtgggaaaggccctgagcgacgcatgtatgggcacaatcgcctccttcctgtctaagtaccaggacatcatcatcgaacaccagaaggtggtgaagggcaaccagaagagactggagagcctgcgggagctggccggcaaggaaaacctggaataccctagcgtgaccctgccacctcagcctcacaccaaggagggcgttgatgcctacaacgaagtgatcgcccgggtgcgaatgtgggtgaacctgaacctgtggcagaagctgaagctaagcagagatgatgccaagcctctgctgagactgaagggattcccttcctttcctctggtcgagagacaggccaacgaagtggactggtgggacatggtgtgtaacgtgaagaagctgatcaacgagaaaaaggaggatggcaaggtgttttggcagaatctggctggctacaagagacaggaagccctgagaccatacctgagcagcgaggaagatcggaagaagggaaagaaattcgctcggtaccagctgggcgacctgctgctgcacctggaaaagaagcacggcgaggactggggaaaggtgtacgacgaggcctgggagcggattgacaagaaagtggaaggcctgagcaagcacatcaagctggaagaggaacggagaagcgaggacgcccagagcaaggccgccctgaccgactggctgcgggctaaggccagcttcgtgatcgagggcctgaaggaggccgacaaggacgagttctgcagatgcgagctgaagctgcagaagtggtacggggacctgcggggaaagcccttcgccatcgaagccgagaacagcatcctggacatcagcggcttcagcaagcagtacaactgtgccttcatctggcagaaggacggcgtgaagaagctgaacctgtacctgatcatcaactacttcaagggcggcaagctgcggttcaagaagatcaaacctgaagccttcgaagccaacagattctacaccgtgatcaacaaaaagagcggcgagatcgtgcccatggaggtgaacttcaacttcgacgaccccaacctgatcatcctgcctctggcctttggcaagagacagggcagagaattcatctggaacgacctgctgtccctggaaaccggcagcctgaagctggccaacggaagagtgatcgagaagacactgtacaacagaagaacccggcaggatgagcctgccctgttcgtggccctgaccttcgagcggcgggaggtcctggactcctccaatatcaaaccaatgaacctgatcggcgtggcaagaggcgaaaacatccccgccgtgatcgccctgaccgaccccgagggctgcccactgagccggtttaaggatagcctgggaaacccaacccacatcctgagaatcggcgagagctataaggagaagcagcggaccatccaggccaagaaggaggtggagcagcggagagccggcggctacagccggaagtacgccagcaaagccaagaatctggcagacgatatggtgagaaacaccgctagagatctgctgtactacgccgtgacccaggatgccatgctgatcttcgccaacctgagccggggcttcggccggcagggcaagcggaccttcatggccgagagacagtacacacggatggaggactggctgaccgccaagctggcctacgagggcctgagcaagacctacctgtccaagacactggcccagtacacctccaagacatgcagcaactgtgggtttaccatcaccagcgccgactacgacagggtgctggagaagctgaagaagacagcaacaggctggatgaccacaattaacggcaaggagctgaaggtggagggccagattacctactacaacagatacaagagacagaacgtagtcaaggacctgtccgtcgagctggatagactgagcgaagaatctgtgaacaacgacatctcctcctggacaaagggcagaagcggagaagctctgagcctcctgaagaaaagattctcccatagacccgtgcaggagaagttcgtgtgcctgaactgcggcttcgagacacacgcagccgagcaagccgccctgaacatcgccagatcctggctgttcctgcggagccaggagtacaagaaataccagacaaacaagacaaccggcaacaccgataagagagccttcgtcgagacctggcagtccttttaccggaagaagcttaaggaggtgtggaaacctgccgtgcggtctggcggatctggcggaggctccacaagcctgcaggtgagcgtgagcttcgaggacgtgaccgtgaacttcagcagggaggagtggcagcacctggaccccgcccagaggaggctgtacagggacgtgaccctggagaactacagccacctgaggagcgtgggctaccaggtgcccaagcccgaggtgatcttcaagctggagcagggcgagggcccctggaccctggagggcgagaccccccaccagagctgcagcggcgaggacatcggcaccagccccaagaaaaagagaaaagtctaagctgccttctgcggggcttgccttctggccatgcccttcttctctcccttgcacctgtacctcttggtctttgaataaagcctgagtaggaaggctagcaaaaaaaaaaaaaaaaaaaaaaaaaaaaaaaaaaaaaaaaaaaaaaaaaaaaaaaaaaaaaaaaaaaaaaaaaaaaaaaa

SEQ ID NO: 6292 - RNA, 5797 nt, synthetic construct
  source 1..5797: mol_type = other RNA
aggaaataagagagaaaagaagagtaagaagaaatataagagccaccatggcccctaagaagaagcgtaaagtgagccggatggaacgcctcgtctacgaggtgcggcagaagtgcagaaacatcgaggacatctgcatctcctgcggatctctgaacgtgaccctggagcacccactgttcatcggcggcatgtgccagaactgtaaaaactgttttctggagtgtgcctatcaatacgacgatgacggctaccagagctactgcaccatctgttgcggcggaagagaggtgctgatgtgtggaaataacaactgctgccggtgcttctgcgtggaatgcgtggacctgctggtgggccccggcgccgcccaggccgctattaaggaagatccttggaactgctacatgtgcggccacaagggcacatacggcctgctgagacggagagaggactggcctagcagactgcagatgttcttcgccaataaccacgaccaggagttcgacccccctaaggtgtaccctcccgtccccgccgagaagagaaagcccatccgggtcctgagcctgttcgatggcatcgccaccggtctgctggtgctgaaggacctgggcatccaggtggataggtacattgcctccgaggtgtgcgaggactccatcaccgtgggaatggtgcgtcatcagggcaagatcatgtacgtgggcgacgtgcggagcgtgacacagaagcatatccaggagtggggccctttcgacctggtgatcggcggcagcccttgcaatgacctgagcatcgtgaacccagcccggaagggcctgtacgagggaaccggcagactgttcttcgagttttacagactgctgcacgacgcccggcctaaggaaggcgacgaccggcccttcttttggctgttcgagaatgtggtggccatgggagtcagcgacaagcgggatattagccggttcctggagagcaaccccgtgatgatcgatgccaaggaagtgagcgccgcccaccgggccagatacttctggggcaatctgcctggcatgaacagacccctggccagcaccgtgaacgacaagctggagctgcaggagtgcctggagcacggccggatcgccaagttcagcaaggtgagaaccatcaccacccgaagcaacagcatcaaacaaggcaaggaccagcactttcctgtgttcatgaacgagaaggaggacatcctgtggtgtaccgagatggagagagtgttcgggttcccagtccactacacagatgtcagcaacatgtctagactggccagacagagactgctgggaagaagctggtccgtccctgtgatcagacacctgttcgcccctctgaaggagtacttcgcctgcgtgagcagcggcaacagcaacgccaacagccggggccccagcttctctagcggcctggtgccactgtccctgagagggagccacatgggccccatggagatctacaaaaccgtgagcgcctggaagcggcagcctgtgcgcgtgctgagcctgtttcggaatatcgataaagtcctgaaaagcctgggattcctggagagcggctctggctccggcggtggcaccctgaagtacgtggaggatgtgacaaacgtggtcagacgggatgtggagaagtggggccccttcgatctggtgtacggcagcacccaacccctgggcagctcttgtgaccggtgccctggctggtacatgtttcagttccaccggatcctgcagtacgccctgccgagacaggagtcccagcggccattcttttggattttcatggacaacttgctgctgaccgaggatgaccaggaaactaccactcggttcctgcagaccgaagccgtgaccctgcaggacgtgagaggccgggactaccagaacgccatgcgggtgtggtccaacatccctggactgaaaagcaagcacgcacctctgacccctaaagaagaggagtacctgcaggcccaggtgcggagcagaagcaagctggacgcccctaaggtggatctgctggtgaagaattgcctcctgcccctgagagagtacttcaagtatttcagccagaatagtctgcccctgggcggcccaagcagcggcgcccctcctcccagcggcggcagcccagccggctccccaacctctaccgaggagggcacctctgagtccgccacccccgagagcggccctggcacctccaccgagcccagcgagggcagcgcacccggcagccctgccggcagccccacctccacagaggagggaaccagcaccgagcccagcgaaggcagcgccccaggcaccagcaccgagcctagtgagggcggctctggcggcggcagcgcccaggagattaaacggatcaacaagatcagaagaagacttgtgaaagacagcaacaccaagaaggccggcaagacaggccccatgaaaaccctgctggttagagtgatgacacccgatctgagagagcggctggaaaacctgagaaagaagcctgaaaatatcccccagcccatcagcaatacatctagagccaacctgaataagctgctgaccgattacaccgaaatgaagaaggcgatcctgcatgtgtactgggaagagttccagaaggaccctgtgggcctgatgagccgggtggcccagcctgccagcaagaagatcgatcagaacaagctgaaacctgagatggacgagaagggcaacctgaccaccgccggctttgcctgctctcagtgtggccagcccctgttcgtgtacaagctggagcaggtgtctgagaagggcaaggcttacaccaactacttcggacggtgcaatgtggccgagcacgaaaagctgatcctgctggcccagctgaagcccgagaaggatagcgacgaagccgtgacatatagcctgggaaagtttgggcagagggccctggatttctacagcattcatgtgaccaaggagtccacccaccccgtgaagcccctggcccagatcgccggaaacagatacgcctccggacctgtgggaaaggccctgagcgacgcatgtatgggcacaatcgcctccttcctgtctaagtaccaggacatcatcatcgaacaccagaaggtggtgaagggcaaccagaagagactggagagcctgcgggagctggccggcaaggaaaacctggaataccctagcgtgaccctgccacctcagcctcacaccaaggagggcgttgatgcctacaacgaagtgatcgcccgggtgcgaatgtgggtgaacctgaacctgtggcagaagctgaagctaagcagagatgatgccaagcctctgctgagactgaagggattcccttcctttcctctggtcgagagacaggccaacgaagtggactggtgggacatggtgtgtaacgtgaagaagctgatcaacgagaaaaaggaggatggcaaggtgttttggcagaatctggctggctacaagagacaggaagccctgagaccatacctgagcagcgaggaagatcggaagaagggaaagaaattcgctcggtaccagctgggcgacctgctgctgcacctggaaaagaagcacggcgaggactggggaaaggtgtacgacgaggcctgggagcggattgacaagaaagtggaaggcctgagcaagcacatcaagctggaagaggaacggagaagcgaggacgcccagagcaaggccgccctgaccgactggctgcgggctaaggccagcttcgtgatcgagggcctgaaggaggccgacaaggacgagttctgcagatgcgagctgaagctgcagaagtggtacggggacctgcggggaaagcccttcgccatcgaagccgagaacagcatcctggacatcagcggcttcagcaagcagtacaactgtgccttcatctggcagaaggacggcgtgaagaagctgaacctgtacctgatcatcaactacttcaagggcggcaagctgcggttcaagaagatcaaacctgaagccttcgaagccaacagattctacaccgtgatcaacaaaaagagcggcgagatcgtgcccatggaggtgaacttcaacttcgacgaccccaacctgatcatcctgcctctggcctttggcaagagacagggcagagaattcatctggaacgacctgctgtccctggaaaccggcagcctgaagctggccaacggaagagtgatcgagaagacactgtacaacagaagaacccggcaggatgagcctgccctgttcgtggccctgaccttcgagcggcgggaggtcctggactcctccaatatcaaaccaatgaacctgatcggcgtggcaagaggcgaaaacatccccgccgtgatcgccctgaccgaccccgagggctgcccactgagccggtttaaggatagcctgggaaacccaacccacatcctgagaatcggcgagagctataaggagaagcagcggaccatccaggccaagaaggaggtggagcagcggagagccggcggctacagccggaagtacgccagcaaagccaagaatctggcagacgatatggtgagaaacaccgctagagatctgctgtactacgccgtgacccaggatgccatgctgatcttcgccaacctgagccggggcttcggccggcagggcaagcggaccttcatggccgagagacagtacacacggatggaggactggctgaccgccaagctggcctacgagggcctgagcaagacctacctgtccaagacactggcccagtacacctccaagacatgcagcaactgtgggtttaccatcaccagcgccgactacgacagggtgctggagaagctgaagaagacagcaacaggctggatgaccacaattaacggcaaggagctgaaggtggagggccagattacctactacaacagatacaagagacagaacgtagtcaaggacctgtccgtcgagctggatagactgagcgaagaatctgtgaacaacgacatctcctcctggacaaagggcagaagcggagaagctctgagcctcctgaagaaaagattctcccatagacccgtgcaggagaagttcgtgtgcctgaactgcggcttcgagacacacgcagccgagcaagccgccctgaacatcgccagatcctggctgttcctgcggagccaggagtacaagaaataccagacaaacaagacaaccggcaacaccgataagagagccttcgtcgagacctggcagtccttttaccggaagaagcttaaggaggtgtggaaacctgccgtgcggtctggcggatctggcggaggctccacaagcatggccctgaggagcgtgatgttcagcgacgtgagcatcgacttcagccccgaggagtgggagtacctggacctggagcagaaggacctgtacagggacgtgatgctggagaactacagcaacctggtgagcctgggctgcttcatcagcaagcccgacgtgatcagcctgctggagcagggcaaggagccctggaaggtggtgaggaagggcaggaggcagtaccccgacctggagaccaggaccagccccaagaaaaagagaaaagtctaagctgccttctgcggggcttgccttctggccatgcccttcttctctcccttgcacctgtacctcttggtctttgaataaagcctgagtaggaaggctagcaaaaaaaaaaaaaaaaaaaaaaaaaaaaaaaaaaaaaaaaaaaaaaaaaaaaaaaaaaaaaaaaaaaaaaaaaaaaaaaa

SEQ ID NO: 6293 - RNA, 5797 nt, synthetic construct
  source 1..5797: mol_type = other RNA
aggaaataagagagaaaagaagagtaagaagaaatataagagccaccatggcccctaagaagaagcgtaaagtgagccggatggaacgcctcgtctacgaggtgcggcagaagtgcagaaacatcgaggacatctgcatctcctgcggatctctgaacgtgaccctggagcacccactgttcatcggcggcatgtgccagaactgtaaaaactgttttctggagtgtgcctatcaatacgacgatgacggctaccagagctactgcaccatctgttgcggcggaagagaggtgctgatgtgtggaaataacaactgctgccggtgcttctgcgtggaatgcgtggacctgctggtgggccccggcgccgcccaggccgctattaaggaagatccttggaactgctacatgtgcggccacaagggcacatacggcctgctgagacggagagaggactggcctagcagactgcagatgttcttcgccaataaccacgaccaggagttcgacccccctaaggtgtaccctcccgtccccgccgagaagagaaagcccatccgggtcctgagcctgttcgatggcatcgccaccggtctgctggtgctgaaggacctgggcatccaggtggataggtacattgcctccgaggtgtgcgaggactccatcaccgtgggaatggtgcgtcatcagggcaagatcatgtacgtgggcgacgtgcggagcgtgacacagaagcatatccaggagtggggccctttcgacctggtgatcggcggcagcccttgcaatgacctgagcatcgtgaacccagcccggaagggcctgtacgagggaaccggcagactgttcttcgagttttacagactgctgcacgacgcccggcctaaggaaggcgacgaccggcccttcttttggctgttcgagaatgtggtggccatgggagtcagcgacaagcgggatattagccggttcctggagagcaaccccgtgatgatcgatgccaaggaagtgagcgccgcccaccgggccagatacttctggggcaatctgcctggcatgaacagacccctggccagcaccgtgaacgacaagctggagctgcaggagtgcctggagcacggccggatcgccaagttcagcaaggtgagaaccatcaccacccgaagcaacagcatcaaacaaggcaaggaccagcactttcctgtgttcatgaacgagaaggaggacatcctgtggtgtaccgagatggagagagtgttcgggttcccagtccactacacagatgtcagcaacatgtctagactggccagacagagactgctgggaagaagctggtccgtccctgtgatcagacacctgttcgcccctctgaaggagtacttcgcctgcgtgagcagcggcaacagcaacgccaacagccggggccccagcttctctagcggcctggtgccactgtccctgagagggagccacatgggccccatggagatctacaaaaccgtgagcgcctggaagcggcagcctgtgcgcgtgctgagcctgtttcggaatatcgataaagtcctgaaaagcctgggattcctggagagcggctctggctccggcggtggcaccctgaagtacgtggaggatgtgacaaacgtggtcagacgggatgtggagaagtggggccccttcgatctggtgtacggcagcacccaacccctgggcagctcttgtgaccggtgccctggctggtacatgtttcagttccaccggatcctgcagtacgccctgccgagacaggagtcccagcggccattcttttggattttcatggacaacttgctgctgaccgaggatgaccaggaaactaccactcggttcctgcagaccgaagccgtgaccctgcaggacgtgagaggccgggactaccagaacgccatgcgggtgtggtccaacatccctggactgaaaagcaagcacgcacctctgacccctaaagaagaggagtacctgcaggcccaggtgcggagcagaagcaagctggacgcccctaaggtggatctgctggtgaagaattgcctcctgcccctgagagagtacttcaagtatttcagccagaatagtctgcccctgggcggcccaagcagcggcgcccctcctcccagcggcggcagcccagccggctccccaacctctaccgaggagggcacctctgagtccgccacccccgagagcggccctggcacctccaccgagcccagcgagggcagcgcacccggcagccctgccggcagccccacctccacagaggagggaaccagcaccgagcccagcgaaggcagcgccccaggcaccagcaccgagcctagtgagggcggctctggcggcggcagcgcccaggagattaaacggatcaacaagatcagaagaagacttgtgaaagacagcaacaccaagaaggccggcaagacaggccccatgaaaaccctgctggttagagtgatgacacccgatctgagagagcggctggaaaacctgagaaagaagcctgaaaatatcccccagcccatcagcaatacatctagagccaacctgaataagctgctgaccgattacaccgaaatgaagaaggcgatcctgcatgtgtactgggaagagttccagaaggaccctgtgggcctgatgagccgggtggcccagcctgccagcaagaagatcgatcagaacaagctgaaacctgagatggacgagaagggcaacctgaccaccgccggctttgcctgctctcagtgtggccagcccctgttcgtgtacaagctggagcaggtgtctgagaagggcaaggcttacaccaactacttcggacggtgcaatgtggccgagcacgaaaagctgatcctgctggcccagctgaagcccgagaaggatagcgacgaagccgtgacatatagcctgggaaagtttgggcagagggccctggatttctacagcattcatgtgaccaaggagtccacccaccccgtgaagcccctggcccagatcgccggaaacagatacgcctccggacctgtgggaaaggccctgagcgacgcatgtatgggcacaatcgcctccttcctgtctaagtaccaggacatcatcatcgaacaccagaaggtggtgaagggcaaccagaagagactggagagcctgcgggagctggccggcaaggaaaacctggaataccctagcgtgaccctgccacctcagcctcacaccaaggagggcgttgatgcctacaacgaagtgatcgcccgggtgcgaatgtgggtgaacctgaacctgtggcagaagctgaagctaagcagagatgatgccaagcctctgctgagactgaagggattcccttcctttcctctggtcgagagacaggccaacgaagtggactggtgggacatggtgtgtaacgtgaagaagctgatcaacgagaaaaaggaggatggcaaggtgttttggcagaatctggctggctacaagagacaggaagccctgagaccatacctgagcagcgaggaagatcggaagaagggaaagaaattcgctcggtaccagctgggcgacctgctgctgcacctggaaaagaagcacggcgaggactggggaaaggtgtacgacgaggcctgggagcggattgacaagaaagtggaaggcctgagcaagcacatcaagctggaagaggaacggagaagcgaggacgcccagagcaaggccgccctgaccgactggctgcgggctaaggccagcttcgtgatcgagggcctgaaggaggccgacaaggacgagttctgcagatgcgagctgaagctgcagaagtggtacggggacctgcggggaaagcccttcgccatcgaagccgagaacagcatcctggacatcagcggcttcagcaagcagtacaactgtgccttcatctggcagaaggacggcgtgaagaagctgaacctgtacctgatcatcaactacttcaagggcggcaagctgcggttcaagaagatcaaacctgaagccttcgaagccaacagattctacaccgtgatcaacaaaaagagcggcgagatcgtgcccatggaggtgaacttcaacttcgacgaccccaacctgatcatcctgcctctggcctttggcaagagacagggcagagaattcatctggaacgacctgctgtccctggaaaccggcagcctgaagctggccaacggaagagtgatcgagaagacactgtacaacagaagaacccggcaggatgagcctgccctgttcgtggccctgaccttcgagcggcgggaggtcctggactcctccaatatcaaaccaatgaacctgatcggcgtggcaagaggcgaaaacatccccgccgtgatcgccctgaccgaccccgagggctgcccactgagccggtttaaggatagcctgggaaacccaacccacatcctgagaatcggcgagagctataaggagaagcagcggaccatccaggccaagaaggaggtggagcagcggagagccggcggctacagccggaagtacgccagcaaagccaagaatctggcagacgatatggtgagaaacaccgctagagatctgctgtactacgccgtgacccaggatgccatgctgatcttcgccaacctgagccggggcttcggccggcagggcaagcggaccttcatggccgagagacagtacacacggatggaggactggctgaccgccaagctggcctacgagggcctgagcaagacctacctgtccaagacactggcccagtacacctccaagacatgcagcaactgtgggtttaccatcaccagcgccgactacgacagggtgctggagaagctgaagaagacagcaacaggctggatgaccacaattaacggcaaggagctgaaggtggagggccagattacctactacaacagatacaagagacagaacgtagtcaaggacctgtccgtcgagctggatagactgagcgaagaatctgtgaacaacgacatctcctcctggacaaagggcagaagcggagaagctctgagcctcctgaagaaaagattctcccatagacccgtgcaggagaagttcgtgtgcctgaactgcggcttcgagacacacgcagccgagcaagccgccctgaacatcgccagatcctggctgttcctgcggagccaggagtacaagaaataccagacaaacaagacaaccggcaacaccgataagagagccttcgtcgagacctggcagtccttttaccggaagaagcttaaggaggtgtggaaacctgccgtgcggtctggcggatctggcggaggctccacaagcttccagggcagcgtgagcttcaaggacgtgaccgtgggcttcagccaggaggagtggcagcacctggaccccagccagagggccctgtacagggacgtgatgctggagaactacagcaacctggtgagcgtgggctactgcgtgcacaagcccgaggtgatcttcaggctggagcagggcgaggagccctggaggctggaggaggagttccccagccagagcttccccgaggtgtggaccgccaccagccccaagaaaaagagaaaagtctaagctgccttctgcggggcttgccttctggccatgcccttcttctctcccttgcacctgtacctcttggtctttgaataaagcctgagtaggaaggctagcaaaaaaaaaaaaaaaaaaaaaaaaaaaaaaaaaaaaaaaaaaaaaaaaaaaaaaaaaaaaaaaaaaaaaaaaaaaaaaaa

SEQ ID NO: 6294 - RNA, 5797 nt, synthetic construct
  source 1..5797: mol_type = other RNA
aggaaataagagagaaaagaagagtaagaagaaatataagagccaccatggcccctaagaagaagcgtaaagtgagccggatggaacgcctcgtctacgaggtgcggcagaagtgcagaaacatcgaggacatctgcatctcctgcggatctctgaacgtgaccctggagcacccactgttcatcggcggcatgtgccagaactgtaaaaactgttttctggagtgtgcctatcaatacgacgatgacggctaccagagctactgcaccatctgttgcggcggaagagaggtgctgatgtgtggaaataacaactgctgccggtgcttctgcgtggaatgcgtggacctgctggtgggccccggcgccgcccaggccgctattaaggaagatccttggaactgctacatgtgcggccacaagggcacatacggcctgctgagacggagagaggactggcctagcagactgcagatgttcttcgccaataaccacgaccaggagttcgacccccctaaggtgtaccctcccgtccccgccgagaagagaaagcccatccgggtcctgagcctgttcgatggcatcgccaccggtctgctggtgctgaaggacctgggcatccaggtggataggtacattgcctccgaggtgtgcgaggactccatcaccgtgggaatggtgcgtcatcagggcaagatcatgtacgtgggcgacgtgcggagcgtgacacagaagcatatccaggagtggggccctttcgacctggtgatcggcggcagcccttgcaatgacctgagcatcgtgaacccagcccggaagggcctgtacgagggaaccggcagactgttcttcgagttttacagactgctgcacgacgcccggcctaaggaaggcgacgaccggcccttcttttggctgttcgagaatgtggtggccatgggagtcagcgacaagcgggatattagccggttcctggagagcaaccccgtgatgatcgatgccaaggaagtgagcgccgcccaccgggccagatacttctggggcaatctgcctggcatgaacagacccctggccagcaccgtgaacgacaagctggagctgcaggagtgcctggagcacggccggatcgccaagttcagcaaggtgagaaccatcaccacccgaagcaacagcatcaaacaaggcaaggaccagcactttcctgtgttcatgaacgagaaggaggacatcctgtggtgtaccgagatggagagagtgttcgggttcccagtccactacacagatgtcagcaacatgtctagactggccagacagagactgctgggaagaagctggtccgtccctgtgatcagacacctgttcgcccctctgaaggagtacttcgcctgcgtgagcagcggcaacagcaacgccaacagccggggccccagcttctctagcggcctggtgccactgtccctgagagggagccacatgggccccatggagatctacaaaaccgtgagcgcctggaagcggcagcctgtgcgcgtgctgagcctgtttcggaatatcgataaagtcctgaaaagcctgggattcctggagagcggctctggctccggcggtggcaccctgaagtacgtggaggatgtgacaaacgtggtcagacgggatgtggagaagtggggccccttcgatctggtgtacggcagcacccaacccctgggcagctcttgtgaccggtgccctggctggtacatgtttcagttccaccggatcctgcagtacgccctgccgagacaggagtcccagcggccattcttttggattttcatggacaacttgctgctgaccgaggatgaccaggaaactaccactcggttcctgcagaccgaagccgtgaccctgcaggacgtgagaggccgggactaccagaacgccatgcgggtgtggtccaacatccctggactgaaaagcaagcacgcacctctgacccctaaagaagaggagtacctgcaggcccaggtgcggagcagaagcaagctggacgcccctaaggtggatctgctggtgaagaattgcctcctgcccctgagagagtacttcaagtatttcagccagaatagtctgcccctgggcggcccaagcagcggcgcccctcctcccagcggcggcagcccagccggctccccaacctctaccgaggagggcacctctgagtccgccacccccgagagcggccctggcacctccaccgagcccagcgagggcagcgcacccggcagccctgccggcagccccacctccacagaggagggaaccagcaccgagcccagcgaaggcagcgccccaggcaccagcaccgagcctagtgagggcggctctggcggcggcagcgcccaggagattaaacggatcaacaagatcagaagaagacttgtgaaagacagcaacaccaagaaggccggcaagacaggccccatgaaaaccctgctggttagagtgatgacacccgatctgagagagcggctggaaaacctgagaaagaagcctgaaaatatcccccagcccatcagcaatacatctagagccaacctgaataagctgctgaccgattacaccgaaatgaagaaggcgatcctgcatgtgtactgggaagagttccagaaggaccctgtgggcctgatgagccgggtggcccagcctgccagcaagaagatcgatcagaacaagctgaaacctgagatggacgagaagggcaacctgaccaccgccggctttgcctgctctcagtgtggccagcccctgttcgtgtacaagctggagcaggtgtctgagaagggcaaggcttacaccaactacttcggacggtgcaatgtggccgagcacgaaaagctgatcctgctggcccagctgaagcccgagaaggatagcgacgaagccgtgacatatagcctgggaaagtttgggcagagggccctggatttctacagcattcatgtgaccaaggagtccacccaccccgtgaagcccctggcccagatcgccggaaacagatacgcctccggacctgtgggaaaggccctgagcgacgcatgtatgggcacaatcgcctccttcctgtctaagtaccaggacatcatcatcgaacaccagaaggtggtgaagggcaaccagaagagactggagagcctgcgggagctggccggcaaggaaaacctggaataccctagcgtgaccctgccacctcagcctcacaccaaggagggcgttgatgcctacaacgaagtgatcgcccgggtgcgaatgtgggtgaacctgaacctgtggcagaagctgaagctaagcagagatgatgccaagcctctgctgagactgaagggattcccttcctttcctctggtcgagagacaggccaacgaagtggactggtgggacatggtgtgtaacgtgaagaagctgatcaacgagaaaaaggaggatggcaaggtgttttggcagaatctggctggctacaagagacaggaagccctgagaccatacctgagcagcgaggaagatcggaagaagggaaagaaattcgctcggtaccagctgggcgacctgctgctgcacctggaaaagaagcacggcgaggactggggaaaggtgtacgacgaggcctgggagcggattgacaagaaagtggaaggcctgagcaagcacatcaagctggaagaggaacggagaagcgaggacgcccagagcaaggccgccctgaccgactggctgcgggctaaggccagcttcgtgatcgagggcctgaaggaggccgacaaggacgagttctgcagatgcgagctgaagctgcagaagtggtacggggacctgcggggaaagcccttcgccatcgaagccgagaacagcatcctggacatcagcggcttcagcaagcagtacaactgtgccttcatctggcagaaggacggcgtgaagaagctgaacctgtacctgatcatcaactacttcaagggcggcaagctgcggttcaagaagatcaaacctgaagccttcgaagccaacagattctacaccgtgatcaacaaaaagagcggcgagatcgtgcccatggaggtgaacttcaacttcgacgaccccaacctgatcatcctgcctctggcctttggcaagagacagggcagagaattcatctggaacgacctgctgtccctggaaaccggcagcctgaagctggccaacggaagagtgatcgagaagacactgtacaacagaagaacccggcaggatgagcctgccctgttcgtggccctgaccttcgagcggcgggaggtcctggactcctccaatatcaaaccaatgaacctgatcggcgtggcaagaggcgaaaacatccccgccgtgatcgccctgaccgaccccgagggctgcccactgagccggtttaaggatagcctgggaaacccaacccacatcctgagaatcggcgagagctataaggagaagcagcggaccatccaggccaagaaggaggtggagcagcggagagccggcggctacagccggaagtacgccagcaaagccaagaatctggcagacgatatggtgagaaacaccgctagagatctgctgtactacgccgtgacccaggatgccatgctgatcttcgccaacctgagccggggcttcggccggcagggcaagcggaccttcatggccgagagacagtacacacggatggaggactggctgaccgccaagctggcctacgagggcctgagcaagacctacctgtccaagacactggcccagtacacctccaagacatgcagcaactgtgggtttaccatcaccagcgccgactacgacagggtgctggagaagctgaagaagacagcaacaggctggatgaccacaattaacggcaaggagctgaaggtggagggccagattacctactacaacagatacaagagacagaacgtagtcaaggacctgtccgtcgagctggatagactgagcgaagaatctgtgaacaacgacatctcctcctggacaaagggcagaagcggagaagctctgagcctcctgaagaaaagattctcccatagacccgtgcaggagaagttcgtgtgcctgaactgcggcttcgagacacacgcagccgagcaagccgccctgaacatcgccagatcctggctgttcctgcggagccaggagtacaagaaataccagacaaacaagacaaccggcaacaccgataagagagccttcgtcgagacctggcagtccttttaccggaagaagcttaaggaggtgtggaaacctgccgtgcggtctggcggatctggcggaggctccacaagcctgcaggaggccgtgaccttcaaggacgtggccgtggtgttcagcgaggaggagctgggcctgctggacagcgcccagaggaccctgtacagggacgtgatgctggagaccttccagaacctggtgagcctgggccaccagcccttcaagcccgacgtgatcagccagctggagagggaggagatgctgtggatgaagggcctgcagaccggcaggggcaggtgcagcggcggcaggaaccagaccagccccaagaaaaagagaaaagtctaagctgccttctgcggggcttgccttctggccatgcccttcttctctcccttgcacctgtacctcttggtctttgaataaagcctgagtaggaaggctagcaaaaaaaaaaaaaaaaaaaaaaaaaaaaaaaaaaaaaaaaaaaaaaaaaaaaaaaaaaaaaaaaaaaaaaaaaaaaaaaa

SEQ ID NO: 6295 - RNA, 5797 nt, synthetic construct
  source 1..5797: mol_type = other RNA
aggaaataagagagaaaagaagagtaagaagaaatataagagccaccatggcccctaagaagaagcgtaaagtgagccggatggaacgcctcgtctacgaggtgcggcagaagtgcagaaacatcgaggacatctgcatctcctgcggatctctgaacgtgaccctggagcacccactgttcatcggcggcatgtgccagaactgtaaaaactgttttctggagtgtgcctatcaatacgacgatgacggctaccagagctactgcaccatctgttgcggcggaagagaggtgctgatgtgtggaaataacaactgctgccggtgcttctgcgtggaatgcgtggacctgctggtgggccccggcgccgcccaggccgctattaaggaagatccttggaactgctacatgtgcggccacaagggcacatacggcctgctgagacggagagaggactggcctagcagactgcagatgttcttcgccaataaccacgaccaggagttcgacccccctaaggtgtaccctcccgtccccgccgagaagagaaagcccatccgggtcctgagcctgttcgatggcatcgccaccggtctgctggtgctgaaggacctgggcatccaggtggataggtacattgcctccgaggtgtgcgaggactccatcaccgtgggaatggtgcgtcatcagggcaagatcatgtacgtgggcgacgtgcggagcgtgacacagaagcatatccaggagtggggccctttcgacctggtgatcggcggcagcccttgcaatgacctgagcatcgtgaacccagcccggaagggcctgtacgagggaaccggcagactgttcttcgagttttacagactgctgcacgacgcccggcctaaggaaggcgacgaccggcccttcttttggctgttcgagaatgtggtggccatgggagtcagcgacaagcgggatattagccggttcctggagagcaaccccgtgatgatcgatgccaaggaagtgagcgccgcccaccgggccagatacttctggggcaatctgcctggcatgaacagacccctggccagcaccgtgaacgacaagctggagctgcaggagtgcctggagcacggccggatcgccaagttcagcaaggtgagaaccatcaccacccgaagcaacagcatcaaacaaggcaaggaccagcactttcctgtgttcatgaacgagaaggaggacatcctgtggtgtaccgagatggagagagtgttcgggttcccagtccactacacagatgtcagcaacatgtctagactggccagacagagactgctgggaagaagctggtccgtccctgtgatcagacacctgttcgcccctctgaaggagtacttcgcctgcgtgagcagcggcaacagcaacgccaacagccggggccccagcttctctagcggcctggtgccactgtccctgagagggagccacatgggccccatggagatctacaaaaccgtgagcgcctggaagcggcagcctgtgcgcgtgctgagcctgtttcggaatatcgataaagtcctgaaaagcctgggattcctggagagcggctctggctccggcggtggcaccctgaagtacgtggaggatgtgacaaacgtggtcagacgggatgtggagaagtggggccccttcgatctggtgtacggcagcacccaacccctgggcagctcttgtgaccggtgccctggctggtacatgtttcagttccaccggatcctgcagtacgccctgccgagacaggagtcccagcggccattcttttggattttcatggacaacttgctgctgaccgaggatgaccaggaaactaccactcggttcctgcagaccgaagccgtgaccctgcaggacgtgagaggccgggactaccagaacgccatgcgggtgtggtccaacatccctggactgaaaagcaagcacgcacctctgacccctaaagaagaggagtacctgcaggcccaggtgcggagcagaagcaagctggacgcccctaaggtggatctgctggtgaagaattgcctcctgcccctgagagagtacttcaagtatttcagccagaatagtctgcccctgggcggcccaagcagcggcgcccctcctcccagcggcggcagcccagccggctccccaacctctaccgaggagggcacctctgagtccgccacccccgagagcggccctggcacctccaccgagcccagcgagggcagcgcacccggcagccctgccggcagccccacctccacagaggagggaaccagcaccgagcccagcgaaggcagcgccccaggcaccagcaccgagcctagtgagggcggctctggcggcggcagcgcccaggagattaaacggatcaacaagatcagaagaagacttgtgaaagacagcaacaccaagaaggccggcaagacaggccccatgaaaaccctgctggttagagtgatgacacccgatctgagagagcggctggaaaacctgagaaagaagcctgaaaatatcccccagcccatcagcaatacatctagagccaacctgaataagctgctgaccgattacaccgaaatgaagaaggcgatcctgcatgtgtactgggaagagttccagaaggaccctgtgggcctgatgagccgggtggcccagcctgccagcaagaagatcgatcagaacaagctgaaacctgagatggacgagaagggcaacctgaccaccgccggctttgcctgctctcagtgtggccagcccctgttcgtgtacaagctggagcaggtgtctgagaagggcaaggcttacaccaactacttcggacggtgcaatgtggccgagcacgaaaagctgatcctgctggcccagctgaagcccgagaaggatagcgacgaagccgtgacatatagcctgggaaagtttgggcagagggccctggatttctacagcattcatgtgaccaaggagtccacccaccccgtgaagcccctggcccagatcgccggaaacagatacgcctccggacctgtgggaaaggccctgagcgacgcatgtatgggcacaatcgcctccttcctgtctaagtaccaggacatcatcatcgaacaccagaaggtggtgaagggcaaccagaagagactggagagcctgcgggagctggccggcaaggaaaacctggaataccctagcgtgaccctgccacctcagcctcacaccaaggagggcgttgatgcctacaacgaagtgatcgcccgggtgcgaatgtgggtgaacctgaacctgtggcagaagctgaagctaagcagagatgatgccaagcctctgctgagactgaagggattcccttcctttcctctggtcgagagacaggccaacgaagtggactggtgggacatggtgtgtaacgtgaagaagctgatcaacgagaaaaaggaggatggcaaggtgttttggcagaatctggctggctacaagagacaggaagccctgagaccatacctgagcagcgaggaagatcggaagaagggaaagaaattcgctcggtaccagctgggcgacctgctgctgcacctggaaaagaagcacggcgaggactggggaaaggtgtacgacgaggcctgggagcggattgacaagaaagtggaaggcctgagcaagcacatcaagctggaagaggaacggagaagcgaggacgcccagagcaaggccgccctgaccgactggctgcgggctaaggccagcttcgtgatcgagggcctgaaggaggccgacaaggacgagttctgcagatgcgagctgaagctgcagaagtggtacggggacctgcggggaaagcccttcgccatcgaagccgagaacagcatcctggacatcagcggcttcagcaagcagtacaactgtgccttcatctggcagaaggacggcgtgaagaagctgaacctgtacctgatcatcaactacttcaagggcggcaagctgcggttcaagaagatcaaacctgaagccttcgaagccaacagattctacaccgtgatcaacaaaaagagcggcgagatcgtgcccatggaggtgaacttcaacttcgacgaccccaacctgatcatcctgcctctggcctttggcaagagacagggcagagaattcatctggaacgacctgctgtccctggaaaccggcagcctgaagctggccaacggaagagtgatcgagaagacactgtacaacagaagaacccggcaggatgagcctgccctgttcgtggccctgaccttcgagcggcgggaggtcctggactcctccaatatcaaaccaatgaacctgatcggcgtggcaagaggcgaaaacatccccgccgtgatcgccctgaccgaccccgagggctgcccactgagccggtttaaggatagcctgggaaacccaacccacatcctgagaatcggcgagagctataaggagaagcagcggaccatccaggccaagaaggaggtggagcagcggagagccggcggctacagccggaagtacgccagcaaagccaagaatctggcagacgatatggtgagaaacaccgctagagatctgctgtactacgccgtgacccaggatgccatgctgatcttcgccaacctgagccggggcttcggccggcagggcaagcggaccttcatggccgagagacagtacacacggatggaggactggctgaccgccaagctggcctacgagggcctgagcaagacctacctgtccaagacactggcccagtacacctccaagacatgcagcaactgtgggtttaccatcaccagcgccgactacgacagggtgctggagaagctgaagaagacagcaacaggctggatgaccacaattaacggcaaggagctgaaggtggagggccagattacctactacaacagatacaagagacagaacgtagtcaaggacctgtccgtcgagctggatagactgagcgaagaatctgtgaacaacgacatctcctcctggacaaagggcagaagcggagaagctctgagcctcctgaagaaaagattctcccatagacccgtgcaggagaagttcgtgtgcctgaactgcggcttcgagacacacgcagccgagcaagccgccctgaacatcgccagatcctggctgttcctgcggagccaggagtacaagaaataccagacaaacaagacaaccggcaacaccgataagagagccttcgtcgagacctggcagtccttttaccggaagaagcttaaggaggtgtggaaacctgccgtgcggtctggcggatctggcggaggctccacaagcgcccaggtgctggtgaccttccaggacgtggccgtggacttcacccaggaggagtggaggctgctggaccccggccagaaggagctgtacaaggaggtgatgctggacaacgcccagaacatgctgttcctgggcctgcccgtgcccagggaggactggttcagccacttccacgagggcggcgccagctggatgctggagggcgaggaccccagcaacagcggcctggacggcgagaggaggaccagccccaagaaaaagagaaaagtctaagctgccttctgcggggcttgccttctggccatgcccttcttctctcccttgcacctgtacctcttggtctttgaataaagcctgagtaggaaggctagcaaaaaaaaaaaaaaaaaaaaaaaaaaaaaaaaaaaaaaaaaaaaaaaaaaaaaaaaaaaaaaaaaaaaaaaaaaaaaaaa

SEQ ID NO: 6296 - RNA, 5797 nt, synthetic construct
  source 1..5797: mol_type = other RNA
aggaaataagagagaaaagaagagtaagaagaaatataagagccaccatggcccctaagaagaagcgtaaagtgagccggatggaacgcctcgtctacgaggtgcggcagaagtgcagaaacatcgaggacatctgcatctcctgcggatctctgaacgtgaccctggagcacccactgttcatcggcggcatgtgccagaactgtaaaaactgttttctggagtgtgcctatcaatacgacgatgacggctaccagagctactgcaccatctgttgcggcggaagagaggtgctgatgtgtggaaataacaactgctgccggtgcttctgcgtggaatgcgtggacctgctggtgggccccggcgccgcccaggccgctattaaggaagatccttggaactgctacatgtgcggccacaagggcacatacggcctgctgagacggagagaggactggcctagcagactgcagatgttcttcgccaataaccacgaccaggagttcgacccccctaaggtgtaccctcccgtccccgccgagaagagaaagcccatccgggtcctgagcctgttcgatggcatcgccaccggtctgctggtgctgaaggacctgggcatccaggtggataggtacattgcctccgaggtgtgcgaggactccatcaccgtgggaatggtgcgtcatcagggcaagatcatgtacgtgggcgacgtgcggagcgtgacacagaagcatatccaggagtggggccctttcgacctggtgatcggcggcagcccttgcaatgacctgagcatcgtgaacccagcccggaagggcctgtacgagggaaccggcagactgttcttcgagttttacagactgctgcacgacgcccggcctaaggaaggcgacgaccggcccttcttttggctgttcgagaatgtggtggccatgggagtcagcgacaagcgggatattagccggttcctggagagcaaccccgtgatgatcgatgccaaggaagtgagcgccgcccaccgggccagatacttctggggcaatctgcctggcatgaacagacccctggccagcaccgtgaacgacaagctggagctgcaggagtgcctggagcacggccggatcgccaagttcagcaaggtgagaaccatcaccacccgaagcaacagcatcaaacaaggcaaggaccagcactttcctgtgttcatgaacgagaaggaggacatcctgtggtgtaccgagatggagagagtgttcgggttcccagtccactacacagatgtcagcaacatgtctagactggccagacagagactgctgggaagaagctggtccgtccctgtgatcagacacctgttcgcccctctgaaggagtacttcgcctgcgtgagcagcggcaacagcaacgccaacagccggggccccagcttctctagcggcctggtgccactgtccctgagagggagccacatgggccccatggagatctacaaaaccgtgagcgcctggaagcggcagcctgtgcgcgtgctgagcctgtttcggaatatcgataaagtcctgaaaagcctgggattcctggagagcggctctggctccggcggtggcaccctgaagtacgtggaggatgtgacaaacgtggtcagacgggatgtggagaagtggggccccttcgatctggtgtacggcagcacccaacccctgggcagctcttgtgaccggtgccctggctggtacatgtttcagttccaccggatcctgcagtacgccctgccgagacaggagtcccagcggccattcttttggattttcatggacaacttgctgctgaccgaggatgaccaggaaactaccactcggttcctgcagaccgaagccgtgaccctgcaggacgtgagaggccgggactaccagaacgccatgcgggtgtggtccaacatccctggactgaaaagcaagcacgcacctctgacccctaaagaagaggagtacctgcaggcccaggtgcggagcagaagcaagctggacgcccctaaggtggatctgctggtgaagaattgcctcctgcccctgagagagtacttcaagtatttcagccagaatagtctgcccctgggcggcccaagcagcggcgcccctcctcccagcggcggcagcccagccggctccccaacctctaccgaggagggcacctctgagtccgccacccccgagagcggccctggcacctccaccgagcccagcgagggcagcgcacccggcagccctgccggcagccccacctccacagaggagggaaccagcaccgagcccagcgaaggcagcgccccaggcaccagcaccgagcctagtgagggcggctctggcggcggcagcgcccaggagattaaacggatcaacaagatcagaagaagacttgtgaaagacagcaacaccaagaaggccggcaagacaggccccatgaaaaccctgctggttagagtgatgacacccgatctgagagagcggctggaaaacctgagaaagaagcctgaaaatatcccccagcccatcagcaatacatctagagccaacctgaataagctgctgaccgattacaccgaaatgaagaaggcgatcctgcatgtgtactgggaagagttccagaaggaccctgtgggcctgatgagccgggtggcccagcctgccagcaagaagatcgatcagaacaagctgaaacctgagatggacgagaagggcaacctgaccaccgccggctttgcctgctctcagtgtggccagcccctgttcgtgtacaagctggagcaggtgtctgagaagggcaaggcttacaccaactacttcggacggtgcaatgtggccgagcacgaaaagctgatcctgctggcccagctgaagcccgagaaggatagcgacgaagccgtgacatatagcctgggaaagtttgggcagagggccctggatttctacagcattcatgtgaccaaggagtccacccaccccgtgaagcccctggcccagatcgccggaaacagatacgcctccggacctgtgggaaaggccctgagcgacgcatgtatgggcacaatcgcctccttcctgtctaagtaccaggacatcatcatcgaacaccagaaggtggtgaagggcaaccagaagagactggagagcctgcgggagctggccggcaaggaaaacctggaataccctagcgtgaccctgccacctcagcctcacaccaaggagggcgttgatgcctacaacgaagtgatcgcccgggtgcgaatgtgggtgaacctgaacctgtggcagaagctgaagctaagcagagatgatgccaagcctctgctgagactgaagggattcccttcctttcctctggtcgagagacaggccaacgaagtggactggtgggacatggtgtgtaacgtgaagaagctgatcaacgagaaaaaggaggatggcaaggtgttttggcagaatctggctggctacaagagacaggaagccctgagaccatacctgagcagcgaggaagatcggaagaagggaaagaaattcgctcggtaccagctgggcgacctgctgctgcacctggaaaagaagcacggcgaggactggggaaaggtgtacgacgaggcctgggagcggattgacaagaaagtggaaggcctgagcaagcacatcaagctggaagaggaacggagaagcgaggacgcccagagcaaggccgccctgaccgactggctgcgggctaaggccagcttcgtgatcgagggcctgaaggaggccgacaaggacgagttctgcagatgcgagctgaagctgcagaagtggtacggggacctgcggggaaagcccttcgccatcgaagccgagaacagcatcctggacatcagcggcttcagcaagcagtacaactgtgccttcatctggcagaaggacggcgtgaagaagctgaacctgtacctgatcatcaactacttcaagggcggcaagctgcggttcaagaagatcaaacctgaagccttcgaagccaacagattctacaccgtgatcaacaaaaagagcggcgagatcgtgcccatggaggtgaacttcaacttcgacgaccccaacctgatcatcctgcctctggcctttggcaagagacagggcagagaattcatctggaacgacctgctgtccctggaaaccggcagcctgaagctggccaacggaagagtgatcgagaagacactgtacaacagaagaacccggcaggatgagcctgccctgttcgtggccctgaccttcgagcggcgggaggtcctggactcctccaatatcaaaccaatgaacctgatcggcgtggcaagaggcgaaaacatccccgccgtgatcgccctgaccgaccccgagggctgcccactgagccggtttaaggatagcctgggaaacccaacccacatcctgagaatcggcgagagctataaggagaagcagcggaccatccaggccaagaaggaggtggagcagcggagagccggcggctacagccggaagtacgccagcaaagccaagaatctggcagacgatatggtgagaaacaccgctagagatctgctgtactacgccgtgacccaggatgccatgctgatcttcgccaacctgagccggggcttcggccggcagggcaagcggaccttcatggccgagagacagtacacacggatggaggactggctgaccgccaagctggcctacgagggcctgagcaagacctacctgtccaagacactggcccagtacacctccaagacatgcagcaactgtgggtttaccatcaccagcgccgactacgacagggtgctggagaagctgaagaagacagcaacaggctggatgaccacaattaacggcaaggagctgaaggtggagggccagattacctactacaacagatacaagagacagaacgtagtcaaggacctgtccgtcgagctggatagactgagcgaagaatctgtgaacaacgacatctcctcctggacaaagggcagaagcggagaagctctgagcctcctgaagaaaagattctcccatagacccgtgcaggagaagttcgtgtgcctgaactgcggcttcgagacacacgcagccgagcaagccgccctgaacatcgccagatcctggctgttcctgcggagccaggagtacaagaaataccagacaaacaagacaaccggcaacaccgataagagagccttcgtcgagacctggcagtccttttaccggaagaagcttaaggaggtgtggaaacctgccgtgcggtctggcggatctggcggaggctccacaagcccccaggtgctggtgagcttcgaggacgtggccgtgttcctgagcagggaggagtggggctgcctgggccccgcccagaggggcctgtacagggacgtgatgctggagacctacaggaacctgatcagcctgggcttccaggacagcaagcccgacgtgatcagcaagctggagaagggcgaggagccctgggccccctacagccccaggatcgaggagggctggatctggagccacggcagcaccagccccaagaaaaagagaaaagtctaagctgccttctgcggggcttgccttctggccatgcccttcttctctcccttgcacctgtacctcttggtctttgaataaagcctgagtaggaaggctagcaaaaaaaaaaaaaaaaaaaaaaaaaaaaaaaaaaaaaaaaaaaaaaaaaaaaaaaaaaaaaaaaaaaaaaaaaaaaaaaa

SEQ ID NO: 6297 - RNA, 5797 nt, synthetic construct
  source 1..5797: mol_type = other RNA
aggaaataagagagaaaagaagagtaagaagaaatataagagccaccatggcccctaagaagaagcgtaaagtgagccggatggaacgcctcgtctacgaggtgcggcagaagtgcagaaacatcgaggacatctgcatctcctgcggatctctgaacgtgaccctggagcacccactgttcatcggcggcatgtgccagaactgtaaaaactgttttctggagtgtgcctatcaatacgacgatgacggctaccagagctactgcaccatctgttgcggcggaagagaggtgctgatgtgtggaaataacaactgctgccggtgcttctgcgtggaatgcgtggacctgctggtgggccccggcgccgcccaggccgctattaaggaagatccttggaactgctacatgtgcggccacaagggcacatacggcctgctgagacggagagaggactggcctagcagactgcagatgttcttcgccaataaccacgaccaggagttcgacccccctaaggtgtaccctcccgtccccgccgagaagagaaagcccatccgggtcctgagcctgttcgatggcatcgccaccggtctgctggtgctgaaggacctgggcatccaggtggataggtacattgcctccgaggtgtgcgaggactccatcaccgtgggaatggtgcgtcatcagggcaagatcatgtacgtgggcgacgtgcggagcgtgacacagaagcatatccaggagtggggccctttcgacctggtgatcggcggcagcccttgcaatgacctgagcatcgtgaacccagcccggaagggcctgtacgagggaaccggcagactgttcttcgagttttacagactgctgcacgacgcccggcctaaggaaggcgacgaccggcccttcttttggctgttcgagaatgtggtggccatgggagtcagcgacaagcgggatattagccggttcctggagagcaaccccgtgatgatcgatgccaaggaagtgagcgccgcccaccgggccagatacttctggggcaatctgcctggcatgaacagacccctggccagcaccgtgaacgacaagctggagctgcaggagtgcctggagcacggccggatcgccaagttcagcaaggtgagaaccatcaccacccgaagcaacagcatcaaacaaggcaaggaccagcactttcctgtgttcatgaacgagaaggaggacatcctgtggtgtaccgagatggagagagtgttcgggttcccagtccactacacagatgtcagcaacatgtctagactggccagacagagactgctgggaagaagctggtccgtccctgtgatcagacacctgttcgcccctctgaaggagtacttcgcctgcgtgagcagcggcaacagcaacgccaacagccggggccccagcttctctagcggcctggtgccactgtccctgagagggagccacatgggccccatggagatctacaaaaccgtgagcgcctggaagcggcagcctgtgcgcgtgctgagcctgtttcggaatatcgataaagtcctgaaaagcctgggattcctggagagcggctctggctccggcggtggcaccctgaagtacgtggaggatgtgacaaacgtggtcagacgggatgtggagaagtggggccccttcgatctggtgtacggcagcacccaacccctgggcagctcttgtgaccggtgccctggctggtacatgtttcagttccaccggatcctgcagtacgccctgccgagacaggagtcccagcggccattcttttggattttcatggacaacttgctgctgaccgaggatgaccaggaaactaccactcggttcctgcagaccgaagccgtgaccctgcaggacgtgagaggccgggactaccagaacgccatgcgggtgtggtccaacatccctggactgaaaagcaagcacgcacctctgacccctaaagaagaggagtacctgcaggcccaggtgcggagcagaagcaagctggacgcccctaaggtggatctgctggtgaagaattgcctcctgcccctgagagagtacttcaagtatttcagccagaatagtctgcccctgggcggcccaagcagcggcgcccctcctcccagcggcggcagcccagccggctccccaacctctaccgaggagggcacctctgagtccgccacccccgagagcggccctggcacctccaccgagcccagcgagggcagcgcacccggcagccctgccggcagccccacctccacagaggagggaaccagcaccgagcccagcgaaggcagcgccccaggcaccagcaccgagcctagtgagggcggctctggcggcggcagcgcccaggagattaaacggatcaacaagatcagaagaagacttgtgaaagacagcaacaccaagaaggccggcaagacaggccccatgaaaaccctgctggttagagtgatgacacccgatctgagagagcggctggaaaacctgagaaagaagcctgaaaatatcccccagcccatcagcaatacatctagagccaacctgaataagctgctgaccgattacaccgaaatgaagaaggcgatcctgcatgtgtactgggaagagttccagaaggaccctgtgggcctgatgagccgggtggcccagcctgccagcaagaagatcgatcagaacaagctgaaacctgagatggacgagaagggcaacctgaccaccgccggctttgcctgctctcagtgtggccagcccctgttcgtgtacaagctggagcaggtgtctgagaagggcaaggcttacaccaactacttcggacggtgcaatgtggccgagcacgaaaagctgatcctgctggcccagctgaagcccgagaaggatagcgacgaagccgtgacatatagcctgggaaagtttgggcagagggccctggatttctacagcattcatgtgaccaaggagtccacccaccccgtgaagcccctggcccagatcgccggaaacagatacgcctccggacctgtgggaaaggccctgagcgacgcatgtatgggcacaatcgcctccttcctgtctaagtaccaggacatcatcatcgaacaccagaaggtggtgaagggcaaccagaagagactggagagcctgcgggagctggccggcaaggaaaacctggaataccctagcgtgaccctgccacctcagcctcacaccaaggagggcgttgatgcctacaacgaagtgatcgcccgggtgcgaatgtgggtgaacctgaacctgtggcagaagctgaagctaagcagagatgatgccaagcctctgctgagactgaagggattcccttcctttcctctggtcgagagacaggccaacgaagtggactggtgggacatggtgtgtaacgtgaagaagctgatcaacgagaaaaaggaggatggcaaggtgttttggcagaatctggctggctacaagagacaggaagccctgagaccatacctgagcagcgaggaagatcggaagaagggaaagaaattcgctcggtaccagctgggcgacctgctgctgcacctggaaaagaagcacggcgaggactggggaaaggtgtacgacgaggcctgggagcggattgacaagaaagtggaaggcctgagcaagcacatcaagctggaagaggaacggagaagcgaggacgcccagagcaaggccgccctgaccgactggctgcgggctaaggccagcttcgtgatcgagggcctgaaggaggccgacaaggacgagttctgcagatgcgagctgaagctgcagaagtggtacggggacctgcggggaaagcccttcgccatcgaagccgagaacagcatcctggacatcagcggcttcagcaagcagtacaactgtgccttcatctggcagaaggacggcgtgaagaagctgaacctgtacctgatcatcaactacttcaagggcggcaagctgcggttcaagaagatcaaacctgaagccttcgaagccaacagattctacaccgtgatcaacaaaaagagcggcgagatcgtgcccatggaggtgaacttcaacttcgacgaccccaacctgatcatcctgcctctggcctttggcaagagacagggcagagaattcatctggaacgacctgctgtccctggaaaccggcagcctgaagctggccaacggaagagtgatcgagaagacactgtacaacagaagaacccggcaggatgagcctgccctgttcgtggccctgaccttcgagcggcgggaggtcctggactcctccaatatcaaaccaatgaacctgatcggcgtggcaagaggcgaaaacatccccgccgtgatcgccctgaccgaccccgagggctgcccactgagccggtttaaggatagcctgggaaacccaacccacatcctgagaatcggcgagagctataaggagaagcagcggaccatccaggccaagaaggaggtggagcagcggagagccggcggctacagccggaagtacgccagcaaagccaagaatctggcagacgatatggtgagaaacaccgctagagatctgctgtactacgccgtgacccaggatgccatgctgatcttcgccaacctgagccggggcttcggccggcagggcaagcggaccttcatggccgagagacagtacacacggatggaggactggctgaccgccaagctggcctacgagggcctgagcaagacctacctgtccaagacactggcccagtacacctccaagacatgcagcaactgtgggtttaccatcaccagcgccgactacgacagggtgctggagaagctgaagaagacagcaacaggctggatgaccacaattaacggcaaggagctgaaggtggagggccagattacctactacaacagatacaagagacagaacgtagtcaaggacctgtccgtcgagctggatagactgagcgaagaatctgtgaacaacgacatctcctcctggacaaagggcagaagcggagaagctctgagcctcctgaagaaaagattctcccatagacccgtgcaggagaagttcgtgtgcctgaactgcggcttcgagacacacgcagccgagcaagccgccctgaacatcgccagatcctggctgttcctgcggagccaggagtacaagaaataccagacaaacaagacaaccggcaacaccgataagagagccttcgtcgagacctggcagtccttttaccggaagaagcttaaggaggtgtggaaacctgccgtgcggtctggcggatctggcggaggctccacaagcgcccaggagagcatcaccctggaggacgtggccgtggacttcacctgggaggagtggcagctgctgggcgccgcccagaaggacctgtacagggacgtgatgctggagaactacagcaacctggtggccgtgggctaccaggccagcaagcccgacgccctgttcaagctggagcagggcgagcagccctggaccatcgaggacggcatccacagcggcgcctgcagcgacatctggaaggtgaccagccccaagaaaaagagaaaagtctaagctgccttctgcggggcttgccttctggccatgcccttcttctctcccttgcacctgtacctcttggtctttgaataaagcctgagtaggaaggctagcaaaaaaaaaaaaaaaaaaaaaaaaaaaaaaaaaaaaaaaaaaaaaaaaaaaaaaaaaaaaaaaaaaaaaaaaaaaaaaaa

SEQ ID NO: 6298 - RNA, 5797 nt, synthetic construct
  source 1..5797: mol_type = other RNA
aggaaataagagagaaaagaagagtaagaagaaatataagagccaccatggcccctaagaagaagcgtaaagtgagccggatggaacgcctcgtctacgaggtgcggcagaagtgcagaaacatcgaggacatctgcatctcctgcggatctctgaacgtgaccctggagcacccactgttcatcggcggcatgtgccagaactgtaaaaactgttttctggagtgtgcctatcaatacgacgatgacggctaccagagctactgcaccatctgttgcggcggaagagaggtgctgatgtgtggaaataacaactgctgccggtgcttctgcgtggaatgcgtggacctgctggtgggccccggcgccgcccaggccgctattaaggaagatccttggaactgctacatgtgcggccacaagggcacatacggcctgctgagacggagagaggactggcctagcagactgcagatgttcttcgccaataaccacgaccaggagttcgacccccctaaggtgtaccctcccgtccccgccgagaagagaaagcccatccgggtcctgagcctgttcgatggcatcgccaccggtctgctggtgctgaaggacctgggcatccaggtggataggtacattgcctccgaggtgtgcgaggactccatcaccgtgggaatggtgcgtcatcagggcaagatcatgtacgtgggcgacgtgcggagcgtgacacagaagcatatccaggagtggggccctttcgacctggtgatcggcggcagcccttgcaatgacctgagcatcgtgaacccagcccggaagggcctgtacgagggaaccggcagactgttcttcgagttttacagactgctgcacgacgcccggcctaaggaaggcgacgaccggcccttcttttggctgttcgagaatgtggtggccatgggagtcagcgacaagcgggatattagccggttcctggagagcaaccccgtgatgatcgatgccaaggaagtgagcgccgcccaccgggccagatacttctggggcaatctgcctggcatgaacagacccctggccagcaccgtgaacgacaagctggagctgcaggagtgcctggagcacggccggatcgccaagttcagcaaggtgagaaccatcaccacccgaagcaacagcatcaaacaaggcaaggaccagcactttcctgtgttcatgaacgagaaggaggacatcctgtggtgtaccgagatggagagagtgttcgggttcccagtccactacacagatgtcagcaacatgtctagactggccagacagagactgctgggaagaagctggtccgtccctgtgatcagacacctgttcgcccctctgaaggagtacttcgcctgcgtgagcagcggcaacagcaacgccaacagccggggccccagcttctctagcggcctggtgccactgtccctgagagggagccacatgggccccatggagatctacaaaaccgtgagcgcctggaagcggcagcctgtgcgcgtgctgagcctgtttcggaatatcgataaagtcctgaaaagcctgggattcctggagagcggctctggctccggcggtggcaccctgaagtacgtggaggatgtgacaaacgtggtcagacgggatgtggagaagtggggccccttcgatctggtgtacggcagcacccaacccctgggcagctcttgtgaccggtgccctggctggtacatgtttcagttccaccggatcctgcagtacgccctgccgagacaggagtcccagcggccattcttttggattttcatggacaacttgctgctgaccgaggatgaccaggaaactaccactcggttcctgcagaccgaagccgtgaccctgcaggacgtgagaggccgggactaccagaacgccatgcgggtgtggtccaacatccctggactgaaaagcaagcacgcacctctgacccctaaagaagaggagtacctgcaggcccaggtgcggagcagaagcaagctggacgcccctaaggtggatctgctggtgaagaattgcctcctgcccctgagagagtacttcaagtatttcagccagaatagtctgcccctgggcggcccaagcagcggcgcccctcctcccagcggcggcagcccagccggctccccaacctctaccgaggagggcacctctgagtccgccacccccgagagcggccctggcacctccaccgagcccagcgagggcagcgcacccggcagccctgccggcagccccacctccacagaggagggaaccagcaccgagcccagcgaaggcagcgccccaggcaccagcaccgagcctagtgagggcggctctggcggcggcagcgcccaggagattaaacggatcaacaagatcagaagaagacttgtgaaagacagcaacaccaagaaggccggcaagacaggccccatgaaaaccctgctggttagagtgatgacacccgatctgagagagcggctggaaaacctgagaaagaagcctgaaaatatcccccagcccatcagcaatacatctagagccaacctgaataagctgctgaccgattacaccgaaatgaagaaggcgatcctgcatgtgtactgggaagagttccagaaggaccctgtgggcctgatgagccgggtggcccagcctgccagcaagaagatcgatcagaacaagctgaaacctgagatggacgagaagggcaacctgaccaccgccggctttgcctgctctcagtgtggccagcccctgttcgtgtacaagctggagcaggtgtctgagaagggcaaggcttacaccaactacttcggacggtgcaatgtggccgagcacgaaaagctgatcctgctggcccagctgaagcccgagaaggatagcgacgaagccgtgacatatagcctgggaaagtttgggcagagggccctggatttctacagcattcatgtgaccaaggagtccacccaccccgtgaagcccctggcccagatcgccggaaacagatacgcctccggacctgtgggaaaggccctgagcgacgcatgtatgggcacaatcgcctccttcctgtctaagtaccaggacatcatcatcgaacaccagaaggtggtgaagggcaaccagaagagactggagagcctgcgggagctggccggcaaggaaaacctggaataccctagcgtgaccctgccacctcagcctcacaccaaggagggcgttgatgcctacaacgaagtgatcgcccgggtgcgaatgtgggtgaacctgaacctgtggcagaagctgaagctaagcagagatgatgccaagcctctgctgagactgaagggattcccttcctttcctctggtcgagagacaggccaacgaagtggactggtgggacatggtgtgtaacgtgaagaagctgatcaacgagaaaaaggaggatggcaaggtgttttggcagaatctggctggctacaagagacaggaagccctgagaccatacctgagcagcgaggaagatcggaagaagggaaagaaattcgctcggtaccagctgggcgacctgctgctgcacctggaaaagaagcacggcgaggactggggaaaggtgtacgacgaggcctgggagcggattgacaagaaagtggaaggcctgagcaagcacatcaagctggaagaggaacggagaagcgaggacgcccagagcaaggccgccctgaccgactggctgcgggctaaggccagcttcgtgatcgagggcctgaaggaggccgacaaggacgagttctgcagatgcgagctgaagctgcagaagtggtacggggacctgcggggaaagcccttcgccatcgaagccgagaacagcatcctggacatcagcggcttcagcaagcagtacaactgtgccttcatctggcagaaggacggcgtgaagaagctgaacctgtacctgatcatcaactacttcaagggcggcaagctgcggttcaagaagatcaaacctgaagccttcgaagccaacagattctacaccgtgatcaacaaaaagagcggcgagatcgtgcccatggaggtgaacttcaacttcgacgaccccaacctgatcatcctgcctctggcctttggcaagagacagggcagagaattcatctggaacgacctgctgtccctggaaaccggcagcctgaagctggccaacggaagagtgatcgagaagacactgtacaacagaagaacccggcaggatgagcctgccctgttcgtggccctgaccttcgagcggcgggaggtcctggactcctccaatatcaaaccaatgaacctgatcggcgtggcaagaggcgaaaacatccccgccgtgatcgccctgaccgaccccgagggctgcccactgagccggtttaaggatagcctgggaaacccaacccacatcctgagaatcggcgagagctataaggagaagcagcggaccatccaggccaagaaggaggtggagcagcggagagccggcggctacagccggaagtacgccagcaaagccaagaatctggcagacgatatggtgagaaacaccgctagagatctgctgtactacgccgtgacccaggatgccatgctgatcttcgccaacctgagccggggcttcggccggcagggcaagcggaccttcatggccgagagacagtacacacggatggaggactggctgaccgccaagctggcctacgagggcctgagcaagacctacctgtccaagacactggcccagtacacctccaagacatgcagcaactgtgggtttaccatcaccagcgccgactacgacagggtgctggagaagctgaagaagacagcaacaggctggatgaccacaattaacggcaaggagctgaaggtggagggccagattacctactacaacagatacaagagacagaacgtagtcaaggacctgtccgtcgagctggatagactgagcgaagaatctgtgaacaacgacatctcctcctggacaaagggcagaagcggagaagctctgagcctcctgaagaaaagattctcccatagacccgtgcaggagaagttcgtgtgcctgaactgcggcttcgagacacacgcagccgagcaagccgccctgaacatcgccagatcctggctgttcctgcggagccaggagtacaagaaataccagacaaacaagacaaccggcaacaccgataagagagccttcgtcgagacctggcagtccttttaccggaagaagcttaaggaggtgtggaaacctgccgtgcggtctggcggatctggcggaggctccacaagcgccaggggcaagagcaagagcaaggcccccgtgaccttcggcgacctggccatctacttcagccaggaggagtgggagtggctgagccccatccagaaggacctgtacgaggacgtgatgctggagaactacaggaacctggtgagcctgggcctgagcttcaggaggcccaacgtgatcaccctgctggagaagggcaaggccccctggatggtggagcccgtgaggaggaggagggcccccaccagccccaagaaaaagagaaaagtctaagctgccttctgcggggcttgccttctggccatgcccttcttctctcccttgcacctgtacctcttggtctttgaataaagcctgagtaggaaggctagcaaaaaaaaaaaaaaaaaaaaaaaaaaaaaaaaaaaaaaaaaaaaaaaaaaaaaaaaaaaaaaaaaaaaaaaaaaaaaaaa

SEQ ID NO: 6299 - RNA, 5797 nt, synthetic construct
  source 1..5797: mol_type = other RNA
aggaaataagagagaaaagaagagtaagaagaaatataagagccaccatggcccctaagaagaagcgtaaagtgagccggatggaacgcctcgtctacgaggtgcggcagaagtgcagaaacatcgaggacatctgcatctcctgcggatctctgaacgtgaccctggagcacccactgttcatcggcggcatgtgccagaactgtaaaaactgttttctggagtgtgcctatcaatacgacgatgacggctaccagagctactgcaccatctgttgcggcggaagagaggtgctgatgtgtggaaataacaactgctgccggtgcttctgcgtggaatgcgtggacctgctggtgggccccggcgccgcccaggccgctattaaggaagatccttggaactgctacatgtgcggccacaagggcacatacggcctgctgagacggagagaggactggcctagcagactgcagatgttcttcgccaataaccacgaccaggagttcgacccccctaaggtgtaccctcccgtccccgccgagaagagaaagcccatccgggtcctgagcctgttcgatggcatcgccaccggtctgctggtgctgaaggacctgggcatccaggtggataggtacattgcctccgaggtgtgcgaggactccatcaccgtgggaatggtgcgtcatcagggcaagatcatgtacgtgggcgacgtgcggagcgtgacacagaagcatatccaggagtggggccctttcgacctggtgatcggcggcagcccttgcaatgacctgagcatcgtgaacccagcccggaagggcctgtacgagggaaccggcagactgttcttcgagttttacagactgctgcacgacgcccggcctaaggaaggcgacgaccggcccttcttttggctgttcgagaatgtggtggccatgggagtcagcgacaagcgggatattagccggttcctggagagcaaccccgtgatgatcgatgccaaggaagtgagcgccgcccaccgggccagatacttctggggcaatctgcctggcatgaacagacccctggccagcaccgtgaacgacaagctggagctgcaggagtgcctggagcacggccggatcgccaagttcagcaaggtgagaaccatcaccacccgaagcaacagcatcaaacaaggcaaggaccagcactttcctgtgttcatgaacgagaaggaggacatcctgtggtgtaccgagatggagagagtgttcgggttcccagtccactacacagatgtcagcaacatgtctagactggccagacagagactgctgggaagaagctggtccgtccctgtgatcagacacctgttcgcccctctgaaggagtacttcgcctgcgtgagcagcggcaacagcaacgccaacagccggggccccagcttctctagcggcctggtgccactgtccctgagagggagccacatgggccccatggagatctacaaaaccgtgagcgcctggaagcggcagcctgtgcgcgtgctgagcctgtttcggaatatcgataaagtcctgaaaagcctgggattcctggagagcggctctggctccggcggtggcaccctgaagtacgtggaggatgtgacaaacgtggtcagacgggatgtggagaagtggggccccttcgatctggtgtacggcagcacccaacccctgggcagctcttgtgaccggtgccctggctggtacatgtttcagttccaccggatcctgcagtacgccctgccgagacaggagtcccagcggccattcttttggattttcatggacaacttgctgctgaccgaggatgaccaggaaactaccactcggttcctgcagaccgaagccgtgaccctgcaggacgtgagaggccgggactaccagaacgccatgcgggtgtggtccaacatccctggactgaaaagcaagcacgcacctctgacccctaaagaagaggagtacctgcaggcccaggtgcggagcagaagcaagctggacgcccctaaggtggatctgctggtgaagaattgcctcctgcccctgagagagtacttcaagtatttcagccagaatagtctgcccctgggcggcccaagcagcggcgcccctcctcccagcggcggcagcccagccggctccccaacctctaccgaggagggcacctctgagtccgccacccccgagagcggccctggcacctccaccgagcccagcgagggcagcgcacccggcagccctgccggcagccccacctccacagaggagggaaccagcaccgagcccagcgaaggcagcgccccaggcaccagcaccgagcctagtgagggcggctctggcggcggcagcgcccaggagattaaacggatcaacaagatcagaagaagacttgtgaaagacagcaacaccaagaaggccggcaagacaggccccatgaaaaccctgctggttagagtgatgacacccgatctgagagagcggctggaaaacctgagaaagaagcctgaaaatatcccccagcccatcagcaatacatctagagccaacctgaataagctgctgaccgattacaccgaaatgaagaaggcgatcctgcatgtgtactgggaagagttccagaaggaccctgtgggcctgatgagccgggtggcccagcctgccagcaagaagatcgatcagaacaagctgaaacctgagatggacgagaagggcaacctgaccaccgccggctttgcctgctctcagtgtggccagcccctgttcgtgtacaagctggagcaggtgtctgagaagggcaaggcttacaccaactacttcggacggtgcaatgtggccgagcacgaaaagctgatcctgctggcccagctgaagcccgagaaggatagcgacgaagccgtgacatatagcctgggaaagtttgggcagagggccctggatttctacagcattcatgtgaccaaggagtccacccaccccgtgaagcccctggcccagatcgccggaaacagatacgcctccggacctgtgggaaaggccctgagcgacgcatgtatgggcacaatcgcctccttcctgtctaagtaccaggacatcatcatcgaacaccagaaggtggtgaagggcaaccagaagagactggagagcctgcgggagctggccggcaaggaaaacctggaataccctagcgtgaccctgccacctcagcctcacaccaaggagggcgttgatgcctacaacgaagtgatcgcccgggtgcgaatgtgggtgaacctgaacctgtggcagaagctgaagctaagcagagatgatgccaagcctctgctgagactgaagggattcccttcctttcctctggtcgagagacaggccaacgaagtggactggtgggacatggtgtgtaacgtgaagaagctgatcaacgagaaaaaggaggatggcaaggtgttttggcagaatctggctggctacaagagacaggaagccctgagaccatacctgagcagcgaggaagatcggaagaagggaaagaaattcgctcggtaccagctgggcgacctgctgctgcacctggaaaagaagcacggcgaggactggggaaaggtgtacgacgaggcctgggagcggattgacaagaaagtggaaggcctgagcaagcacatcaagctggaagaggaacggagaagcgaggacgcccagagcaaggccgccctgaccgactggctgcgggctaaggccagcttcgtgatcgagggcctgaaggaggccgacaaggacgagttctgcagatgcgagctgaagctgcagaagtggtacggggacctgcggggaaagcccttcgccatcgaagccgagaacagcatcctggacatcagcggcttcagcaagcagtacaactgtgccttcatctggcagaaggacggcgtgaagaagctgaacctgtacctgatcatcaactacttcaagggcggcaagctgcggttcaagaagatcaaacctgaagccttcgaagccaacagattctacaccgtgatcaacaaaaagagcggcgagatcgtgcccatggaggtgaacttcaacttcgacgaccccaacctgatcatcctgcctctggcctttggcaagagacagggcagagaattcatctggaacgacctgctgtccctggaaaccggcagcctgaagctggccaacggaagagtgatcgagaagacactgtacaacagaagaacccggcaggatgagcctgccctgttcgtggccctgaccttcgagcggcgggaggtcctggactcctccaatatcaaaccaatgaacctgatcggcgtggcaagaggcgaaaacatccccgccgtgatcgccctgaccgaccccgagggctgcccactgagccggtttaaggatagcctgggaaacccaacccacatcctgagaatcggcgagagctataaggagaagcagcggaccatccaggccaagaaggaggtggagcagcggagagccggcggctacagccggaagtacgccagcaaagccaagaatctggcagacgatatggtgagaaacaccgctagagatctgctgtactacgccgtgacccaggatgccatgctgatcttcgccaacctgagccggggcttcggccggcagggcaagcggaccttcatggccgagagacagtacacacggatggaggactggctgaccgccaagctggcctacgagggcctgagcaagacctacctgtccaagacactggcccagtacacctccaagacatgcagcaactgtgggtttaccatcaccagcgccgactacgacagggtgctggagaagctgaagaagacagcaacaggctggatgaccacaattaacggcaaggagctgaaggtggagggccagattacctactacaacagatacaagagacagaacgtagtcaaggacctgtccgtcgagctggatagactgagcgaagaatctgtgaacaacgacatctcctcctggacaaagggcagaagcggagaagctctgagcctcctgaagaaaagattctcccatagacccgtgcaggagaagttcgtgtgcctgaactgcggcttcgagacacacgcagccgagcaagccgccctgaacatcgccagatcctggctgttcctgcggagccaggagtacaagaaataccagacaaacaagacaaccggcaacaccgataagagagccttcgtcgagacctggcagtccttttaccggaagaagcttaaggaggtgtggaaacctgccgtgcggtctggcggatctggcggaggctccacaagcatggtgcaggagagcgtgaccttcaaggacgtggccgtgctgttcacccaggaggagtggggccagctgagccccgcccagagggccctgtacagggacgtgatgctggagaactacagcaacctggtgagcctgggcctgctgggccccaagcccgacatgttcagccagctggagaagagggaggtgtggatgcccgaggacacccccggcggcttctgcctggactggatgaccatgcccaccagccccaagaaaaagagaaaagtctaagctgccttctgcggggcttgccttctggccatgcccttcttctctcccttgcacctgtacctcttggtctttgaataaagcctgagtaggaaggctagcaaaaaaaaaaaaaaaaaaaaaaaaaaaaaaaaaaaaaaaaaaaaaaaaaaaaaaaaaaaaaaaaaaaaaaaaaaaaaaaa

SEQ ID NO: 6300 - RNA, 5797 nt, synthetic construct
  source 1..5797: mol_type = other RNA
aggaaataagagagaaaagaagagtaagaagaaatataagagccaccatggcccctaagaagaagcgtaaagtgagccggatggaacgcctcgtctacgaggtgcggcagaagtgcagaaacatcgaggacatctgcatctcctgcggatctctgaacgtgaccctggagcacccactgttcatcggcggcatgtgccagaactgtaaaaactgttttctggagtgtgcctatcaatacgacgatgacggctaccagagctactgcaccatctgttgcggcggaagagaggtgctgatgtgtggaaataacaactgctgccggtgcttctgcgtggaatgcgtggacctgctggtgggccccggcgccgcccaggccgctattaaggaagatccttggaactgctacatgtgcggccacaagggcacatacggcctgctgagacggagagaggactggcctagcagactgcagatgttcttcgccaataaccacgaccaggagttcgacccccctaaggtgtaccctcccgtccccgccgagaagagaaagcccatccgggtcctgagcctgttcgatggcatcgccaccggtctgctggtgctgaaggacctgggcatccaggtggataggtacattgcctccgaggtgtgcgaggactccatcaccgtgggaatggtgcgtcatcagggcaagatcatgtacgtgggcgacgtgcggagcgtgacacagaagcatatccaggagtggggccctttcgacctggtgatcggcggcagcccttgcaatgacctgagcatcgtgaacccagcccggaagggcctgtacgagggaaccggcagactgttcttcgagttttacagactgctgcacgacgcccggcctaaggaaggcgacgaccggcccttcttttggctgttcgagaatgtggtggccatgggagtcagcgacaagcgggatattagccggttcctggagagcaaccccgtgatgatcgatgccaaggaagtgagcgccgcccaccgggccagatacttctggggcaatctgcctggcatgaacagacccctggccagcaccgtgaacgacaagctggagctgcaggagtgcctggagcacggccggatcgccaagttcagcaaggtgagaaccatcaccacccgaagcaacagcatcaaacaaggcaaggaccagcactttcctgtgttcatgaacgagaaggaggacatcctgtggtgtaccgagatggagagagtgttcgggttcccagtccactacacagatgtcagcaacatgtctagactggccagacagagactgctgggaagaagctggtccgtccctgtgatcagacacctgttcgcccctctgaaggagtacttcgcctgcgtgagcagcggcaacagcaacgccaacagccggggccccagcttctctagcggcctggtgccactgtccctgagagggagccacatgggccccatggagatctacaaaaccgtgagcgcctggaagcggcagcctgtgcgcgtgctgagcctgtttcggaatatcgataaagtcctgaaaagcctgggattcctggagagcggctctggctccggcggtggcaccctgaagtacgtggaggatgtgacaaacgtggtcagacgggatgtggagaagtggggccccttcgatctggtgtacggcagcacccaacccctgggcagctcttgtgaccggtgccctggctggtacatgtttcagttccaccggatcctgcagtacgccctgccgagacaggagtcccagcggccattcttttggattttcatggacaacttgctgctgaccgaggatgaccaggaaactaccactcggttcctgcagaccgaagccgtgaccctgcaggacgtgagaggccgggactaccagaacgccatgcgggtgtggtccaacatccctggactgaaaagcaagcacgcacctctgacccctaaagaagaggagtacctgcaggcccaggtgcggagcagaagcaagctggacgcccctaaggtggatctgctggtgaagaattgcctcctgcccctgagagagtacttcaagtatttcagccagaatagtctgcccctgggcggcccaagcagcggcgcccctcctcccagcggcggcagcccagccggctccccaacctctaccgaggagggcacctctgagtccgccacccccgagagcggccctggcacctccaccgagcccagcgagggcagcgcacccggcagccctgccggcagccccacctccacagaggagggaaccagcaccgagcccagcgaaggcagcgccccaggcaccagcaccgagcctagtgagggcggctctggcggcggcagcgcccaggagattaaacggatcaacaagatcagaagaagacttgtgaaagacagcaacaccaagaaggccggcaagacaggccccatgaaaaccctgctggttagagtgatgacacccgatctgagagagcggctggaaaacctgagaaagaagcctgaaaatatcccccagcccatcagcaatacatctagagccaacctgaataagctgctgaccgattacaccgaaatgaagaaggcgatcctgcatgtgtactgggaagagttccagaaggaccctgtgggcctgatgagccgggtggcccagcctgccagcaagaagatcgatcagaacaagctgaaacctgagatggacgagaagggcaacctgaccaccgccggctttgcctgctctcagtgtggccagcccctgttcgtgtacaagctggagcaggtgtctgagaagggcaaggcttacaccaactacttcggacggtgcaatgtggccgagcacgaaaagctgatcctgctggcccagctgaagcccgagaaggatagcgacgaagccgtgacatatagcctgggaaagtttgggcagagggccctggatttctacagcattcatgtgaccaaggagtccacccaccccgtgaagcccctggcccagatcgccggaaacagatacgcctccggacctgtgggaaaggccctgagcgacgcatgtatgggcacaatcgcctccttcctgtctaagtaccaggacatcatcatcgaacaccagaaggtggtgaagggcaaccagaagagactggagagcctgcgggagctggccggcaaggaaaacctggaataccctagcgtgaccctgccacctcagcctcacaccaaggagggcgttgatgcctacaacgaagtgatcgcccgggtgcgaatgtgggtgaacctgaacctgtggcagaagctgaagctaagcagagatgatgccaagcctctgctgagactgaagggattcccttcctttcctctggtcgagagacaggccaacgaagtggactggtgggacatggtgtgtaacgtgaagaagctgatcaacgagaaaaaggaggatggcaaggtgttttggcagaatctggctggctacaagagacaggaagccctgagaccatacctgagcagcgaggaagatcggaagaagggaaagaaattcgctcggtaccagctgggcgacctgctgctgcacctggaaaagaagcacggcgaggactggggaaaggtgtacgacgaggcctgggagcggattgacaagaaagtggaaggcctgagcaagcacatcaagctggaagaggaacggagaagcgaggacgcccagagcaaggccgccctgaccgactggctgcgggctaaggccagcttcgtgatcgagggcctgaaggaggccgacaaggacgagttctgcagatgcgagctgaagctgcagaagtggtacggggacctgcggggaaagcccttcgccatcgaagccgagaacagcatcctggacatcagcggcttcagcaagcagtacaactgtgccttcatctggcagaaggacggcgtgaagaagctgaacctgtacctgatcatcaactacttcaagggcggcaagctgcggttcaagaagatcaaacctgaagccttcgaagccaacagattctacaccgtgatcaacaaaaagagcggcgagatcgtgcccatggaggtgaacttcaacttcgacgaccccaacctgatcatcctgcctctggcctttggcaagagacagggcagagaattcatctggaacgacctgctgtccctggaaaccggcagcctgaagctggccaacggaagagtgatcgagaagacactgtacaacagaagaacccggcaggatgagcctgccctgttcgtggccctgaccttcgagcggcgggaggtcctggactcctccaatatcaaaccaatgaacctgatcggcgtggcaagaggcgaaaacatccccgccgtgatcgccctgaccgaccccgagggctgcccactgagccggtttaaggatagcctgggaaacccaacccacatcctgagaatcggcgagagctataaggagaagcagcggaccatccaggccaagaaggaggtggagcagcggagagccggcggctacagccggaagtacgccagcaaagccaagaatctggcagacgatatggtgagaaacaccgctagagatctgctgtactacgccgtgacccaggatgccatgctgatcttcgccaacctgagccggggcttcggccggcagggcaagcggaccttcatggccgagagacagtacacacggatggaggactggctgaccgccaagctggcctacgagggcctgagcaagacctacctgtccaagacactggcccagtacacctccaagacatgcagcaactgtgggtttaccatcaccagcgccgactacgacagggtgctggagaagctgaagaagacagcaacaggctggatgaccacaattaacggcaaggagctgaaggtggagggccagattacctactacaacagatacaagagacagaacgtagtcaaggacctgtccgtcgagctggatagactgagcgaagaatctgtgaacaacgacatctcctcctggacaaagggcagaagcggagaagctctgagcctcctgaagaaaagattctcccatagacccgtgcaggagaagttcgtgtgcctgaactgcggcttcgagacacacgcagccgagcaagccgccctgaacatcgccagatcctggctgttcctgcggagccaggagtacaagaaataccagacaaacaagacaaccggcaacaccgataagagagccttcgtcgagacctggcagtccttttaccggaagaagcttaaggaggtgtggaaacctgccgtgcggtctggcggatctggcggaggctccacaagcaccagcgagcccgtgagcttcgccgacgtggccgtgtacttcagccaggaggagtggggctgcctgcagcccgcccagagggccctgtacagggacgtgatgagggagacctacggccacctgggcgccctgggcttcaggggcaccaagcccgccctgatcagctgggtggaggaggaggccgagctgtggggccccgacgccggcccccccgagatgggcgagtgcctgaccgaggccgacaccagccccaagaaaaagagaaaagtctaagctgccttctgcggggcttgccttctggccatgcccttcttctctcccttgcacctgtacctcttggtctttgaataaagcctgagtaggaaggctagcaaaaaaaaaaaaaaaaaaaaaaaaaaaaaaaaaaaaaaaaaaaaaaaaaaaaaaaaaaaaaaaaaaaaaaaaaaaaaaaa

SEQ ID NO: 6301 - RNA, 5797 nt, synthetic construct
  source 1..5797: mol_type = other RNA
aggaaataagagagaaaagaagagtaagaagaaatataagagccaccatggcccctaagaagaagcgtaaagtgagccggatggaacgcctcgtctacgaggtgcggcagaagtgcagaaacatcgaggacatctgcatctcctgcggatctctgaacgtgaccctggagcacccactgttcatcggcggcatgtgccagaactgtaaaaactgttttctggagtgtgcctatcaatacgacgatgacggctaccagagctactgcaccatctgttgcggcggaagagaggtgctgatgtgtggaaataacaactgctgccggtgcttctgcgtggaatgcgtggacctgctggtgggccccggcgccgcccaggccgctattaaggaagatccttggaactgctacatgtgcggccacaagggcacatacggcctgctgagacggagagaggactggcctagcagactgcagatgttcttcgccaataaccacgaccaggagttcgacccccctaaggtgtaccctcccgtccccgccgagaagagaaagcccatccgggtcctgagcctgttcgatggcatcgccaccggtctgctggtgctgaaggacctgggcatccaggtggataggtacattgcctccgaggtgtgcgaggactccatcaccgtgggaatggtgcgtcatcagggcaagatcatgtacgtgggcgacgtgcggagcgtgacacagaagcatatccaggagtggggccctttcgacctggtgatcggcggcagcccttgcaatgacctgagcatcgtgaacccagcccggaagggcctgtacgagggaaccggcagactgttcttcgagttttacagactgctgcacgacgcccggcctaaggaaggcgacgaccggcccttcttttggctgttcgagaatgtggtggccatgggagtcagcgacaagcgggatattagccggttcctggagagcaaccccgtgatgatcgatgccaaggaagtgagcgccgcccaccgggccagatacttctggggcaatctgcctggcatgaacagacccctggccagcaccgtgaacgacaagctggagctgcaggagtgcctggagcacggccggatcgccaagttcagcaaggtgagaaccatcaccacccgaagcaacagcatcaaacaaggcaaggaccagcactttcctgtgttcatgaacgagaaggaggacatcctgtggtgtaccgagatggagagagtgttcgggttcccagtccactacacagatgtcagcaacatgtctagactggccagacagagactgctgggaagaagctggtccgtccctgtgatcagacacctgttcgcccctctgaaggagtacttcgcctgcgtgagcagcggcaacagcaacgccaacagccggggccccagcttctctagcggcctggtgccactgtccctgagagggagccacatgggccccatggagatctacaaaaccgtgagcgcctggaagcggcagcctgtgcgcgtgctgagcctgtttcggaatatcgataaagtcctgaaaagcctgggattcctggagagcggctctggctccggcggtggcaccctgaagtacgtggaggatgtgacaaacgtggtcagacgggatgtggagaagtggggccccttcgatctggtgtacggcagcacccaacccctgggcagctcttgtgaccggtgccctggctggtacatgtttcagttccaccggatcctgcagtacgccctgccgagacaggagtcccagcggccattcttttggattttcatggacaacttgctgctgaccgaggatgaccaggaaactaccactcggttcctgcagaccgaagccgtgaccctgcaggacgtgagaggccgggactaccagaacgccatgcgggtgtggtccaacatccctggactgaaaagcaagcacgcacctctgacccctaaagaagaggagtacctgcaggcccaggtgcggagcagaagcaagctggacgcccctaaggtggatctgctggtgaagaattgcctcctgcccctgagagagtacttcaagtatttcagccagaatagtctgcccctgggcggcccaagcagcggcgcccctcctcccagcggcggcagcccagccggctccccaacctctaccgaggagggcacctctgagtccgccacccccgagagcggccctggcacctccaccgagcccagcgagggcagcgcacccggcagccctgccggcagccccacctccacagaggagggaaccagcaccgagcccagcgaaggcagcgccccaggcaccagcaccgagcctagtgagggcggctctggcggcggcagcgcccaggagattaaacggatcaacaagatcagaagaagacttgtgaaagacagcaacaccaagaaggccggcaagacaggccccatgaaaaccctgctggttagagtgatgacacccgatctgagagagcggctggaaaacctgagaaagaagcctgaaaatatcccccagcccatcagcaatacatctagagccaacctgaataagctgctgaccgattacaccgaaatgaagaaggcgatcctgcatgtgtactgggaagagttccagaaggaccctgtgggcctgatgagccgggtggcccagcctgccagcaagaagatcgatcagaacaagctgaaacctgagatggacgagaagggcaacctgaccaccgccggctttgcctgctctcagtgtggccagcccctgttcgtgtacaagctggagcaggtgtctgagaagggcaaggcttacaccaactacttcggacggtgcaatgtggccgagcacgaaaagctgatcctgctggcccagctgaagcccgagaaggatagcgacgaagccgtgacatatagcctgggaaagtttgggcagagggccctggatttctacagcattcatgtgaccaaggagtccacccaccccgtgaagcccctggcccagatcgccggaaacagatacgcctccggacctgtgggaaaggccctgagcgacgcatgtatgggcacaatcgcctccttcctgtctaagtaccaggacatcatcatcgaacaccagaaggtggtgaagggcaaccagaagagactggagagcctgcgggagctggccggcaaggaaaacctggaataccctagcgtgaccctgccacctcagcctcacaccaaggagggcgttgatgcctacaacgaagtgatcgcccgggtgcgaatgtgggtgaacctgaacctgtggcagaagctgaagctaagcagagatgatgccaagcctctgctgagactgaagggattcccttcctttcctctggtcgagagacaggccaacgaagtggactggtgggacatggtgtgtaacgtgaagaagctgatcaacgagaaaaaggaggatggcaaggtgttttggcagaatctggctggctacaagagacaggaagccctgagaccatacctgagcagcgaggaagatcggaagaagggaaagaaattcgctcggtaccagctgggcgacctgctgctgcacctggaaaagaagcacggcgaggactggggaaaggtgtacgacgaggcctgggagcggattgacaagaaagtggaaggcctgagcaagcacatcaagctggaagaggaacggagaagcgaggacgcccagagcaaggccgccctgaccgactggctgcgggctaaggccagcttcgtgatcgagggcctgaaggaggccgacaaggacgagttctgcagatgcgagctgaagctgcagaagtggtacggggacctgcggggaaagcccttcgccatcgaagccgagaacagcatcctggacatcagcggcttcagcaagcagtacaactgtgccttcatctggcagaaggacggcgtgaagaagctgaacctgtacctgatcatcaactacttcaagggcggcaagctgcggttcaagaagatcaaacctgaagccttcgaagccaacagattctacaccgtgatcaacaaaaagagcggcgagatcgtgcccatggaggtgaacttcaacttcgacgaccccaacctgatcatcctgcctctggcctttggcaagagacagggcagagaattcatctggaacgacctgctgtccctggaaaccggcagcctgaagctggccaacggaagagtgatcgagaagacactgtacaacagaagaacccggcaggatgagcctgccctgttcgtggccctgaccttcgagcggcgggaggtcctggactcctccaatatcaaaccaatgaacctgatcggcgtggcaagaggcgaaaacatccccgccgtgatcgccctgaccgaccccgagggctgcccactgagccggtttaaggatagcctgggaaacccaacccacatcctgagaatcggcgagagctataaggagaagcagcggaccatccaggccaagaaggaggtggagcagcggagagccggcggctacagccggaagtacgccagcaaagccaagaatctggcagacgatatggtgagaaacaccgctagagatctgctgtactacgccgtgacccaggatgccatgctgatcttcgccaacctgagccggggcttcggccggcagggcaagcggaccttcatggccgagagacagtacacacggatggaggactggctgaccgccaagctggcctacgagggcctgagcaagacctacctgtccaagacactggcccagtacacctccaagacatgcagcaactgtgggtttaccatcaccagcgccgactacgacagggtgctggagaagctgaagaagacagcaacaggctggatgaccacaattaacggcaaggagctgaaggtggagggccagattacctactacaacagatacaagagacagaacgtagtcaaggacctgtccgtcgagctggatagactgagcgaagaatctgtgaacaacgacatctcctcctggacaaagggcagaagcggagaagctctgagcctcctgaagaaaagattctcccatagacccgtgcaggagaagttcgtgtgcctgaactgcggcttcgagacacacgcagccgagcaagccgccctgaacatcgccagatcctggctgttcctgcggagccaggagtacaagaaataccagacaaacaagacaaccggcaacaccgataagagagccttcgtcgagacctggcagtccttttaccggaagaagcttaaggaggtgtggaaacctgccgtgcggtctggcggatctggcggaggctccacaagcgcccagaccctgctgaccttcagggacgtggccatcgagttcagcctggaggagtggaagtgcctggacctggcccagcagaacctgtacagggacgtgatgctggagaactacaggaacctgttcagcgtgggcctgaccgtgagcaagcccggcctgatcacctgcctggagcagaggaaggagccctggaacgtgaagaggcaggaggccgccgacggccaccccgccatgagcagctgcaccagccccaagaaaaagagaaaagtctaagctgccttctgcggggcttgccttctggccatgcccttcttctctcccttgcacctgtacctcttggtctttgaataaagcctgagtaggaaggctagcaaaaaaaaaaaaaaaaaaaaaaaaaaaaaaaaaaaaaaaaaaaaaaaaaaaaaaaaaaaaaaaaaaaaaaaaaaaaaaaa

SEQ ID NO: 6302 - RNA, 5797 nt, synthetic construct
  source 1..5797: mol_type = other RNA
aggaaataagagagaaaagaagagtaagaagaaatataagagccaccatggcccctaagaagaagcgtaaagtgagccggatggaacgcctcgtctacgaggtgcggcagaagtgcagaaacatcgaggacatctgcatctcctgcggatctctgaacgtgaccctggagcacccactgttcatcggcggcatgtgccagaactgtaaaaactgttttctggagtgtgcctatcaatacgacgatgacggctaccagagctactgcaccatctgttgcggcggaagagaggtgctgatgtgtggaaataacaactgctgccggtgcttctgcgtggaatgcgtggacctgctggtgggccccggcgccgcccaggccgctattaaggaagatccttggaactgctacatgtgcggccacaagggcacatacggcctgctgagacggagagaggactggcctagcagactgcagatgttcttcgccaataaccacgaccaggagttcgacccccctaaggtgtaccctcccgtccccgccgagaagagaaagcccatccgggtcctgagcctgttcgatggcatcgccaccggtctgctggtgctgaaggacctgggcatccaggtggataggtacattgcctccgaggtgtgcgaggactccatcaccgtgggaatggtgcgtcatcagggcaagatcatgtacgtgggcgacgtgcggagcgtgacacagaagcatatccaggagtggggccctttcgacctggtgatcggcggcagcccttgcaatgacctgagcatcgtgaacccagcccggaagggcctgtacgagggaaccggcagactgttcttcgagttttacagactgctgcacgacgcccggcctaaggaaggcgacgaccggcccttcttttggctgttcgagaatgtggtggccatgggagtcagcgacaagcgggatattagccggttcctggagagcaaccccgtgatgatcgatgccaaggaagtgagcgccgcccaccgggccagatacttctggggcaatctgcctggcatgaacagacccctggccagcaccgtgaacgacaagctggagctgcaggagtgcctggagcacggccggatcgccaagttcagcaaggtgagaaccatcaccacccgaagcaacagcatcaaacaaggcaaggaccagcactttcctgtgttcatgaacgagaaggaggacatcctgtggtgtaccgagatggagagagtgttcgggttcccagtccactacacagatgtcagcaacatgtctagactggccagacagagactgctgggaagaagctggtccgtccctgtgatcagacacctgttcgcccctctgaaggagtacttcgcctgcgtgagcagcggcaacagcaacgccaacagccggggccccagcttctctagcggcctggtgccactgtccctgagagggagccacatgggccccatggagatctacaaaaccgtgagcgcctggaagcggcagcctgtgcgcgtgctgagcctgtttcggaatatcgataaagtcctgaaaagcctgggattcctggagagcggctctggctccggcggtggcaccctgaagtacgtggaggatgtgacaaacgtggtcagacgggatgtggagaagtggggccccttcgatctggtgtacggcagcacccaacccctgggcagctcttgtgaccggtgccctggctggtacatgtttcagttccaccggatcctgcagtacgccctgccgagacaggagtcccagcggccattcttttggattttcatggacaacttgctgctgaccgaggatgaccaggaaactaccactcggttcctgcagaccgaagccgtgaccctgcaggacgtgagaggccgggactaccagaacgccatgcgggtgtggtccaacatccctggactgaaaagcaagcacgcacctctgacccctaaagaagaggagtacctgcaggcccaggtgcggagcagaagcaagctggacgcccctaaggtggatctgctggtgaagaattgcctcctgcccctgagagagtacttcaagtatttcagccagaatagtctgcccctgggcggcccaagcagcggcgcccctcctcccagcggcggcagcccagccggctccccaacctctaccgaggagggcacctctgagtccgccacccccgagagcggccctggcacctccaccgagcccagcgagggcagcgcacccggcagccctgccggcagccccacctccacagaggagggaaccagcaccgagcccagcgaaggcagcgccccaggcaccagcaccgagcctagtgagggcggctctggcggcggcagcgcccaggagattaaacggatcaacaagatcagaagaagacttgtgaaagacagcaacaccaagaaggccggcaagacaggccccatgaaaaccctgctggttagagtgatgacacccgatctgagagagcggctggaaaacctgagaaagaagcctgaaaatatcccccagcccatcagcaatacatctagagccaacctgaataagctgctgaccgattacaccgaaatgaagaaggcgatcctgcatgtgtactgggaagagttccagaaggaccctgtgggcctgatgagccgggtggcccagcctgccagcaagaagatcgatcagaacaagctgaaacctgagatggacgagaagggcaacctgaccaccgccggctttgcctgctctcagtgtggccagcccctgttcgtgtacaagctggagcaggtgtctgagaagggcaaggcttacaccaactacttcggacggtgcaatgtggccgagcacgaaaagctgatcctgctggcccagctgaagcccgagaaggatagcgacgaagccgtgacatatagcctgggaaagtttgggcagagggccctggatttctacagcattcatgtgaccaaggagtccacccaccccgtgaagcccctggcccagatcgccggaaacagatacgcctccggacctgtgggaaaggccctgagcgacgcatgtatgggcacaatcgcctccttcctgtctaagtaccaggacatcatcatcgaacaccagaaggtggtgaagggcaaccagaagagactggagagcctgcgggagctggccggcaaggaaaacctggaataccctagcgtgaccctgccacctcagcctcacaccaaggagggcgttgatgcctacaacgaagtgatcgcccgggtgcgaatgtgggtgaacctgaacctgtggcagaagctgaagctaagcagagatgatgccaagcctctgctgagactgaagggattcccttcctttcctctggtcgagagacaggccaacgaagtggactggtgggacatggtgtgtaacgtgaagaagctgatcaacgagaaaaaggaggatggcaaggtgttttggcagaatctggctggctacaagagacaggaagccctgagaccatacctgagcagcgaggaagatcggaagaagggaaagaaattcgctcggtaccagctgggcgacctgctgctgcacctggaaaagaagcacggcgaggactggggaaaggtgtacgacgaggcctgggagcggattgacaagaaagtggaaggcctgagcaagcacatcaagctggaagaggaacggagaagcgaggacgcccagagcaaggccgccctgaccgactggctgcgggctaaggccagcttcgtgatcgagggcctgaaggaggccgacaaggacgagttctgcagatgcgagctgaagctgcagaagtggtacggggacctgcggggaaagcccttcgccatcgaagccgagaacagcatcctggacatcagcggcttcagcaagcagtacaactgtgccttcatctggcagaaggacggcgtgaagaagctgaacctgtacctgatcatcaactacttcaagggcggcaagctgcggttcaagaagatcaaacctgaagccttcgaagccaacagattctacaccgtgatcaacaaaaagagcggcgagatcgtgcccatggaggtgaacttcaacttcgacgaccccaacctgatcatcctgcctctggcctttggcaagagacagggcagagaattcatctggaacgacctgctgtccctggaaaccggcagcctgaagctggccaacggaagagtgatcgagaagacactgtacaacagaagaacccggcaggatgagcctgccctgttcgtggccctgaccttcgagcggcgggaggtcctggactcctccaatatcaaaccaatgaacctgatcggcgtggcaagaggcgaaaacatccccgccgtgatcgccctgaccgaccccgagggctgcccactgagccggtttaaggatagcctgggaaacccaacccacatcctgagaatcggcgagagctataaggagaagcagcggaccatccaggccaagaaggaggtggagcagcggagagccggcggctacagccggaagtacgccagcaaagccaagaatctggcagacgatatggtgagaaacaccgctagagatctgctgtactacgccgtgacccaggatgccatgctgatcttcgccaacctgagccggggcttcggccggcagggcaagcggaccttcatggccgagagacagtacacacggatggaggactggctgaccgccaagctggcctacgagggcctgagcaagacctacctgtccaagacactggcccagtacacctccaagacatgcagcaactgtgggtttaccatcaccagcgccgactacgacagggtgctggagaagctgaagaagacagcaacaggctggatgaccacaattaacggcaaggagctgaaggtggagggccagattacctactacaacagatacaagagacagaacgtagtcaaggacctgtccgtcgagctggatagactgagcgaagaatctgtgaacaacgacatctcctcctggacaaagggcagaagcggagaagctctgagcctcctgaagaaaagattctcccatagacccgtgcaggagaagttcgtgtgcctgaactgcggcttcgagacacacgcagccgagcaagccgccctgaacatcgccagatcctggctgttcctgcggagccaggagtacaagaaataccagacaaacaagacaaccggcaacaccgataagagagccttcgtcgagacctggcagtccttttaccggaagaagcttaaggaggtgtggaaacctgccgtgcggtctggcggatctggcggaggctccacaagctgccaggagcccgtgagcttcgcccaggtggccgtgtacttcagcagggaggagtgggccctgctggaccccgcccagagggccctgtacagggacgtgatgctggagacctaccagtgcgtggccagcctggcccccctgcccgcccccaagcccgtgctgatcagccagctggagggcgaggaggacccctgcatcagcgacgtgaggagccccgaggccgtgcccggcgacctgagccccaccagccccaagaaaaagagaaaagtctaagctgccttctgcggggcttgccttctggccatgcccttcttctctcccttgcacctgtacctcttggtctttgaataaagcctgagtaggaaggctagcaaaaaaaaaaaaaaaaaaaaaaaaaaaaaaaaaaaaaaaaaaaaaaaaaaaaaaaaaaaaaaaaaaaaaaaaaaaaaaaa

SEQ ID NO: 6303 - RNA, 5830 nt, synthetic construct
  source 1..5830: mol_type = other RNA
aggaaataagagagaaaagaagagtaagaagaaatataagagccaccatggcccctaagaagaagcgtaaagtgagccggatggaacgcctcgtctacgaggtgcggcagaagtgcagaaacatcgaggacatctgcatctcctgcggatctctgaacgtgaccctggagcacccactgttcatcggcggcatgtgccagaactgtaaaaactgttttctggagtgtgcctatcaatacgacgatgacggctaccagagctactgcaccatctgttgcggcggaagagaggtgctgatgtgtggaaataacaactgctgccggtgcttctgcgtggaatgcgtggacctgctggtgggccccggcgccgcccaggccgctattaaggaagatccttggaactgctacatgtgcggccacaagggcacatacggcctgctgagacggagagaggactggcctagcagactgcagatgttcttcgccaataaccacgaccaggagttcgacccccctaaggtgtaccctcccgtccccgccgagaagagaaagcccatccgggtcctgagcctgttcgatggcatcgccaccggtctgctggtgctgaaggacctgggcatccaggtggataggtacattgcctccgaggtgtgcgaggactccatcaccgtgggaatggtgcgtcatcagggcaagatcatgtacgtgggcgacgtgcggagcgtgacacagaagcatatccaggagtggggccctttcgacctggtgatcggcggcagcccttgcaatgacctgagcatcgtgaacccagcccggaagggcctgtacgagggaaccggcagactgttcttcgagttttacagactgctgcacgacgcccggcctaaggaaggcgacgaccggcccttcttttggctgttcgagaatgtggtggccatgggagtcagcgacaagcgggatattagccggttcctggagagcaaccccgtgatgatcgatgccaaggaagtgagcgccgcccaccgggccagatacttctggggcaatctgcctggcatgaacagacccctggccagcaccgtgaacgacaagctggagctgcaggagtgcctggagcacggccggatcgccaagttcagcaaggtgagaaccatcaccacccgaagcaacagcatcaaacaaggcaaggaccagcactttcctgtgttcatgaacgagaaggaggacatcctgtggtgtaccgagatggagagagtgttcgggttcccagtccactacacagatgtcagcaacatgtctagactggccagacagagactgctgggaagaagctggtccgtccctgtgatcagacacctgttcgcccctctgaaggagtacttcgcctgcgtgagcagcggcaacagcaacgccaacagccggggccccagcttctctagcggcctggtgccactgtccctgagagggagccacatgggccccatggagatctacaaaaccgtgagcgcctggaagcggcagcctgtgcgcgtgctgagcctgtttcggaatatcgataaagtcctgaaaagcctgggattcctggagagcggctctggctccggcggtggcaccctgaagtacgtggaggatgtgacaaacgtggtcagacgggatgtggagaagtggggccccttcgatctggtgtacggcagcacccaacccctgggcagctcttgtgaccggtgccctggctggtacatgtttcagttccaccggatcctgcagtacgccctgccgagacaggagtcccagcggccattcttttggattttcatggacaacttgctgctgaccgaggatgaccaggaaactaccactcggttcctgcagaccgaagccgtgaccctgcaggacgtgagaggccgggactaccagaacgccatgcgggtgtggtccaacatccctggactgaaaagcaagcacgcacctctgacccctaaagaagaggagtacctgcaggcccaggtgcggagcagaagcaagctggacgcccctaaggtggatctgctggtgaagaattgcctcctgcccctgagagagtacttcaagtatttcagccagaatagtctgcccctgggcggcccaagcagcggcgcccctcctcccagcggcggcagcccagccggctccccaacctctaccgaggagggcacctctgagtccgccacccccgagagcggccctggcacctccaccgagcccagcgagggcagcgcacccggcagccctgccggcagccccacctccacagaggagggaaccagcaccgagcccagcgaaggcagcgccccaggcaccagcaccgagcctagtgagggcggctctggcggcggcagcgcccaggagattaaacggatcaacaagatcagaagaagacttgtgaaagacagcaacaccaagaaggccggcaagacaggccccatgaaaaccctgctggttagagtgatgacacccgatctgagagagcggctggaaaacctgagaaagaagcctgaaaatatcccccagcccatcagcaatacatctagagccaacctgaataagctgctgaccgattacaccgaaatgaagaaggcgatcctgcatgtgtactgggaagagttccagaaggaccctgtgggcctgatgagccgggtggcccagcctgccagcaagaagatcgatcagaacaagctgaaacctgagatggacgagaagggcaacctgaccaccgccggctttgcctgctctcagtgtggccagcccctgttcgtgtacaagctggagcaggtgtctgagaagggcaaggcttacaccaactacttcggacggtgcaatgtggccgagcacgaaaagctgatcctgctggcccagctgaagcccgagaaggatagcgacgaagccgtgacatatagcctgggaaagtttgggcagagggccctggatttctacagcattcatgtgaccaaggagtccacccaccccgtgaagcccctggcccagatcgccggaaacagatacgcctccggacctgtgggaaaggccctgagcgacgcatgtatgggcacaatcgcctccttcctgtctaagtaccaggacatcatcatcgaacaccagaaggtggtgaagggcaaccagaagagactggagagcctgcgggagctggccggcaaggaaaacctggaataccctagcgtgaccctgccacctcagcctcacaccaaggagggcgttgatgcctacaacgaagtgatcgcccgggtgcgaatgtgggtgaacctgaacctgtggcagaagctgaagctaagcagagatgatgccaagcctctgctgagactgaagggattcccttcctttcctctggtcgagagacaggccaacgaagtggactggtgggacatggtgtgtaacgtgaagaagctgatcaacgagaaaaaggaggatggcaaggtgttttggcagaatctggctggctacaagagacaggaagccctgagaccatacctgagcagcgaggaagatcggaagaagggaaagaaattcgctcggtaccagctgggcgacctgctgctgcacctggaaaagaagcacggcgaggactggggaaaggtgtacgacgaggcctgggagcggattgacaagaaagtggaaggcctgagcaagcacatcaagctggaagaggaacggagaagcgaggacgcccagagcaaggccgccctgaccgactggctgcgggctaaggccagcttcgtgatcgagggcctgaaggaggccgacaaggacgagttctgcagatgcgagctgaagctgcagaagtggtacggggacctgcggggaaagcccttcgccatcgaagccgagaacagcatcctggacatcagcggcttcagcaagcagtacaactgtgccttcatctggcagaaggacggcgtgaagaagctgaacctgtacctgatcatcaactacttcaagggcggcaagctgcggttcaagaagatcaaacctgaagccttcgaagccaacagattctacaccgtgatcaacaaaaagagcggcgagatcgtgcccatggaggtgaacttcaacttcgacgaccccaacctgatcatcctgcctctggcctttggcaagagacagggcagagaattcatctggaacgacctgctgtccctggaaaccggcagcctgaagctggccaacggaagagtgatcgagaagacactgtacaacagaagaacccggcaggatgagcctgccctgttcgtggccctgaccttcgagcggcgggaggtcctggactcctccaatatcaaaccaatgaacctgatcggcgtggcaagaggcgaaaacatccccgccgtgatcgccctgaccgaccccgagggctgcccactgagccggtttaaggatagcctgggaaacccaacccacatcctgagaatcggcgagagctataaggagaagcagcggaccatccaggccaagaaggaggtggagcagcggagagccggcggctacagccggaagtacgccagcaaagccaagaatctggcagacgatatggtgagaaacaccgctagagatctgctgtactacgccgtgacccaggatgccatgctgatcttcgccaacctgagccggggcttcggccggcagggcaagcggaccttcatggccgagagacagtacacacggatggaggactggctgaccgccaagctggcctacgagggcctgagcaagacctacctgtccaagacactggcccagtacacctccaagacatgcagcaactgtgggtttaccatcaccagcgccgactacgacagggtgctggagaagctgaagaagacagcaacaggctggatgaccacaattaacggcaaggagctgaaggtggagggccagattacctactacaacagatacaagagacagaacgtagtcaaggacctgtccgtcgagctggatagactgagcgaagaatctgtgaacaacgacatctcctcctggacaaagggcagaagcggagaagctctgagcctcctgaagaaaagattctcccatagacccgtgcaggagaagttcgtgtgcctgaactgcggcttcgagacacacgcagccgagcaagccgccctgaacatcgccagatcctggctgttcctgcggagccaggagtacaagaaataccagacaaacaagacaaccggcaacaccgataagagagccttcgtcgagacctggcagtccttttaccggaagaagcttaaggaggtgtggaaacctgccgtgcggtctggcggatctggcggaggctccacaagcgtgaagttcgacgaggtggccgtggtgttcagcgaggacgagtggaacctgctgaccgaccagcagaggggcctgtacatggaggtgatgaaggagaactacgagcacctgatctacctgggcttcgaggtgcccgtgatcctgagcctgctgcaggacggcggcggcatcggcagcgacaccgtgacccagagcaagagccagcaggtggccggcgccgaggagagcaagagcagcgtgaccctggagggccccatccccgagaccctgcccagcaccagccccaagaaaaagagaaaagtctaagctgccttctgcggggcttgccttctggccatgcccttcttctctcccttgcacctgtacctcttggtctttgaataaagcctgagtaggaaggctagcaaaaaaaaaaaaaaaaaaaaaaaaaaaaaaaaaaaaaaaaaaaaaaaaaaaaaaaaaaaaaaaaaaaaaaaaaaaaaaaa

SEQ ID NO: 6304 - RNA, 5797 nt, synthetic construct
  source 1..5797: mol_type = other RNA
aggaaataagagagaaaagaagagtaagaagaaatataagagccaccatggcccctaagaagaagcgtaaagtgagccggatggaacgcctcgtctacgaggtgcggcagaagtgcagaaacatcgaggacatctgcatctcctgcggatctctgaacgtgaccctggagcacccactgttcatcggcggcatgtgccagaactgtaaaaactgttttctggagtgtgcctatcaatacgacgatgacggctaccagagctactgcaccatctgttgcggcggaagagaggtgctgatgtgtggaaataacaactgctgccggtgcttctgcgtggaatgcgtggacctgctggtgggccccggcgccgcccaggccgctattaaggaagatccttggaactgctacatgtgcggccacaagggcacatacggcctgctgagacggagagaggactggcctagcagactgcagatgttcttcgccaataaccacgaccaggagttcgacccccctaaggtgtaccctcccgtccccgccgagaagagaaagcccatccgggtcctgagcctgttcgatggcatcgccaccggtctgctggtgctgaaggacctgggcatccaggtggataggtacattgcctccgaggtgtgcgaggactccatcaccgtgggaatggtgcgtcatcagggcaagatcatgtacgtgggcgacgtgcggagcgtgacacagaagcatatccaggagtggggccctttcgacctggtgatcggcggcagcccttgcaatgacctgagcatcgtgaacccagcccggaagggcctgtacgagggaaccggcagactgttcttcgagttttacagactgctgcacgacgcccggcctaaggaaggcgacgaccggcccttcttttggctgttcgagaatgtggtggccatgggagtcagcgacaagcgggatattagccggttcctggagagcaaccccgtgatgatcgatgccaaggaagtgagcgccgcccaccgggccagatacttctggggcaatctgcctggcatgaacagacccctggccagcaccgtgaacgacaagctggagctgcaggagtgcctggagcacggccggatcgccaagttcagcaaggtgagaaccatcaccacccgaagcaacagcatcaaacaaggcaaggaccagcactttcctgtgttcatgaacgagaaggaggacatcctgtggtgtaccgagatggagagagtgttcgggttcccagtccactacacagatgtcagcaacatgtctagactggccagacagagactgctgggaagaagctggtccgtccctgtgatcagacacctgttcgcccctctgaaggagtacttcgcctgcgtgagcagcggcaacagcaacgccaacagccggggccccagcttctctagcggcctggtgccactgtccctgagagggagccacatgggccccatggagatctacaaaaccgtgagcgcctggaagcggcagcctgtgcgcgtgctgagcctgtttcggaatatcgataaagtcctgaaaagcctgggattcctggagagcggctctggctccggcggtggcaccctgaagtacgtggaggatgtgacaaacgtggtcagacgggatgtggagaagtggggccccttcgatctggtgtacggcagcacccaacccctgggcagctcttgtgaccggtgccctggctggtacatgtttcagttccaccggatcctgcagtacgccctgccgagacaggagtcccagcggccattcttttggattttcatggacaacttgctgctgaccgaggatgaccaggaaactaccactcggttcctgcagaccgaagccgtgaccctgcaggacgtgagaggccgggactaccagaacgccatgcgggtgtggtccaacatccctggactgaaaagcaagcacgcacctctgacccctaaagaagaggagtacctgcaggcccaggtgcggagcagaagcaagctggacgcccctaaggtggatctgctggtgaagaattgcctcctgcccctgagagagtacttcaagtatttcagccagaatagtctgcccctgggcggcccaagcagcggcgcccctcctcccagcggcggcagcccagccggctccccaacctctaccgaggagggcacctctgagtccgccacccccgagagcggccctggcacctccaccgagcccagcgagggcagcgcacccggcagccctgccggcagccccacctccacagaggagggaaccagcaccgagcccagcgaaggcagcgccccaggcaccagcaccgagcctagtgagggcggctctggcggcggcagcgcccaggagattaaacggatcaacaagatcagaagaagacttgtgaaagacagcaacaccaagaaggccggcaagacaggccccatgaaaaccctgctggttagagtgatgacacccgatctgagagagcggctggaaaacctgagaaagaagcctgaaaatatcccccagcccatcagcaatacatctagagccaacctgaataagctgctgaccgattacaccgaaatgaagaaggcgatcctgcatgtgtactgggaagagttccagaaggaccctgtgggcctgatgagccgggtggcccagcctgccagcaagaagatcgatcagaacaagctgaaacctgagatggacgagaagggcaacctgaccaccgccggctttgcctgctctcagtgtggccagcccctgttcgtgtacaagctggagcaggtgtctgagaagggcaaggcttacaccaactacttcggacggtgcaatgtggccgagcacgaaaagctgatcctgctggcccagctgaagcccgagaaggatagcgacgaagccgtgacatatagcctgggaaagtttgggcagagggccctggatttctacagcattcatgtgaccaaggagtccacccaccccgtgaagcccctggcccagatcgccggaaacagatacgcctccggacctgtgggaaaggccctgagcgacgcatgtatgggcacaatcgcctccttcctgtctaagtaccaggacatcatcatcgaacaccagaaggtggtgaagggcaaccagaagagactggagagcctgcgggagctggccggcaaggaaaacctggaataccctagcgtgaccctgccacctcagcctcacaccaaggagggcgttgatgcctacaacgaagtgatcgcccgggtgcgaatgtgggtgaacctgaacctgtggcagaagctgaagctaagcagagatgatgccaagcctctgctgagactgaagggattcccttcctttcctctggtcgagagacaggccaacgaagtggactggtgggacatggtgtgtaacgtgaagaagctgatcaacgagaaaaaggaggatggcaaggtgttttggcagaatctggctggctacaagagacaggaagccctgagaccatacctgagcagcgaggaagatcggaagaagggaaagaaattcgctcggtaccagctgggcgacctgctgctgcacctggaaaagaagcacggcgaggactggggaaaggtgtacgacgaggcctgggagcggattgacaagaaagtggaaggcctgagcaagcacatcaagctggaagaggaacggagaagcgaggacgcccagagcaaggccgccctgaccgactggctgcgggctaaggccagcttcgtgatcgagggcctgaaggaggccgacaaggacgagttctgcagatgcgagctgaagctgcagaagtggtacggggacctgcggggaaagcccttcgccatcgaagccgagaacagcatcctggacatcagcggcttcagcaagcagtacaactgtgccttcatctggcagaaggacggcgtgaagaagctgaacctgtacctgatcatcaactacttcaagggcggcaagctgcggttcaagaagatcaaacctgaagccttcgaagccaacagattctacaccgtgatcaacaaaaagagcggcgagatcgtgcccatggaggtgaacttcaacttcgacgaccccaacctgatcatcctgcctctggcctttggcaagagacagggcagagaattcatctggaacgacctgctgtccctggaaaccggcagcctgaagctggccaacggaagagtgatcgagaagacactgtacaacagaagaacccggcaggatgagcctgccctgttcgtggccctgaccttcgagcggcgggaggtcctggactcctccaatatcaaaccaatgaacctgatcggcgtggcaagaggcgaaaacatccccgccgtgatcgccctgaccgaccccgagggctgcccactgagccggtttaaggatagcctgggaaacccaacccacatcctgagaatcggcgagagctataaggagaagcagcggaccatccaggccaagaaggaggtggagcagcggagagccggcggctacagccggaagtacgccagcaaagccaagaatctggcagacgatatggtgagaaacaccgctagagatctgctgtactacgccgtgacccaggatgccatgctgatcttcgccaacctgagccggggcttcggccggcagggcaagcggaccttcatggccgagagacagtacacacggatggaggactggctgaccgccaagctggcctacgagggcctgagcaagacctacctgtccaagacactggcccagtacacctccaagacatgcagcaactgtgggtttaccatcaccagcgccgactacgacagggtgctggagaagctgaagaagacagcaacaggctggatgaccacaattaacggcaaggagctgaaggtggagggccagattacctactacaacagatacaagagacagaacgtagtcaaggacctgtccgtcgagctggatagactgagcgaagaatctgtgaacaacgacatctcctcctggacaaagggcagaagcggagaagctctgagcctcctgaagaaaagattctcccatagacccgtgcaggagaagttcgtgtgcctgaactgcggcttcgagacacacgcagccgagcaagccgccctgaacatcgccagatcctggctgttcctgcggagccaggagtacaagaaataccagacaaacaagacaaccggcaacaccgataagagagccttcgtcgagacctggcagtccttttaccggaagaagcttaaggaggtgtggaaacctgccgtgcggtctggcggatctggcggaggctccacaagcgcccaggccggcgtgagcttcgaggaggtggccgtgcacttcagccccggcgagtggagcctgctgcagcccgcccagagggccctgtacaaggaggtgatgctggagaacttcggccacgtggccagcctgggcccccccggcgccacccccgacctgatcgcctggctgcaggagggcctgttcctgctgggcggcgacgaggaggccggcagcgccggcgacgcctggaggagcgccaccaccagccccaagaaaaagagaaaagtctaagctgccttctgcggggcttgccttctggccatgcccttcttctctcccttgcacctgtacctcttggtctttgaataaagcctgagtaggaaggctagcaaaaaaaaaaaaaaaaaaaaaaaaaaaaaaaaaaaaaaaaaaaaaaaaaaaaaaaaaaaaaaaaaaaaaaaaaaaaaaaa

SEQ ID NO: 6305 - RNA, 5797 nt, synthetic construct
  source 1..5797: mol_type = other RNA
aggaaataagagagaaaagaagagtaagaagaaatataagagccaccatggcccctaagaagaagcgtaaagtgagccggatggaacgcctcgtctacgaggtgcggcagaagtgcagaaacatcgaggacatctgcatctcctgcggatctctgaacgtgaccctggagcacccactgttcatcggcggcatgtgccagaactgtaaaaactgttttctggagtgtgcctatcaatacgacgatgacggctaccagagctactgcaccatctgttgcggcggaagagaggtgctgatgtgtggaaataacaactgctgccggtgcttctgcgtggaatgcgtggacctgctggtgggccccggcgccgcccaggccgctattaaggaagatccttggaactgctacatgtgcggccacaagggcacatacggcctgctgagacggagagaggactggcctagcagactgcagatgttcttcgccaataaccacgaccaggagttcgacccccctaaggtgtaccctcccgtccccgccgagaagagaaagcccatccgggtcctgagcctgttcgatggcatcgccaccggtctgctggtgctgaaggacctgggcatccaggtggataggtacattgcctccgaggtgtgcgaggactccatcaccgtgggaatggtgcgtcatcagggcaagatcatgtacgtgggcgacgtgcggagcgtgacacagaagcatatccaggagtggggccctttcgacctggtgatcggcggcagcccttgcaatgacctgagcatcgtgaacccagcccggaagggcctgtacgagggaaccggcagactgttcttcgagttttacagactgctgcacgacgcccggcctaaggaaggcgacgaccggcccttcttttggctgttcgagaatgtggtggccatgggagtcagcgacaagcgggatattagccggttcctggagagcaaccccgtgatgatcgatgccaaggaagtgagcgccgcccaccgggccagatacttctggggcaatctgcctggcatgaacagacccctggccagcaccgtgaacgacaagctggagctgcaggagtgcctggagcacggccggatcgccaagttcagcaaggtgagaaccatcaccacccgaagcaacagcatcaaacaaggcaaggaccagcactttcctgtgttcatgaacgagaaggaggacatcctgtggtgtaccgagatggagagagtgttcgggttcccagtccactacacagatgtcagcaacatgtctagactggccagacagagactgctgggaagaagctggtccgtccctgtgatcagacacctgttcgcccctctgaaggagtacttcgcctgcgtgagcagcggcaacagcaacgccaacagccggggccccagcttctctagcggcctggtgccactgtccctgagagggagccacatgggccccatggagatctacaaaaccgtgagcgcctggaagcggcagcctgtgcgcgtgctgagcctgtttcggaatatcgataaagtcctgaaaagcctgggattcctggagagcggctctggctccggcggtggcaccctgaagtacgtggaggatgtgacaaacgtggtcagacgggatgtggagaagtggggccccttcgatctggtgtacggcagcacccaacccctgggcagctcttgtgaccggtgccctggctggtacatgtttcagttccaccggatcctgcagtacgccctgccgagacaggagtcccagcggccattcttttggattttcatggacaacttgctgctgaccgaggatgaccaggaaactaccactcggttcctgcagaccgaagccgtgaccctgcaggacgtgagaggccgggactaccagaacgccatgcgggtgtggtccaacatccctggactgaaaagcaagcacgcacctctgacccctaaagaagaggagtacctgcaggcccaggtgcggagcagaagcaagctggacgcccctaaggtggatctgctggtgaagaattgcctcctgcccctgagagagtacttcaagtatttcagccagaatagtctgcccctgggcggcccaagcagcggcgcccctcctcccagcggcggcagcccagccggctccccaacctctaccgaggagggcacctctgagtccgccacccccgagagcggccctggcacctccaccgagcccagcgagggcagcgcacccggcagccctgccggcagccccacctccacagaggagggaaccagcaccgagcccagcgaaggcagcgccccaggcaccagcaccgagcctagtgagggcggctctggcggcggcagcgcccaggagattaaacggatcaacaagatcagaagaagacttgtgaaagacagcaacaccaagaaggccggcaagacaggccccatgaaaaccctgctggttagagtgatgacacccgatctgagagagcggctggaaaacctgagaaagaagcctgaaaatatcccccagcccatcagcaatacatctagagccaacctgaataagctgctgaccgattacaccgaaatgaagaaggcgatcctgcatgtgtactgggaagagttccagaaggaccctgtgggcctgatgagccgggtggcccagcctgccagcaagaagatcgatcagaacaagctgaaacctgagatggacgagaagggcaacctgaccaccgccggctttgcctgctctcagtgtggccagcccctgttcgtgtacaagctggagcaggtgtctgagaagggcaaggcttacaccaactacttcggacggtgcaatgtggccgagcacgaaaagctgatcctgctggcccagctgaagcccgagaaggatagcgacgaagccgtgacatatagcctgggaaagtttgggcagagggccctggatttctacagcattcatgtgaccaaggagtccacccaccccgtgaagcccctggcccagatcgccggaaacagatacgcctccggacctgtgggaaaggccctgagcgacgcatgtatgggcacaatcgcctccttcctgtctaagtaccaggacatcatcatcgaacaccagaaggtggtgaagggcaaccagaagagactggagagcctgcgggagctggccggcaaggaaaacctggaataccctagcgtgaccctgccacctcagcctcacaccaaggagggcgttgatgcctacaacgaagtgatcgcccgggtgcgaatgtgggtgaacctgaacctgtggcagaagctgaagctaagcagagatgatgccaagcctctgctgagactgaagggattcccttcctttcctctggtcgagagacaggccaacgaagtggactggtgggacatggtgtgtaacgtgaagaagctgatcaacgagaaaaaggaggatggcaaggtgttttggcagaatctggctggctacaagagacaggaagccctgagaccatacctgagcagcgaggaagatcggaagaagggaaagaaattcgctcggtaccagctgggcgacctgctgctgcacctggaaaagaagcacggcgaggactggggaaaggtgtacgacgaggcctgggagcggattgacaagaaagtggaaggcctgagcaagcacatcaagctggaagaggaacggagaagcgaggacgcccagagcaaggccgccctgaccgactggctgcgggctaaggccagcttcgtgatcgagggcctgaaggaggccgacaaggacgagttctgcagatgcgagctgaagctgcagaagtggtacggggacctgcggggaaagcccttcgccatcgaagccgagaacagcatcctggacatcagcggcttcagcaagcagtacaactgtgccttcatctggcagaaggacggcgtgaagaagctgaacctgtacctgatcatcaactacttcaagggcggcaagctgcggttcaagaagatcaaacctgaagccttcgaagccaacagattctacaccgtgatcaacaaaaagagcggcgagatcgtgcccatggaggtgaacttcaacttcgacgaccccaacctgatcatcctgcctctggcctttggcaagagacagggcagagaattcatctggaacgacctgctgtccctggaaaccggcagcctgaagctggccaacggaagagtgatcgagaagacactgtacaacagaagaacccggcaggatgagcctgccctgttcgtggccctgaccttcgagcggcgggaggtcctggactcctccaatatcaaaccaatgaacctgatcggcgtggcaagaggcgaaaacatccccgccgtgatcgccctgaccgaccccgagggctgcccactgagccggtttaaggatagcctgggaaacccaacccacatcctgagaatcggcgagagctataaggagaagcagcggaccatccaggccaagaaggaggtggagcagcggagagccggcggctacagccggaagtacgccagcaaagccaagaatctggcagacgatatggtgagaaacaccgctagagatctgctgtactacgccgtgacccaggatgccatgctgatcttcgccaacctgagccggggcttcggccggcagggcaagcggaccttcatggccgagagacagtacacacggatggaggactggctgaccgccaagctggcctacgagggcctgagcaagacctacctgtccaagacactggcccagtacacctccaagacatgcagcaactgtgggtttaccatcaccagcgccgactacgacagggtgctggagaagctgaagaagacagcaacaggctggatgaccacaattaacggcaaggagctgaaggtggagggccagattacctactacaacagatacaagagacagaacgtagtcaaggacctgtccgtcgagctggatagactgagcgaagaatctgtgaacaacgacatctcctcctggacaaagggcagaagcggagaagctctgagcctcctgaagaaaagattctcccatagacccgtgcaggagaagttcgtgtgcctgaactgcggcttcgagacacacgcagccgagcaagccgccctgaacatcgccagatcctggctgttcctgcggagccaggagtacaagaaataccagacaaacaagacaaccggcaacaccgataagagagccttcgtcgagacctggcagtccttttaccggaagaagcttaaggaggtgtggaaacctgccgtgcggtctggcggatctggcggaggctccacaagcagccagggcagcgtgagcttcaaggacgtgaccgtggacttcacccaggaggagtggcagcagctggaccccgcccagaaggccctgtacagggacgtgatgctggagaactactgccacttcatcgccgtgggcttccacatgaccaagcccgacatgatcaggaagctggagcagggcgaggagctgtggacccagaggatcttccccagctacagctacctggaggaggacggcaagaccaccagccccaagaaaaagagaaaagtctaagctgccttctgcggggcttgccttctggccatgcccttcttctctcccttgcacctgtacctcttggtctttgaataaagcctgagtaggaaggctagcaaaaaaaaaaaaaaaaaaaaaaaaaaaaaaaaaaaaaaaaaaaaaaaaaaaaaaaaaaaaaaaaaaaaaaaaaaaaaaaa

SEQ ID NO: 6306 - RNA, 5797 nt, synthetic construct
  source 1..5797: mol_type = other RNA
aggaaataagagagaaaagaagagtaagaagaaatataagagccaccatggcccctaagaagaagcgtaaagtgagccggatggaacgcctcgtctacgaggtgcggcagaagtgcagaaacatcgaggacatctgcatctcctgcggatctctgaacgtgaccctggagcacccactgttcatcggcggcatgtgccagaactgtaaaaactgttttctggagtgtgcctatcaatacgacgatgacggctaccagagctactgcaccatctgttgcggcggaagagaggtgctgatgtgtggaaataacaactgctgccggtgcttctgcgtggaatgcgtggacctgctggtgggccccggcgccgcccaggccgctattaaggaagatccttggaactgctacatgtgcggccacaagggcacatacggcctgctgagacggagagaggactggcctagcagactgcagatgttcttcgccaataaccacgaccaggagttcgacccccctaaggtgtaccctcccgtccccgccgagaagagaaagcccatccgggtcctgagcctgttcgatggcatcgccaccggtctgctggtgctgaaggacctgggcatccaggtggataggtacattgcctccgaggtgtgcgaggactccatcaccgtgggaatggtgcgtcatcagggcaagatcatgtacgtgggcgacgtgcggagcgtgacacagaagcatatccaggagtggggccctttcgacctggtgatcggcggcagcccttgcaatgacctgagcatcgtgaacccagcccggaagggcctgtacgagggaaccggcagactgttcttcgagttttacagactgctgcacgacgcccggcctaaggaaggcgacgaccggcccttcttttggctgttcgagaatgtggtggccatgggagtcagcgacaagcgggatattagccggttcctggagagcaaccccgtgatgatcgatgccaaggaagtgagcgccgcccaccgggccagatacttctggggcaatctgcctggcatgaacagacccctggccagcaccgtgaacgacaagctggagctgcaggagtgcctggagcacggccggatcgccaagttcagcaaggtgagaaccatcaccacccgaagcaacagcatcaaacaaggcaaggaccagcactttcctgtgttcatgaacgagaaggaggacatcctgtggtgtaccgagatggagagagtgttcgggttcccagtccactacacagatgtcagcaacatgtctagactggccagacagagactgctgggaagaagctggtccgtccctgtgatcagacacctgttcgcccctctgaaggagtacttcgcctgcgtgagcagcggcaacagcaacgccaacagccggggccccagcttctctagcggcctggtgccactgtccctgagagggagccacatgggccccatggagatctacaaaaccgtgagcgcctggaagcggcagcctgtgcgcgtgctgagcctgtttcggaatatcgataaagtcctgaaaagcctgggattcctggagagcggctctggctccggcggtggcaccctgaagtacgtggaggatgtgacaaacgtggtcagacgggatgtggagaagtggggccccttcgatctggtgtacggcagcacccaacccctgggcagctcttgtgaccggtgccctggctggtacatgtttcagttccaccggatcctgcagtacgccctgccgagacaggagtcccagcggccattcttttggattttcatggacaacttgctgctgaccgaggatgaccaggaaactaccactcggttcctgcagaccgaagccgtgaccctgcaggacgtgagaggccgggactaccagaacgccatgcgggtgtggtccaacatccctggactgaaaagcaagcacgcacctctgacccctaaagaagaggagtacctgcaggcccaggtgcggagcagaagcaagctggacgcccctaaggtggatctgctggtgaagaattgcctcctgcccctgagagagtacttcaagtatttcagccagaatagtctgcccctgggcggcccaagcagcggcgcccctcctcccagcggcggcagcccagccggctccccaacctctaccgaggagggcacctctgagtccgccacccccgagagcggccctggcacctccaccgagcccagcgagggcagcgcacccggcagccctgccggcagccccacctccacagaggagggaaccagcaccgagcccagcgaaggcagcgccccaggcaccagcaccgagcctagtgagggcggctctggcggcggcagcgcccaggagattaaacggatcaacaagatcagaagaagacttgtgaaagacagcaacaccaagaaggccggcaagacaggccccatgaaaaccctgctggttagagtgatgacacccgatctgagagagcggctggaaaacctgagaaagaagcctgaaaatatcccccagcccatcagcaatacatctagagccaacctgaataagctgctgaccgattacaccgaaatgaagaaggcgatcctgcatgtgtactgggaagagttccagaaggaccctgtgggcctgatgagccgggtggcccagcctgccagcaagaagatcgatcagaacaagctgaaacctgagatggacgagaagggcaacctgaccaccgccggctttgcctgctctcagtgtggccagcccctgttcgtgtacaagctggagcaggtgtctgagaagggcaaggcttacaccaactacttcggacggtgcaatgtggccgagcacgaaaagctgatcctgctggcccagctgaagcccgagaaggatagcgacgaagccgtgacatatagcctgggaaagtttgggcagagggccctggatttctacagcattcatgtgaccaaggagtccacccaccccgtgaagcccctggcccagatcgccggaaacagatacgcctccggacctgtgggaaaggccctgagcgacgcatgtatgggcacaatcgcctccttcctgtctaagtaccaggacatcatcatcgaacaccagaaggtggtgaagggcaaccagaagagactggagagcctgcgggagctggccggcaaggaaaacctggaataccctagcgtgaccctgccacctcagcctcacaccaaggagggcgttgatgcctacaacgaagtgatcgcccgggtgcgaatgtgggtgaacctgaacctgtggcagaagctgaagctaagcagagatgatgccaagcctctgctgagactgaagggattcccttcctttcctctggtcgagagacaggccaacgaagtggactggtgggacatggtgtgtaacgtgaagaagctgatcaacgagaaaaaggaggatggcaaggtgttttggcagaatctggctggctacaagagacaggaagccctgagaccatacctgagcagcgaggaagatcggaagaagggaaagaaattcgctcggtaccagctgggcgacctgctgctgcacctggaaaagaagcacggcgaggactggggaaaggtgtacgacgaggcctgggagcggattgacaagaaagtggaaggcctgagcaagcacatcaagctggaagaggaacggagaagcgaggacgcccagagcaaggccgccctgaccgactggctgcgggctaaggccagcttcgtgatcgagggcctgaaggaggccgacaaggacgagttctgcagatgcgagctgaagctgcagaagtggtacggggacctgcggggaaagcccttcgccatcgaagccgagaacagcatcctggacatcagcggcttcagcaagcagtacaactgtgccttcatctggcagaaggacggcgtgaagaagctgaacctgtacctgatcatcaactacttcaagggcggcaagctgcggttcaagaagatcaaacctgaagccttcgaagccaacagattctacaccgtgatcaacaaaaagagcggcgagatcgtgcccatggaggtgaacttcaacttcgacgaccccaacctgatcatcctgcctctggcctttggcaagagacagggcagagaattcatctggaacgacctgctgtccctggaaaccggcagcctgaagctggccaacggaagagtgatcgagaagacactgtacaacagaagaacccggcaggatgagcctgccctgttcgtggccctgaccttcgagcggcgggaggtcctggactcctccaatatcaaaccaatgaacctgatcggcgtggcaagaggcgaaaacatccccgccgtgatcgccctgaccgaccccgagggctgcccactgagccggtttaaggatagcctgggaaacccaacccacatcctgagaatcggcgagagctataaggagaagcagcggaccatccaggccaagaaggaggtggagcagcggagagccggcggctacagccggaagtacgccagcaaagccaagaatctggcagacgatatggtgagaaacaccgctagagatctgctgtactacgccgtgacccaggatgccatgctgatcttcgccaacctgagccggggcttcggccggcagggcaagcggaccttcatggccgagagacagtacacacggatggaggactggctgaccgccaagctggcctacgagggcctgagcaagacctacctgtccaagacactggcccagtacacctccaagacatgcagcaactgtgggtttaccatcaccagcgccgactacgacagggtgctggagaagctgaagaagacagcaacaggctggatgaccacaattaacggcaaggagctgaaggtggagggccagattacctactacaacagatacaagagacagaacgtagtcaaggacctgtccgtcgagctggatagactgagcgaagaatctgtgaacaacgacatctcctcctggacaaagggcagaagcggagaagctctgagcctcctgaagaaaagattctcccatagacccgtgcaggagaagttcgtgtgcctgaactgcggcttcgagacacacgcagccgagcaagccgccctgaacatcgccagatcctggctgttcctgcggagccaggagtacaagaaataccagacaaacaagacaaccggcaacaccgataagagagccttcgtcgagacctggcagtccttttaccggaagaagcttaaggaggtgtggaaacctgccgtgcggtctggcggatctggcggaggctccacaagcaagcccgccgccgtgagcttcgccgacgtggccgtgtacttcagccccgaggagtggggctgcctgaggcccgcccagagggccctgtacagggaggtgatgagggagacctacggcctgctgggcgccctgggcggcggcggcaccaagcccgccctgatctgctgggtggagagggacgccgagctgtggggccccgacgcccaggaccccgccgccgccgccgccaggggctacggcaccaccagccccaagaaaaagagaaaagtctaagctgccttctgcggggcttgccttctggccatgcccttcttctctcccttgcacctgtacctcttggtctttgaataaagcctgagtaggaaggctagcaaaaaaaaaaaaaaaaaaaaaaaaaaaaaaaaaaaaaaaaaaaaaaaaaaaaaaaaaaaaaaaaaaaaaaaaaaaaaaaa

SEQ ID NO: 6307 - RNA, 5797 nt, synthetic construct
  source 1..5797: mol_type = other RNA
aggaaataagagagaaaagaagagtaagaagaaatataagagccaccatggcccctaagaagaagcgtaaagtgagccggatggaacgcctcgtctacgaggtgcggcagaagtgcagaaacatcgaggacatctgcatctcctgcggatctctgaacgtgaccctggagcacccactgttcatcggcggcatgtgccagaactgtaaaaactgttttctggagtgtgcctatcaatacgacgatgacggctaccagagctactgcaccatctgttgcggcggaagagaggtgctgatgtgtggaaataacaactgctgccggtgcttctgcgtggaatgcgtggacctgctggtgggccccggcgccgcccaggccgctattaaggaagatccttggaactgctacatgtgcggccacaagggcacatacggcctgctgagacggagagaggactggcctagcagactgcagatgttcttcgccaataaccacgaccaggagttcgacccccctaaggtgtaccctcccgtccccgccgagaagagaaagcccatccgggtcctgagcctgttcgatggcatcgccaccggtctgctggtgctgaaggacctgggcatccaggtggataggtacattgcctccgaggtgtgcgaggactccatcaccgtgggaatggtgcgtcatcagggcaagatcatgtacgtgggcgacgtgcggagcgtgacacagaagcatatccaggagtggggccctttcgacctggtgatcggcggcagcccttgcaatgacctgagcatcgtgaacccagcccggaagggcctgtacgagggaaccggcagactgttcttcgagttttacagactgctgcacgacgcccggcctaaggaaggcgacgaccggcccttcttttggctgttcgagaatgtggtggccatgggagtcagcgacaagcgggatattagccggttcctggagagcaaccccgtgatgatcgatgccaaggaagtgagcgccgcccaccgggccagatacttctggggcaatctgcctggcatgaacagacccctggccagcaccgtgaacgacaagctggagctgcaggagtgcctggagcacggccggatcgccaagttcagcaaggtgagaaccatcaccacccgaagcaacagcatcaaacaaggcaaggaccagcactttcctgtgttcatgaacgagaaggaggacatcctgtggtgtaccgagatggagagagtgttcgggttcccagtccactacacagatgtcagcaacatgtctagactggccagacagagactgctgggaagaagctggtccgtccctgtgatcagacacctgttcgcccctctgaaggagtacttcgcctgcgtgagcagcggcaacagcaacgccaacagccggggccccagcttctctagcggcctggtgccactgtccctgagagggagccacatgggccccatggagatctacaaaaccgtgagcgcctggaagcggcagcctgtgcgcgtgctgagcctgtttcggaatatcgataaagtcctgaaaagcctgggattcctggagagcggctctggctccggcggtggcaccctgaagtacgtggaggatgtgacaaacgtggtcagacgggatgtggagaagtggggccccttcgatctggtgtacggcagcacccaacccctgggcagctcttgtgaccggtgccctggctggtacatgtttcagttccaccggatcctgcagtacgccctgccgagacaggagtcccagcggccattcttttggattttcatggacaacttgctgctgaccgaggatgaccaggaaactaccactcggttcctgcagaccgaagccgtgaccctgcaggacgtgagaggccgggactaccagaacgccatgcgggtgtggtccaacatccctggactgaaaagcaagcacgcacctctgacccctaaagaagaggagtacctgcaggcccaggtgcggagcagaagcaagctggacgcccctaaggtggatctgctggtgaagaattgcctcctgcccctgagagagtacttcaagtatttcagccagaatagtctgcccctgggcggcccaagcagcggcgcccctcctcccagcggcggcagcccagccggctccccaacctctaccgaggagggcacctctgagtccgccacccccgagagcggccctggcacctccaccgagcccagcgagggcagcgcacccggcagccctgccggcagccccacctccacagaggagggaaccagcaccgagcccagcgaaggcagcgccccaggcaccagcaccgagcctagtgagggcggctctggcggcggcagcgcccaggagattaaacggatcaacaagatcagaagaagacttgtgaaagacagcaacaccaagaaggccggcaagacaggccccatgaaaaccctgctggttagagtgatgacacccgatctgagagagcggctggaaaacctgagaaagaagcctgaaaatatcccccagcccatcagcaatacatctagagccaacctgaataagctgctgaccgattacaccgaaatgaagaaggcgatcctgcatgtgtactgggaagagttccagaaggaccctgtgggcctgatgagccgggtggcccagcctgccagcaagaagatcgatcagaacaagctgaaacctgagatggacgagaagggcaacctgaccaccgccggctttgcctgctctcagtgtggccagcccctgttcgtgtacaagctggagcaggtgtctgagaagggcaaggcttacaccaactacttcggacggtgcaatgtggccgagcacgaaaagctgatcctgctggcccagctgaagcccgagaaggatagcgacgaagccgtgacatatagcctgggaaagtttgggcagagggccctggatttctacagcattcatgtgaccaaggagtccacccaccccgtgaagcccctggcccagatcgccggaaacagatacgcctccggacctgtgggaaaggccctgagcgacgcatgtatgggcacaatcgcctccttcctgtctaagtaccaggacatcatcatcgaacaccagaaggtggtgaagggcaaccagaagagactggagagcctgcgggagctggccggcaaggaaaacctggaataccctagcgtgaccctgccacctcagcctcacaccaaggagggcgttgatgcctacaacgaagtgatcgcccgggtgcgaatgtgggtgaacctgaacctgtggcagaagctgaagctaagcagagatgatgccaagcctctgctgagactgaagggattcccttcctttcctctggtcgagagacaggccaacgaagtggactggtgggacatggtgtgtaacgtgaagaagctgatcaacgagaaaaaggaggatggcaaggtgttttggcagaatctggctggctacaagagacaggaagccctgagaccatacctgagcagcgaggaagatcggaagaagggaaagaaattcgctcggtaccagctgggcgacctgctgctgcacctggaaaagaagcacggcgaggactggggaaaggtgtacgacgaggcctgggagcggattgacaagaaagtggaaggcctgagcaagcacatcaagctggaagaggaacggagaagcgaggacgcccagagcaaggccgccctgaccgactggctgcgggctaaggccagcttcgtgatcgagggcctgaaggaggccgacaaggacgagttctgcagatgcgagctgaagctgcagaagtggtacggggacctgcggggaaagcccttcgccatcgaagccgagaacagcatcctggacatcagcggcttcagcaagcagtacaactgtgccttcatctggcagaaggacggcgtgaagaagctgaacctgtacctgatcatcaactacttcaagggcggcaagctgcggttcaagaagatcaaacctgaagccttcgaagccaacagattctacaccgtgatcaacaaaaagagcggcgagatcgtgcccatggaggtgaacttcaacttcgacgaccccaacctgatcatcctgcctctggcctttggcaagagacagggcagagaattcatctggaacgacctgctgtccctggaaaccggcagcctgaagctggccaacggaagagtgatcgagaagacactgtacaacagaagaacccggcaggatgagcctgccctgttcgtggccctgaccttcgagcggcgggaggtcctggactcctccaatatcaaaccaatgaacctgatcggcgtggcaagaggcgaaaacatccccgccgtgatcgccctgaccgaccccgagggctgcccactgagccggtttaaggatagcctgggaaacccaacccacatcctgagaatcggcgagagctataaggagaagcagcggaccatccaggccaagaaggaggtggagcagcggagagccggcggctacagccggaagtacgccagcaaagccaagaatctggcagacgatatggtgagaaacaccgctagagatctgctgtactacgccgtgacccaggatgccatgctgatcttcgccaacctgagccggggcttcggccggcagggcaagcggaccttcatggccgagagacagtacacacggatggaggactggctgaccgccaagctggcctacgagggcctgagcaagacctacctgtccaagacactggcccagtacacctccaagacatgcagcaactgtgggtttaccatcaccagcgccgactacgacagggtgctggagaagctgaagaagacagcaacaggctggatgaccacaattaacggcaaggagctgaaggtggagggccagattacctactacaacagatacaagagacagaacgtagtcaaggacctgtccgtcgagctggatagactgagcgaagaatctgtgaacaacgacatctcctcctggacaaagggcagaagcggagaagctctgagcctcctgaagaaaagattctcccatagacccgtgcaggagaagttcgtgtgcctgaactgcggcttcgagacacacgcagccgagcaagccgccctgaacatcgccagatcctggctgttcctgcggagccaggagtacaagaaataccagacaaacaagacaaccggcaacaccgataagagagccttcgtcgagacctggcagtccttttaccggaagaagcttaaggaggtgtggaaacctgccgtgcggtctggcggatctggcggaggctccacaagcctgctgaccttcgaggacgtggccgtgagcttcagcgaggaggagtggaggctgctggaccccgcccagaagagcctgtacaacgacgtgatgcaggagaactacgagaccatcgtgagcctgggcctgaagctgaagaacgacaccggcaacgaccagcccatcagcctgagcgccctggagatccaggccagcggctgcagggtgctgaggaaggccaggatgaaggtggcccagaagaccaccagccccaagaaaaagagaaaagtctaagctgccttctgcggggcttgccttctggccatgcccttcttctctcccttgcacctgtacctcttggtctttgaataaagcctgagtaggaaggctagcaaaaaaaaaaaaaaaaaaaaaaaaaaaaaaaaaaaaaaaaaaaaaaaaaaaaaaaaaaaaaaaaaaaaaaaaaaaaaaaa

SEQ ID NO: 6308 - RNA, 5797 nt, synthetic construct
  source 1..5797: mol_type = other RNA
aggaaataagagagaaaagaagagtaagaagaaatataagagccaccatggcccctaagaagaagcgtaaagtgagccggatggaacgcctcgtctacgaggtgcggcagaagtgcagaaacatcgaggacatctgcatctcctgcggatctctgaacgtgaccctggagcacccactgttcatcggcggcatgtgccagaactgtaaaaactgttttctggagtgtgcctatcaatacgacgatgacggctaccagagctactgcaccatctgttgcggcggaagagaggtgctgatgtgtggaaataacaactgctgccggtgcttctgcgtggaatgcgtggacctgctggtgggccccggcgccgcccaggccgctattaaggaagatccttggaactgctacatgtgcggccacaagggcacatacggcctgctgagacggagagaggactggcctagcagactgcagatgttcttcgccaataaccacgaccaggagttcgacccccctaaggtgtaccctcccgtccccgccgagaagagaaagcccatccgggtcctgagcctgttcgatggcatcgccaccggtctgctggtgctgaaggacctgggcatccaggtggataggtacattgcctccgaggtgtgcgaggactccatcaccgtgggaatggtgcgtcatcagggcaagatcatgtacgtgggcgacgtgcggagcgtgacacagaagcatatccaggagtggggccctttcgacctggtgatcggcggcagcccttgcaatgacctgagcatcgtgaacccagcccggaagggcctgtacgagggaaccggcagactgttcttcgagttttacagactgctgcacgacgcccggcctaaggaaggcgacgaccggcccttcttttggctgttcgagaatgtggtggccatgggagtcagcgacaagcgggatattagccggttcctggagagcaaccccgtgatgatcgatgccaaggaagtgagcgccgcccaccgggccagatacttctggggcaatctgcctggcatgaacagacccctggccagcaccgtgaacgacaagctggagctgcaggagtgcctggagcacggccggatcgccaagttcagcaaggtgagaaccatcaccacccgaagcaacagcatcaaacaaggcaaggaccagcactttcctgtgttcatgaacgagaaggaggacatcctgtggtgtaccgagatggagagagtgttcgggttcccagtccactacacagatgtcagcaacatgtctagactggccagacagagactgctgggaagaagctggtccgtccctgtgatcagacacctgttcgcccctctgaaggagtacttcgcctgcgtgagcagcggcaacagcaacgccaacagccggggccccagcttctctagcggcctggtgccactgtccctgagagggagccacatgggccccatggagatctacaaaaccgtgagcgcctggaagcggcagcctgtgcgcgtgctgagcctgtttcggaatatcgataaagtcctgaaaagcctgggattcctggagagcggctctggctccggcggtggcaccctgaagtacgtggaggatgtgacaaacgtggtcagacgggatgtggagaagtggggccccttcgatctggtgtacggcagcacccaacccctgggcagctcttgtgaccggtgccctggctggtacatgtttcagttccaccggatcctgcagtacgccctgccgagacaggagtcccagcggccattcttttggattttcatggacaacttgctgctgaccgaggatgaccaggaaactaccactcggttcctgcagaccgaagccgtgaccctgcaggacgtgagaggccgggactaccagaacgccatgcgggtgtggtccaacatccctggactgaaaagcaagcacgcacctctgacccctaaagaagaggagtacctgcaggcccaggtgcggagcagaagcaagctggacgcccctaaggtggatctgctggtgaagaattgcctcctgcccctgagagagtacttcaagtatttcagccagaatagtctgcccctgggcggcccaagcagcggcgcccctcctcccagcggcggcagcccagccggctccccaacctctaccgaggagggcacctctgagtccgccacccccgagagcggccctggcacctccaccgagcccagcgagggcagcgcacccggcagccctgccggcagccccacctccacagaggagggaaccagcaccgagcccagcgaaggcagcgccccaggcaccagcaccgagcctagtgagggcggctctggcggcggcagcgcccaggagattaaacggatcaacaagatcagaagaagacttgtgaaagacagcaacaccaagaaggccggcaagacaggccccatgaaaaccctgctggttagagtgatgacacccgatctgagagagcggctggaaaacctgagaaagaagcctgaaaatatcccccagcccatcagcaatacatctagagccaacctgaataagctgctgaccgattacaccgaaatgaagaaggcgatcctgcatgtgtactgggaagagttccagaaggaccctgtgggcctgatgagccgggtggcccagcctgccagcaagaagatcgatcagaacaagctgaaacctgagatggacgagaagggcaacctgaccaccgccggctttgcctgctctcagtgtggccagcccctgttcgtgtacaagctggagcaggtgtctgagaagggcaaggcttacaccaactacttcggacggtgcaatgtggccgagcacgaaaagctgatcctgctggcccagctgaagcccgagaaggatagcgacgaagccgtgacatatagcctgggaaagtttgggcagagggccctggatttctacagcattcatgtgaccaaggagtccacccaccccgtgaagcccctggcccagatcgccggaaacagatacgcctccggacctgtgggaaaggccctgagcgacgcatgtatgggcacaatcgcctccttcctgtctaagtaccaggacatcatcatcgaacaccagaaggtggtgaagggcaaccagaagagactggagagcctgcgggagctggccggcaaggaaaacctggaataccctagcgtgaccctgccacctcagcctcacaccaaggagggcgttgatgcctacaacgaagtgatcgcccgggtgcgaatgtgggtgaacctgaacctgtggcagaagctgaagctaagcagagatgatgccaagcctctgctgagactgaagggattcccttcctttcctctggtcgagagacaggccaacgaagtggactggtgggacatggtgtgtaacgtgaagaagctgatcaacgagaaaaaggaggatggcaaggtgttttggcagaatctggctggctacaagagacaggaagccctgagaccatacctgagcagcgaggaagatcggaagaagggaaagaaattcgctcggtaccagctgggcgacctgctgctgcacctggaaaagaagcacggcgaggactggggaaaggtgtacgacgaggcctgggagcggattgacaagaaagtggaaggcctgagcaagcacatcaagctggaagaggaacggagaagcgaggacgcccagagcaaggccgccctgaccgactggctgcgggctaaggccagcttcgtgatcgagggcctgaaggaggccgacaaggacgagttctgcagatgcgagctgaagctgcagaagtggtacggggacctgcggggaaagcccttcgccatcgaagccgagaacagcatcctggacatcagcggcttcagcaagcagtacaactgtgccttcatctggcagaaggacggcgtgaagaagctgaacctgtacctgatcatcaactacttcaagggcggcaagctgcggttcaagaagatcaaacctgaagccttcgaagccaacagattctacaccgtgatcaacaaaaagagcggcgagatcgtgcccatggaggtgaacttcaacttcgacgaccccaacctgatcatcctgcctctggcctttggcaagagacagggcagagaattcatctggaacgacctgctgtccctggaaaccggcagcctgaagctggccaacggaagagtgatcgagaagacactgtacaacagaagaacccggcaggatgagcctgccctgttcgtggccctgaccttcgagcggcgggaggtcctggactcctccaatatcaaaccaatgaacctgatcggcgtggcaagaggcgaaaacatccccgccgtgatcgccctgaccgaccccgagggctgcccactgagccggtttaaggatagcctgggaaacccaacccacatcctgagaatcggcgagagctataaggagaagcagcggaccatccaggccaagaaggaggtggagcagcggagagccggcggctacagccggaagtacgccagcaaagccaagaatctggcagacgatatggtgagaaacaccgctagagatctgctgtactacgccgtgacccaggatgccatgctgatcttcgccaacctgagccggggcttcggccggcagggcaagcggaccttcatggccgagagacagtacacacggatggaggactggctgaccgccaagctggcctacgagggcctgagcaagacctacctgtccaagacactggcccagtacacctccaagacatgcagcaactgtgggtttaccatcaccagcgccgactacgacagggtgctggagaagctgaagaagacagcaacaggctggatgaccacaattaacggcaaggagctgaaggtggagggccagattacctactacaacagatacaagagacagaacgtagtcaaggacctgtccgtcgagctggatagactgagcgaagaatctgtgaacaacgacatctcctcctggacaaagggcagaagcggagaagctctgagcctcctgaagaaaagattctcccatagacccgtgcaggagaagttcgtgtgcctgaactgcggcttcgagacacacgcagccgagcaagccgccctgaacatcgccagatcctggctgttcctgcggagccaggagtacaagaaataccagacaaacaagacaaccggcaacaccgataagagagccttcgtcgagacctggcagtccttttaccggaagaagcttaaggaggtgtggaaacctgccgtgcggtctggcggatctggcggaggctccacaagcagccacaccctggtgaccttcaaggacatcctggtgaacttcaccagggaggagtggaagctgctggacaccgcccagcagatcatgtacaaggacgtgatgctggagaactacaggaacctggtgagcctgggccaccagctgcccaagcccgacgtgatcctgaggctggagaagggcgaggagccctggctggtggagaaggagatccaccaggagacccaccccgacctggagacccccaccagccccaagaaaaagagaaaagtctaagctgccttctgcggggcttgccttctggccatgcccttcttctctcccttgcacctgtacctcttggtctttgaataaagcctgagtaggaaggctagcaaaaaaaaaaaaaaaaaaaaaaaaaaaaaaaaaaaaaaaaaaaaaaaaaaaaaaaaaaaaaaaaaaaaaaaaaaaaaaaa

SEQ ID NO: 6309 - RNA, 5797 nt, synthetic construct
  source 1..5797: mol_type = other RNA
aggaaataagagagaaaagaagagtaagaagaaatataagagccaccatggcccctaagaagaagcgtaaagtgagccggatggaacgcctcgtctacgaggtgcggcagaagtgcagaaacatcgaggacatctgcatctcctgcggatctctgaacgtgaccctggagcacccactgttcatcggcggcatgtgccagaactgtaaaaactgttttctggagtgtgcctatcaatacgacgatgacggctaccagagctactgcaccatctgttgcggcggaagagaggtgctgatgtgtggaaataacaactgctgccggtgcttctgcgtggaatgcgtggacctgctggtgggccccggcgccgcccaggccgctattaaggaagatccttggaactgctacatgtgcggccacaagggcacatacggcctgctgagacggagagaggactggcctagcagactgcagatgttcttcgccaataaccacgaccaggagttcgacccccctaaggtgtaccctcccgtccccgccgagaagagaaagcccatccgggtcctgagcctgttcgatggcatcgccaccggtctgctggtgctgaaggacctgggcatccaggtggataggtacattgcctccgaggtgtgcgaggactccatcaccgtgggaatggtgcgtcatcagggcaagatcatgtacgtgggcgacgtgcggagcgtgacacagaagcatatccaggagtggggccctttcgacctggtgatcggcggcagcccttgcaatgacctgagcatcgtgaacccagcccggaagggcctgtacgagggaaccggcagactgttcttcgagttttacagactgctgcacgacgcccggcctaaggaaggcgacgaccggcccttcttttggctgttcgagaatgtggtggccatgggagtcagcgacaagcgggatattagccggttcctggagagcaaccccgtgatgatcgatgccaaggaagtgagcgccgcccaccgggccagatacttctggggcaatctgcctggcatgaacagacccctggccagcaccgtgaacgacaagctggagctgcaggagtgcctggagcacggccggatcgccaagttcagcaaggtgagaaccatcaccacccgaagcaacagcatcaaacaaggcaaggaccagcactttcctgtgttcatgaacgagaaggaggacatcctgtggtgtaccgagatggagagagtgttcgggttcccagtccactacacagatgtcagcaacatgtctagactggccagacagagactgctgggaagaagctggtccgtccctgtgatcagacacctgttcgcccctctgaaggagtacttcgcctgcgtgagcagcggcaacagcaacgccaacagccggggccccagcttctctagcggcctggtgccactgtccctgagagggagccacatgggccccatggagatctacaaaaccgtgagcgcctggaagcggcagcctgtgcgcgtgctgagcctgtttcggaatatcgataaagtcctgaaaagcctgggattcctggagagcggctctggctccggcggtggcaccctgaagtacgtggaggatgtgacaaacgtggtcagacgggatgtggagaagtggggccccttcgatctggtgtacggcagcacccaacccctgggcagctcttgtgaccggtgccctggctggtacatgtttcagttccaccggatcctgcagtacgccctgccgagacaggagtcccagcggccattcttttggattttcatggacaacttgctgctgaccgaggatgaccaggaaactaccactcggttcctgcagaccgaagccgtgaccctgcaggacgtgagaggccgggactaccagaacgccatgcgggtgtggtccaacatccctggactgaaaagcaagcacgcacctctgacccctaaagaagaggagtacctgcaggcccaggtgcggagcagaagcaagctggacgcccctaaggtggatctgctggtgaagaattgcctcctgcccctgagagagtacttcaagtatttcagccagaatagtctgcccctgggcggcccaagcagcggcgcccctcctcccagcggcggcagcccagccggctccccaacctctaccgaggagggcacctctgagtccgccacccccgagagcggccctggcacctccaccgagcccagcgagggcagcgcacccggcagccctgccggcagccccacctccacagaggagggaaccagcaccgagcccagcgaaggcagcgccccaggcaccagcaccgagcctagtgagggcggctctggcggcggcagcgcccaggagattaaacggatcaacaagatcagaagaagacttgtgaaagacagcaacaccaagaaggccggcaagacaggccccatgaaaaccctgctggttagagtgatgacacccgatctgagagagcggctggaaaacctgagaaagaagcctgaaaatatcccccagcccatcagcaatacatctagagccaacctgaataagctgctgaccgattacaccgaaatgaagaaggcgatcctgcatgtgtactgggaagagttccagaaggaccctgtgggcctgatgagccgggtggcccagcctgccagcaagaagatcgatcagaacaagctgaaacctgagatggacgagaagggcaacctgaccaccgccggctttgcctgctctcagtgtggccagcccctgttcgtgtacaagctggagcaggtgtctgagaagggcaaggcttacaccaactacttcggacggtgcaatgtggccgagcacgaaaagctgatcctgctggcccagctgaagcccgagaaggatagcgacgaagccgtgacatatagcctgggaaagtttgggcagagggccctggatttctacagcattcatgtgaccaaggagtccacccaccccgtgaagcccctggcccagatcgccggaaacagatacgcctccggacctgtgggaaaggccctgagcgacgcatgtatgggcacaatcgcctccttcctgtctaagtaccaggacatcatcatcgaacaccagaaggtggtgaagggcaaccagaagagactggagagcctgcgggagctggccggcaaggaaaacctggaataccctagcgtgaccctgccacctcagcctcacaccaaggagggcgttgatgcctacaacgaagtgatcgcccgggtgcgaatgtgggtgaacctgaacctgtggcagaagctgaagctaagcagagatgatgccaagcctctgctgagactgaagggattcccttcctttcctctggtcgagagacaggccaacgaagtggactggtgggacatggtgtgtaacgtgaagaagctgatcaacgagaaaaaggaggatggcaaggtgttttggcagaatctggctggctacaagagacaggaagccctgagaccatacctgagcagcgaggaagatcggaagaagggaaagaaattcgctcggtaccagctgggcgacctgctgctgcacctggaaaagaagcacggcgaggactggggaaaggtgtacgacgaggcctgggagcggattgacaagaaagtggaaggcctgagcaagcacatcaagctggaagaggaacggagaagcgaggacgcccagagcaaggccgccctgaccgactggctgcgggctaaggccagcttcgtgatcgagggcctgaaggaggccgacaaggacgagttctgcagatgcgagctgaagctgcagaagtggtacggggacctgcggggaaagcccttcgccatcgaagccgagaacagcatcctggacatcagcggcttcagcaagcagtacaactgtgccttcatctggcagaaggacggcgtgaagaagctgaacctgtacctgatcatcaactacttcaagggcggcaagctgcggttcaagaagatcaaacctgaagccttcgaagccaacagattctacaccgtgatcaacaaaaagagcggcgagatcgtgcccatggaggtgaacttcaacttcgacgaccccaacctgatcatcctgcctctggcctttggcaagagacagggcagagaattcatctggaacgacctgctgtccctggaaaccggcagcctgaagctggccaacggaagagtgatcgagaagacactgtacaacagaagaacccggcaggatgagcctgccctgttcgtggccctgaccttcgagcggcgggaggtcctggactcctccaatatcaaaccaatgaacctgatcggcgtggcaagaggcgaaaacatccccgccgtgatcgccctgaccgaccccgagggctgcccactgagccggtttaaggatagcctgggaaacccaacccacatcctgagaatcggcgagagctataaggagaagcagcggaccatccaggccaagaaggaggtggagcagcggagagccggcggctacagccggaagtacgccagcaaagccaagaatctggcagacgatatggtgagaaacaccgctagagatctgctgtactacgccgtgacccaggatgccatgctgatcttcgccaacctgagccggggcttcggccggcagggcaagcggaccttcatggccgagagacagtacacacggatggaggactggctgaccgccaagctggcctacgagggcctgagcaagacctacctgtccaagacactggcccagtacacctccaagacatgcagcaactgtgggtttaccatcaccagcgccgactacgacagggtgctggagaagctgaagaagacagcaacaggctggatgaccacaattaacggcaaggagctgaaggtggagggccagattacctactacaacagatacaagagacagaacgtagtcaaggacctgtccgtcgagctggatagactgagcgaagaatctgtgaacaacgacatctcctcctggacaaagggcagaagcggagaagctctgagcctcctgaagaaaagattctcccatagacccgtgcaggagaagttcgtgtgcctgaactgcggcttcgagacacacgcagccgagcaagccgccctgaacatcgccagatcctggctgttcctgcggagccaggagtacaagaaataccagacaaacaagacaaccggcaacaccgataagagagccttcgtcgagacctggcagtccttttaccggaagaagcttaaggaggtgtggaaacctgccgtgcggtctggcggatctggcggaggctccacaagcatgaacatggagggcctggtgatgttccaggacctgagcatcgacttcagccaggaggagtgggagtgcctgaaccccgcccagaaggacctgtacagggacgtgatgatggagaactacagcagcctgctgagcctgggcctgagcatccccaagcccgacgtgatcagcctgctggagcagggcaaggagccctggatggtgagcagggacatcctgggcggctggtgccccgacaggctgaccagccccaagaaaaagagaaaagtctaagctgccttctgcggggcttgccttctggccatgcccttcttctctcccttgcacctgtacctcttggtctttgaataaagcctgagtaggaaggctagcaaaaaaaaaaaaaaaaaaaaaaaaaaaaaaaaaaaaaaaaaaaaaaaaaaaaaaaaaaaaaaaaaaaaaaaaaaaaaaaa

SEQ ID NO: 6310 - RNA, 5797 nt, synthetic construct
  source 1..5797: mol_type = other RNA
aggaaataagagagaaaagaagagtaagaagaaatataagagccaccatggcccctaagaagaagcgtaaagtgagccggatggaacgcctcgtctacgaggtgcggcagaagtgcagaaacatcgaggacatctgcatctcctgcggatctctgaacgtgaccctggagcacccactgttcatcggcggcatgtgccagaactgtaaaaactgttttctggagtgtgcctatcaatacgacgatgacggctaccagagctactgcaccatctgttgcggcggaagagaggtgctgatgtgtggaaataacaactgctgccggtgcttctgcgtggaatgcgtggacctgctggtgggccccggcgccgcccaggccgctattaaggaagatccttggaactgctacatgtgcggccacaagggcacatacggcctgctgagacggagagaggactggcctagcagactgcagatgttcttcgccaataaccacgaccaggagttcgacccccctaaggtgtaccctcccgtccccgccgagaagagaaagcccatccgggtcctgagcctgttcgatggcatcgccaccggtctgctggtgctgaaggacctgggcatccaggtggataggtacattgcctccgaggtgtgcgaggactccatcaccgtgggaatggtgcgtcatcagggcaagatcatgtacgtgggcgacgtgcggagcgtgacacagaagcatatccaggagtggggccctttcgacctggtgatcggcggcagcccttgcaatgacctgagcatcgtgaacccagcccggaagggcctgtacgagggaaccggcagactgttcttcgagttttacagactgctgcacgacgcccggcctaaggaaggcgacgaccggcccttcttttggctgttcgagaatgtggtggccatgggagtcagcgacaagcgggatattagccggttcctggagagcaaccccgtgatgatcgatgccaaggaagtgagcgccgcccaccgggccagatacttctggggcaatctgcctggcatgaacagacccctggccagcaccgtgaacgacaagctggagctgcaggagtgcctggagcacggccggatcgccaagttcagcaaggtgagaaccatcaccacccgaagcaacagcatcaaacaaggcaaggaccagcactttcctgtgttcatgaacgagaaggaggacatcctgtggtgtaccgagatggagagagtgttcgggttcccagtccactacacagatgtcagcaacatgtctagactggccagacagagactgctgggaagaagctggtccgtccctgtgatcagacacctgttcgcccctctgaaggagtacttcgcctgcgtgagcagcggcaacagcaacgccaacagccggggccccagcttctctagcggcctggtgccactgtccctgagagggagccacatgggccccatggagatctacaaaaccgtgagcgcctggaagcggcagcctgtgcgcgtgctgagcctgtttcggaatatcgataaagtcctgaaaagcctgggattcctggagagcggctctggctccggcggtggcaccctgaagtacgtggaggatgtgacaaacgtggtcagacgggatgtggagaagtggggccccttcgatctggtgtacggcagcacccaacccctgggcagctcttgtgaccggtgccctggctggtacatgtttcagttccaccggatcctgcagtacgccctgccgagacaggagtcccagcggccattcttttggattttcatggacaacttgctgctgaccgaggatgaccaggaaactaccactcggttcctgcagaccgaagccgtgaccctgcaggacgtgagaggccgggactaccagaacgccatgcgggtgtggtccaacatccctggactgaaaagcaagcacgcacctctgacccctaaagaagaggagtacctgcaggcccaggtgcggagcagaagcaagctggacgcccctaaggtggatctgctggtgaagaattgcctcctgcccctgagagagtacttcaagtatttcagccagaatagtctgcccctgggcggcccaagcagcggcgcccctcctcccagcggcggcagcccagccggctccccaacctctaccgaggagggcacctctgagtccgccacccccgagagcggccctggcacctccaccgagcccagcgagggcagcgcacccggcagccctgccggcagccccacctccacagaggagggaaccagcaccgagcccagcgaaggcagcgccccaggcaccagcaccgagcctagtgagggcggctctggcggcggcagcgcccaggagattaaacggatcaacaagatcagaagaagacttgtgaaagacagcaacaccaagaaggccggcaagacaggccccatgaaaaccctgctggttagagtgatgacacccgatctgagagagcggctggaaaacctgagaaagaagcctgaaaatatcccccagcccatcagcaatacatctagagccaacctgaataagctgctgaccgattacaccgaaatgaagaaggcgatcctgcatgtgtactgggaagagttccagaaggaccctgtgggcctgatgagccgggtggcccagcctgccagcaagaagatcgatcagaacaagctgaaacctgagatggacgagaagggcaacctgaccaccgccggctttgcctgctctcagtgtggccagcccctgttcgtgtacaagctggagcaggtgtctgagaagggcaaggcttacaccaactacttcggacggtgcaatgtggccgagcacgaaaagctgatcctgctggcccagctgaagcccgagaaggatagcgacgaagccgtgacatatagcctgggaaagtttgggcagagggccctggatttctacagcattcatgtgaccaaggagtccacccaccccgtgaagcccctggcccagatcgccggaaacagatacgcctccggacctgtgggaaaggccctgagcgacgcatgtatgggcacaatcgcctccttcctgtctaagtaccaggacatcatcatcgaacaccagaaggtggtgaagggcaaccagaagagactggagagcctgcgggagctggccggcaaggaaaacctggaataccctagcgtgaccctgccacctcagcctcacaccaaggagggcgttgatgcctacaacgaagtgatcgcccgggtgcgaatgtgggtgaacctgaacctgtggcagaagctgaagctaagcagagatgatgccaagcctctgctgagactgaagggattcccttcctttcctctggtcgagagacaggccaacgaagtggactggtgggacatggtgtgtaacgtgaagaagctgatcaacgagaaaaaggaggatggcaaggtgttttggcagaatctggctggctacaagagacaggaagccctgagaccatacctgagcagcgaggaagatcggaagaagggaaagaaattcgctcggtaccagctgggcgacctgctgctgcacctggaaaagaagcacggcgaggactggggaaaggtgtacgacgaggcctgggagcggattgacaagaaagtggaaggcctgagcaagcacatcaagctggaagaggaacggagaagcgaggacgcccagagcaaggccgccctgaccgactggctgcgggctaaggccagcttcgtgatcgagggcctgaaggaggccgacaaggacgagttctgcagatgcgagctgaagctgcagaagtggtacggggacctgcggggaaagcccttcgccatcgaagccgagaacagcatcctggacatcagcggcttcagcaagcagtacaactgtgccttcatctggcagaaggacggcgtgaagaagctgaacctgtacctgatcatcaactacttcaagggcggcaagctgcggttcaagaagatcaaacctgaagccttcgaagccaacagattctacaccgtgatcaacaaaaagagcggcgagatcgtgcccatggaggtgaacttcaacttcgacgaccccaacctgatcatcctgcctctggcctttggcaagagacagggcagagaattcatctggaacgacctgctgtccctggaaaccggcagcctgaagctggccaacggaagagtgatcgagaagacactgtacaacagaagaacccggcaggatgagcctgccctgttcgtggccctgaccttcgagcggcgggaggtcctggactcctccaatatcaaaccaatgaacctgatcggcgtggcaagaggcgaaaacatccccgccgtgatcgccctgaccgaccccgagggctgcccactgagccggtttaaggatagcctgggaaacccaacccacatcctgagaatcggcgagagctataaggagaagcagcggaccatccaggccaagaaggaggtggagcagcggagagccggcggctacagccggaagtacgccagcaaagccaagaatctggcagacgatatggtgagaaacaccgctagagatctgctgtactacgccgtgacccaggatgccatgctgatcttcgccaacctgagccggggcttcggccggcagggcaagcggaccttcatggccgagagacagtacacacggatggaggactggctgaccgccaagctggcctacgagggcctgagcaagacctacctgtccaagacactggcccagtacacctccaagacatgcagcaactgtgggtttaccatcaccagcgccgactacgacagggtgctggagaagctgaagaagacagcaacaggctggatgaccacaattaacggcaaggagctgaaggtggagggccagattacctactacaacagatacaagagacagaacgtagtcaaggacctgtccgtcgagctggatagactgagcgaagaatctgtgaacaacgacatctcctcctggacaaagggcagaagcggagaagctctgagcctcctgaagaaaagattctcccatagacccgtgcaggagaagttcgtgtgcctgaactgcggcttcgagacacacgcagccgagcaagccgccctgaacatcgccagatcctggctgttcctgcggagccaggagtacaagaaataccagacaaacaagacaaccggcaacaccgataagagagccttcgtcgagacctggcagtccttttaccggaagaagcttaaggaggtgtggaaacctgccgtgcggtctggcggatctggcggaggctccacaagcaggcaggagcccgtgaccttcgaggacgtggccgtgtacttcacccagaacgagtgggccagcctggacagcgtgcagagggccctgtacagggaggtgatgctggagaactacgccaacgtggccagcctggccttccccttcaccacccccgtgctggtgagccagctggagcagggcgagctgccctggggcctggacccctgggagcccatgggcagggaggccctgaggggcatctgcaccagccccaagaaaaagagaaaagtctaagctgccttctgcggggcttgccttctggccatgcccttcttctctcccttgcacctgtacctcttggtctttgaataaagcctgagtaggaaggctagcaaaaaaaaaaaaaaaaaaaaaaaaaaaaaaaaaaaaaaaaaaaaaaaaaaaaaaaaaaaaaaaaaaaaaaaaaaaaaaaa

SEQ ID NO: 6311 - RNA, 5797 nt, synthetic construct
  source 1..5797: mol_type = other RNA
aggaaataagagagaaaagaagagtaagaagaaatataagagccaccatggcccctaagaagaagcgtaaagtgagccggatggaacgcctcgtctacgaggtgcggcagaagtgcagaaacatcgaggacatctgcatctcctgcggatctctgaacgtgaccctggagcacccactgttcatcggcggcatgtgccagaactgtaaaaactgttttctggagtgtgcctatcaatacgacgatgacggctaccagagctactgcaccatctgttgcggcggaagagaggtgctgatgtgtggaaataacaactgctgccggtgcttctgcgtggaatgcgtggacctgctggtgggccccggcgccgcccaggccgctattaaggaagatccttggaactgctacatgtgcggccacaagggcacatacggcctgctgagacggagagaggactggcctagcagactgcagatgttcttcgccaataaccacgaccaggagttcgacccccctaaggtgtaccctcccgtccccgccgagaagagaaagcccatccgggtcctgagcctgttcgatggcatcgccaccggtctgctggtgctgaaggacctgggcatccaggtggataggtacattgcctccgaggtgtgcgaggactccatcaccgtgggaatggtgcgtcatcagggcaagatcatgtacgtgggcgacgtgcggagcgtgacacagaagcatatccaggagtggggccctttcgacctggtgatcggcggcagcccttgcaatgacctgagcatcgtgaacccagcccggaagggcctgtacgagggaaccggcagactgttcttcgagttttacagactgctgcacgacgcccggcctaaggaaggcgacgaccggcccttcttttggctgttcgagaatgtggtggccatgggagtcagcgacaagcgggatattagccggttcctggagagcaaccccgtgatgatcgatgccaaggaagtgagcgccgcccaccgggccagatacttctggggcaatctgcctggcatgaacagacccctggccagcaccgtgaacgacaagctggagctgcaggagtgcctggagcacggccggatcgccaagttcagcaaggtgagaaccatcaccacccgaagcaacagcatcaaacaaggcaaggaccagcactttcctgtgttcatgaacgagaaggaggacatcctgtggtgtaccgagatggagagagtgttcgggttcccagtccactacacagatgtcagcaacatgtctagactggccagacagagactgctgggaagaagctggtccgtccctgtgatcagacacctgttcgcccctctgaaggagtacttcgcctgcgtgagcagcggcaacagcaacgccaacagccggggccccagcttctctagcggcctggtgccactgtccctgagagggagccacatgggccccatggagatctacaaaaccgtgagcgcctggaagcggcagcctgtgcgcgtgctgagcctgtttcggaatatcgataaagtcctgaaaagcctgggattcctggagagcggctctggctccggcggtggcaccctgaagtacgtggaggatgtgacaaacgtggtcagacgggatgtggagaagtggggccccttcgatctggtgtacggcagcacccaacccctgggcagctcttgtgaccggtgccctggctggtacatgtttcagttccaccggatcctgcagtacgccctgccgagacaggagtcccagcggccattcttttggattttcatggacaacttgctgctgaccgaggatgaccaggaaactaccactcggttcctgcagaccgaagccgtgaccctgcaggacgtgagaggccgggactaccagaacgccatgcgggtgtggtccaacatccctggactgaaaagcaagcacgcacctctgacccctaaagaagaggagtacctgcaggcccaggtgcggagcagaagcaagctggacgcccctaaggtggatctgctggtgaagaattgcctcctgcccctgagagagtacttcaagtatttcagccagaatagtctgcccctgggcggcccaagcagcggcgcccctcctcccagcggcggcagcccagccggctccccaacctctaccgaggagggcacctctgagtccgccacccccgagagcggccctggcacctccaccgagcccagcgagggcagcgcacccggcagccctgccggcagccccacctccacagaggagggaaccagcaccgagcccagcgaaggcagcgccccaggcaccagcaccgagcctagtgagggcggctctggcggcggcagcgcccaggagattaaacggatcaacaagatcagaagaagacttgtgaaagacagcaacaccaagaaggccggcaagacaggccccatgaaaaccctgctggttagagtgatgacacccgatctgagagagcggctggaaaacctgagaaagaagcctgaaaatatcccccagcccatcagcaatacatctagagccaacctgaataagctgctgaccgattacaccgaaatgaagaaggcgatcctgcatgtgtactgggaagagttccagaaggaccctgtgggcctgatgagccgggtggcccagcctgccagcaagaagatcgatcagaacaagctgaaacctgagatggacgagaagggcaacctgaccaccgccggctttgcctgctctcagtgtggccagcccctgttcgtgtacaagctggagcaggtgtctgagaagggcaaggcttacaccaactacttcggacggtgcaatgtggccgagcacgaaaagctgatcctgctggcccagctgaagcccgagaaggatagcgacgaagccgtgacatatagcctgggaaagtttgggcagagggccctggatttctacagcattcatgtgaccaaggagtccacccaccccgtgaagcccctggcccagatcgccggaaacagatacgcctccggacctgtgggaaaggccctgagcgacgcatgtatgggcacaatcgcctccttcctgtctaagtaccaggacatcatcatcgaacaccagaaggtggtgaagggcaaccagaagagactggagagcctgcgggagctggccggcaaggaaaacctggaataccctagcgtgaccctgccacctcagcctcacaccaaggagggcgttgatgcctacaacgaagtgatcgcccgggtgcgaatgtgggtgaacctgaacctgtggcagaagctgaagctaagcagagatgatgccaagcctctgctgagactgaagggattcccttcctttcctctggtcgagagacaggccaacgaagtggactggtgggacatggtgtgtaacgtgaagaagctgatcaacgagaaaaaggaggatggcaaggtgttttggcagaatctggctggctacaagagacaggaagccctgagaccatacctgagcagcgaggaagatcggaagaagggaaagaaattcgctcggtaccagctgggcgacctgctgctgcacctggaaaagaagcacggcgaggactggggaaaggtgtacgacgaggcctgggagcggattgacaagaaagtggaaggcctgagcaagcacatcaagctggaagaggaacggagaagcgaggacgcccagagcaaggccgccctgaccgactggctgcgggctaaggccagcttcgtgatcgagggcctgaaggaggccgacaaggacgagttctgcagatgcgagctgaagctgcagaagtggtacggggacctgcggggaaagcccttcgccatcgaagccgagaacagcatcctggacatcagcggcttcagcaagcagtacaactgtgccttcatctggcagaaggacggcgtgaagaagctgaacctgtacctgatcatcaactacttcaagggcggcaagctgcggttcaagaagatcaaacctgaagccttcgaagccaacagattctacaccgtgatcaacaaaaagagcggcgagatcgtgcccatggaggtgaacttcaacttcgacgaccccaacctgatcatcctgcctctggcctttggcaagagacagggcagagaattcatctggaacgacctgctgtccctggaaaccggcagcctgaagctggccaacggaagagtgatcgagaagacactgtacaacagaagaacccggcaggatgagcctgccctgttcgtggccctgaccttcgagcggcgggaggtcctggactcctccaatatcaaaccaatgaacctgatcggcgtggcaagaggcgaaaacatccccgccgtgatcgccctgaccgaccccgagggctgcccactgagccggtttaaggatagcctgggaaacccaacccacatcctgagaatcggcgagagctataaggagaagcagcggaccatccaggccaagaaggaggtggagcagcggagagccggcggctacagccggaagtacgccagcaaagccaagaatctggcagacgatatggtgagaaacaccgctagagatctgctgtactacgccgtgacccaggatgccatgctgatcttcgccaacctgagccggggcttcggccggcagggcaagcggaccttcatggccgagagacagtacacacggatggaggactggctgaccgccaagctggcctacgagggcctgagcaagacctacctgtccaagacactggcccagtacacctccaagacatgcagcaactgtgggtttaccatcaccagcgccgactacgacagggtgctggagaagctgaagaagacagcaacaggctggatgaccacaattaacggcaaggagctgaaggtggagggccagattacctactacaacagatacaagagacagaacgtagtcaaggacctgtccgtcgagctggatagactgagcgaagaatctgtgaacaacgacatctcctcctggacaaagggcagaagcggagaagctctgagcctcctgaagaaaagattctcccatagacccgtgcaggagaagttcgtgtgcctgaactgcggcttcgagacacacgcagccgagcaagccgccctgaacatcgccagatcctggctgttcctgcggagccaggagtacaagaaataccagacaaacaagacaaccggcaacaccgataagagagccttcgtcgagacctggcagtccttttaccggaagaagcttaaggaggtgtggaaacctgccgtgcggtctggcggatctggcggaggctccacaagcgtgaccttcgaggaggtggccgtgtacttcagcgccgaggagtgggccctgctgggccccgcccagagggccctgtacagggaggtgatgagggagaactacgaggccgtgaccagcctggcctgggccggcctgcccatcagcaagcccgacctgatcagctgcatggagaggggcgaggagccctgggtggcccacctgcagagccagaggaggagggagctgcccaggggcaggaacagcaccagccccaagaaaaagagaaaagtctaagctgccttctgcggggcttgccttctggccatgcccttcttctctcccttgcacctgtacctcttggtctttgaataaagcctgagtaggaaggctagcaaaaaaaaaaaaaaaaaaaaaaaaaaaaaaaaaaaaaaaaaaaaaaaaaaaaaaaaaaaaaaaaaaaaaaaaaaaaaaaa

SEQ ID NO: 6312 - RNA, 5797 nt, synthetic construct
  source 1..5797: mol_type = other RNA
aggaaataagagagaaaagaagagtaagaagaaatataagagccaccatggcccctaagaagaagcgtaaagtgagccggatggaacgcctcgtctacgaggtgcggcagaagtgcagaaacatcgaggacatctgcatctcctgcggatctctgaacgtgaccctggagcacccactgttcatcggcggcatgtgccagaactgtaaaaactgttttctggagtgtgcctatcaatacgacgatgacggctaccagagctactgcaccatctgttgcggcggaagagaggtgctgatgtgtggaaataacaactgctgccggtgcttctgcgtggaatgcgtggacctgctggtgggccccggcgccgcccaggccgctattaaggaagatccttggaactgctacatgtgcggccacaagggcacatacggcctgctgagacggagagaggactggcctagcagactgcagatgttcttcgccaataaccacgaccaggagttcgacccccctaaggtgtaccctcccgtccccgccgagaagagaaagcccatccgggtcctgagcctgttcgatggcatcgccaccggtctgctggtgctgaaggacctgggcatccaggtggataggtacattgcctccgaggtgtgcgaggactccatcaccgtgggaatggtgcgtcatcagggcaagatcatgtacgtgggcgacgtgcggagcgtgacacagaagcatatccaggagtggggccctttcgacctggtgatcggcggcagcccttgcaatgacctgagcatcgtgaacccagcccggaagggcctgtacgagggaaccggcagactgttcttcgagttttacagactgctgcacgacgcccggcctaaggaaggcgacgaccggcccttcttttggctgttcgagaatgtggtggccatgggagtcagcgacaagcgggatattagccggttcctggagagcaaccccgtgatgatcgatgccaaggaagtgagcgccgcccaccgggccagatacttctggggcaatctgcctggcatgaacagacccctggccagcaccgtgaacgacaagctggagctgcaggagtgcctggagcacggccggatcgccaagttcagcaaggtgagaaccatcaccacccgaagcaacagcatcaaacaaggcaaggaccagcactttcctgtgttcatgaacgagaaggaggacatcctgtggtgtaccgagatggagagagtgttcgggttcccagtccactacacagatgtcagcaacatgtctagactggccagacagagactgctgggaagaagctggtccgtccctgtgatcagacacctgttcgcccctctgaaggagtacttcgcctgcgtgagcagcggcaacagcaacgccaacagccggggccccagcttctctagcggcctggtgccactgtccctgagagggagccacatgggccccatggagatctacaaaaccgtgagcgcctggaagcggcagcctgtgcgcgtgctgagcctgtttcggaatatcgataaagtcctgaaaagcctgggattcctggagagcggctctggctccggcggtggcaccctgaagtacgtggaggatgtgacaaacgtggtcagacgggatgtggagaagtggggccccttcgatctggtgtacggcagcacccaacccctgggcagctcttgtgaccggtgccctggctggtacatgtttcagttccaccggatcctgcagtacgccctgccgagacaggagtcccagcggccattcttttggattttcatggacaacttgctgctgaccgaggatgaccaggaaactaccactcggttcctgcagaccgaagccgtgaccctgcaggacgtgagaggccgggactaccagaacgccatgcgggtgtggtccaacatccctggactgaaaagcaagcacgcacctctgacccctaaagaagaggagtacctgcaggcccaggtgcggagcagaagcaagctggacgcccctaaggtggatctgctggtgaagaattgcctcctgcccctgagagagtacttcaagtatttcagccagaatagtctgcccctgggcggcccaagcagcggcgcccctcctcccagcggcggcagcccagccggctccccaacctctaccgaggagggcacctctgagtccgccacccccgagagcggccctggcacctccaccgagcccagcgagggcagcgcacccggcagccctgccggcagccccacctccacagaggagggaaccagcaccgagcccagcgaaggcagcgccccaggcaccagcaccgagcctagtgagggcggctctggcggcggcagcgcccaggagattaaacggatcaacaagatcagaagaagacttgtgaaagacagcaacaccaagaaggccggcaagacaggccccatgaaaaccctgctggttagagtgatgacacccgatctgagagagcggctggaaaacctgagaaagaagcctgaaaatatcccccagcccatcagcaatacatctagagccaacctgaataagctgctgaccgattacaccgaaatgaagaaggcgatcctgcatgtgtactgggaagagttccagaaggaccctgtgggcctgatgagccgggtggcccagcctgccagcaagaagatcgatcagaacaagctgaaacctgagatggacgagaagggcaacctgaccaccgccggctttgcctgctctcagtgtggccagcccctgttcgtgtacaagctggagcaggtgtctgagaagggcaaggcttacaccaactacttcggacggtgcaatgtggccgagcacgaaaagctgatcctgctggcccagctgaagcccgagaaggatagcgacgaagccgtgacatatagcctgggaaagtttgggcagagggccctggatttctacagcattcatgtgaccaaggagtccacccaccccgtgaagcccctggcccagatcgccggaaacagatacgcctccggacctgtgggaaaggccctgagcgacgcatgtatgggcacaatcgcctccttcctgtctaagtaccaggacatcatcatcgaacaccagaaggtggtgaagggcaaccagaagagactggagagcctgcgggagctggccggcaaggaaaacctggaataccctagcgtgaccctgccacctcagcctcacaccaaggagggcgttgatgcctacaacgaagtgatcgcccgggtgcgaatgtgggtgaacctgaacctgtggcagaagctgaagctaagcagagatgatgccaagcctctgctgagactgaagggattcccttcctttcctctggtcgagagacaggccaacgaagtggactggtgggacatggtgtgtaacgtgaagaagctgatcaacgagaaaaaggaggatggcaaggtgttttggcagaatctggctggctacaagagacaggaagccctgagaccatacctgagcagcgaggaagatcggaagaagggaaagaaattcgctcggtaccagctgggcgacctgctgctgcacctggaaaagaagcacggcgaggactggggaaaggtgtacgacgaggcctgggagcggattgacaagaaagtggaaggcctgagcaagcacatcaagctggaagaggaacggagaagcgaggacgcccagagcaaggccgccctgaccgactggctgcgggctaaggccagcttcgtgatcgagggcctgaaggaggccgacaaggacgagttctgcagatgcgagctgaagctgcagaagtggtacggggacctgcggggaaagcccttcgccatcgaagccgagaacagcatcctggacatcagcggcttcagcaagcagtacaactgtgccttcatctggcagaaggacggcgtgaagaagctgaacctgtacctgatcatcaactacttcaagggcggcaagctgcggttcaagaagatcaaacctgaagccttcgaagccaacagattctacaccgtgatcaacaaaaagagcggcgagatcgtgcccatggaggtgaacttcaacttcgacgaccccaacctgatcatcctgcctctggcctttggcaagagacagggcagagaattcatctggaacgacctgctgtccctggaaaccggcagcctgaagctggccaacggaagagtgatcgagaagacactgtacaacagaagaacccggcaggatgagcctgccctgttcgtggccctgaccttcgagcggcgggaggtcctggactcctccaatatcaaaccaatgaacctgatcggcgtggcaagaggcgaaaacatccccgccgtgatcgccctgaccgaccccgagggctgcccactgagccggtttaaggatagcctgggaaacccaacccacatcctgagaatcggcgagagctataaggagaagcagcggaccatccaggccaagaaggaggtggagcagcggagagccggcggctacagccggaagtacgccagcaaagccaagaatctggcagacgatatggtgagaaacaccgctagagatctgctgtactacgccgtgacccaggatgccatgctgatcttcgccaacctgagccggggcttcggccggcagggcaagcggaccttcatggccgagagacagtacacacggatggaggactggctgaccgccaagctggcctacgagggcctgagcaagacctacctgtccaagacactggcccagtacacctccaagacatgcagcaactgtgggtttaccatcaccagcgccgactacgacagggtgctggagaagctgaagaagacagcaacaggctggatgaccacaattaacggcaaggagctgaaggtggagggccagattacctactacaacagatacaagagacagaacgtagtcaaggacctgtccgtcgagctggatagactgagcgaagaatctgtgaacaacgacatctcctcctggacaaagggcagaagcggagaagctctgagcctcctgaagaaaagattctcccatagacccgtgcaggagaagttcgtgtgcctgaactgcggcttcgagacacacgcagccgagcaagccgccctgaacatcgccagatcctggctgttcctgcggagccaggagtacaagaaataccagacaaacaagacaaccggcaacaccgataagagagccttcgtcgagacctggcagtccttttaccggaagaagcttaaggaggtgtggaaacctgccgtgcggtctggcggatctggcggaggctccacaagcgtgcagggcagcatgagcttcgaggacgtgatcgtggagttcacccaggacgagtggcagtacatgagccccgcccagaggatcctgtacagggacgtgatgctggagaactacagccacctgatcagcgtgggctactgcaccaccaagcccgagatgatcttcaagctggagcagggcgaggagccctggagcctggaggaggagttcctgaaccagaggtaccccggctacttcagcgtgaccagccccaagaaaaagagaaaagtctaagctgccttctgcggggcttgccttctggccatgcccttcttctctcccttgcacctgtacctcttggtctttgaataaagcctgagtaggaaggctagcaaaaaaaaaaaaaaaaaaaaaaaaaaaaaaaaaaaaaaaaaaaaaaaaaaaaaaaaaaaaaaaaaaaaaaaaaaaaaaaa

SEQ ID NO: 6313 - RNA, 5797 nt, synthetic construct
  source 1..5797: mol_type = other RNA
aggaaataagagagaaaagaagagtaagaagaaatataagagccaccatggcccctaagaagaagcgtaaagtgagccggatggaacgcctcgtctacgaggtgcggcagaagtgcagaaacatcgaggacatctgcatctcctgcggatctctgaacgtgaccctggagcacccactgttcatcggcggcatgtgccagaactgtaaaaactgttttctggagtgtgcctatcaatacgacgatgacggctaccagagctactgcaccatctgttgcggcggaagagaggtgctgatgtgtggaaataacaactgctgccggtgcttctgcgtggaatgcgtggacctgctggtgggccccggcgccgcccaggccgctattaaggaagatccttggaactgctacatgtgcggccacaagggcacatacggcctgctgagacggagagaggactggcctagcagactgcagatgttcttcgccaataaccacgaccaggagttcgacccccctaaggtgtaccctcccgtccccgccgagaagagaaagcccatccgggtcctgagcctgttcgatggcatcgccaccggtctgctggtgctgaaggacctgggcatccaggtggataggtacattgcctccgaggtgtgcgaggactccatcaccgtgggaatggtgcgtcatcagggcaagatcatgtacgtgggcgacgtgcggagcgtgacacagaagcatatccaggagtggggccctttcgacctggtgatcggcggcagcccttgcaatgacctgagcatcgtgaacccagcccggaagggcctgtacgagggaaccggcagactgttcttcgagttttacagactgctgcacgacgcccggcctaaggaaggcgacgaccggcccttcttttggctgttcgagaatgtggtggccatgggagtcagcgacaagcgggatattagccggttcctggagagcaaccccgtgatgatcgatgccaaggaagtgagcgccgcccaccgggccagatacttctggggcaatctgcctggcatgaacagacccctggccagcaccgtgaacgacaagctggagctgcaggagtgcctggagcacggccggatcgccaagttcagcaaggtgagaaccatcaccacccgaagcaacagcatcaaacaaggcaaggaccagcactttcctgtgttcatgaacgagaaggaggacatcctgtggtgtaccgagatggagagagtgttcgggttcccagtccactacacagatgtcagcaacatgtctagactggccagacagagactgctgggaagaagctggtccgtccctgtgatcagacacctgttcgcccctctgaaggagtacttcgcctgcgtgagcagcggcaacagcaacgccaacagccggggccccagcttctctagcggcctggtgccactgtccctgagagggagccacatgggccccatggagatctacaaaaccgtgagcgcctggaagcggcagcctgtgcgcgtgctgagcctgtttcggaatatcgataaagtcctgaaaagcctgggattcctggagagcggctctggctccggcggtggcaccctgaagtacgtggaggatgtgacaaacgtggtcagacgggatgtggagaagtggggccccttcgatctggtgtacggcagcacccaacccctgggcagctcttgtgaccggtgccctggctggtacatgtttcagttccaccggatcctgcagtacgccctgccgagacaggagtcccagcggccattcttttggattttcatggacaacttgctgctgaccgaggatgaccaggaaactaccactcggttcctgcagaccgaagccgtgaccctgcaggacgtgagaggccgggactaccagaacgccatgcgggtgtggtccaacatccctggactgaaaagcaagcacgcacctctgacccctaaagaagaggagtacctgcaggcccaggtgcggagcagaagcaagctggacgcccctaaggtggatctgctggtgaagaattgcctcctgcccctgagagagtacttcaagtatttcagccagaatagtctgcccctgggcggcccaagcagcggcgcccctcctcccagcggcggcagcccagccggctccccaacctctaccgaggagggcacctctgagtccgccacccccgagagcggccctggcacctccaccgagcccagcgagggcagcgcacccggcagccctgccggcagccccacctccacagaggagggaaccagcaccgagcccagcgaaggcagcgccccaggcaccagcaccgagcctagtgagggcggctctggcggcggcagcgcccaggagattaaacggatcaacaagatcagaagaagacttgtgaaagacagcaacaccaagaaggccggcaagacaggccccatgaaaaccctgctggttagagtgatgacacccgatctgagagagcggctggaaaacctgagaaagaagcctgaaaatatcccccagcccatcagcaatacatctagagccaacctgaataagctgctgaccgattacaccgaaatgaagaaggcgatcctgcatgtgtactgggaagagttccagaaggaccctgtgggcctgatgagccgggtggcccagcctgccagcaagaagatcgatcagaacaagctgaaacctgagatggacgagaagggcaacctgaccaccgccggctttgcctgctctcagtgtggccagcccctgttcgtgtacaagctggagcaggtgtctgagaagggcaaggcttacaccaactacttcggacggtgcaatgtggccgagcacgaaaagctgatcctgctggcccagctgaagcccgagaaggatagcgacgaagccgtgacatatagcctgggaaagtttgggcagagggccctggatttctacagcattcatgtgaccaaggagtccacccaccccgtgaagcccctggcccagatcgccggaaacagatacgcctccggacctgtgggaaaggccctgagcgacgcatgtatgggcacaatcgcctccttcctgtctaagtaccaggacatcatcatcgaacaccagaaggtggtgaagggcaaccagaagagactggagagcctgcgggagctggccggcaaggaaaacctggaataccctagcgtgaccctgccacctcagcctcacaccaaggagggcgttgatgcctacaacgaagtgatcgcccgggtgcgaatgtgggtgaacctgaacctgtggcagaagctgaagctaagcagagatgatgccaagcctctgctgagactgaagggattcccttcctttcctctggtcgagagacaggccaacgaagtggactggtgggacatggtgtgtaacgtgaagaagctgatcaacgagaaaaaggaggatggcaaggtgttttggcagaatctggctggctacaagagacaggaagccctgagaccatacctgagcagcgaggaagatcggaagaagggaaagaaattcgctcggtaccagctgggcgacctgctgctgcacctggaaaagaagcacggcgaggactggggaaaggtgtacgacgaggcctgggagcggattgacaagaaagtggaaggcctgagcaagcacatcaagctggaagaggaacggagaagcgaggacgcccagagcaaggccgccctgaccgactggctgcgggctaaggccagcttcgtgatcgagggcctgaaggaggccgacaaggacgagttctgcagatgcgagctgaagctgcagaagtggtacggggacctgcggggaaagcccttcgccatcgaagccgagaacagcatcctggacatcagcggcttcagcaagcagtacaactgtgccttcatctggcagaaggacggcgtgaagaagctgaacctgtacctgatcatcaactacttcaagggcggcaagctgcggttcaagaagatcaaacctgaagccttcgaagccaacagattctacaccgtgatcaacaaaaagagcggcgagatcgtgcccatggaggtgaacttcaacttcgacgaccccaacctgatcatcctgcctctggcctttggcaagagacagggcagagaattcatctggaacgacctgctgtccctggaaaccggcagcctgaagctggccaacggaagagtgatcgagaagacactgtacaacagaagaacccggcaggatgagcctgccctgttcgtggccctgaccttcgagcggcgggaggtcctggactcctccaatatcaaaccaatgaacctgatcggcgtggcaagaggcgaaaacatccccgccgtgatcgccctgaccgaccccgagggctgcccactgagccggtttaaggatagcctgggaaacccaacccacatcctgagaatcggcgagagctataaggagaagcagcggaccatccaggccaagaaggaggtggagcagcggagagccggcggctacagccggaagtacgccagcaaagccaagaatctggcagacgatatggtgagaaacaccgctagagatctgctgtactacgccgtgacccaggatgccatgctgatcttcgccaacctgagccggggcttcggccggcagggcaagcggaccttcatggccgagagacagtacacacggatggaggactggctgaccgccaagctggcctacgagggcctgagcaagacctacctgtccaagacactggcccagtacacctccaagacatgcagcaactgtgggtttaccatcaccagcgccgactacgacagggtgctggagaagctgaagaagacagcaacaggctggatgaccacaattaacggcaaggagctgaaggtggagggccagattacctactacaacagatacaagagacagaacgtagtcaaggacctgtccgtcgagctggatagactgagcgaagaatctgtgaacaacgacatctcctcctggacaaagggcagaagcggagaagctctgagcctcctgaagaaaagattctcccatagacccgtgcaggagaagttcgtgtgcctgaactgcggcttcgagacacacgcagccgagcaagccgccctgaacatcgccagatcctggctgttcctgcggagccaggagtacaagaaataccagacaaacaagacaaccggcaacaccgataagagagccttcgtcgagacctggcagtccttttaccggaagaagcttaaggaggtgtggaaacctgccgtgcggtctggcggatctggcggaggctccacaagcatggcccacctgatgttcagggacgtggccatcgacttcagccaggaggagtgggagggcctggacctgaagcagagggacctgtacagggacgtgatgctggagaactacagcaacatggtgagcctgggcctgtgcatctaccagcccgacgtgttcagcctgctggagaagggcaaggagccctggaagatcctgagggacgagaccaggggcccctgccccgacatgcagagcaggtgcaccagccccaagaaaaagagaaaagtctaagctgccttctgcggggcttgccttctggccatgcccttcttctctcccttgcacctgtacctcttggtctttgaataaagcctgagtaggaaggctagcaaaaaaaaaaaaaaaaaaaaaaaaaaaaaaaaaaaaaaaaaaaaaaaaaaaaaaaaaaaaaaaaaaaaaaaaaaaaaaaa

SEQ ID NO: 6314 - RNA, 5797 nt, synthetic construct
  source 1..5797: mol_type = other RNA
aggaaataagagagaaaagaagagtaagaagaaatataagagccaccatggcccctaagaagaagcgtaaagtgagccggatggaacgcctcgtctacgaggtgcggcagaagtgcagaaacatcgaggacatctgcatctcctgcggatctctgaacgtgaccctggagcacccactgttcatcggcggcatgtgccagaactgtaaaaactgttttctggagtgtgcctatcaatacgacgatgacggctaccagagctactgcaccatctgttgcggcggaagagaggtgctgatgtgtggaaataacaactgctgccggtgcttctgcgtggaatgcgtggacctgctggtgggccccggcgccgcccaggccgctattaaggaagatccttggaactgctacatgtgcggccacaagggcacatacggcctgctgagacggagagaggactggcctagcagactgcagatgttcttcgccaataaccacgaccaggagttcgacccccctaaggtgtaccctcccgtccccgccgagaagagaaagcccatccgggtcctgagcctgttcgatggcatcgccaccggtctgctggtgctgaaggacctgggcatccaggtggataggtacattgcctccgaggtgtgcgaggactccatcaccgtgggaatggtgcgtcatcagggcaagatcatgtacgtgggcgacgtgcggagcgtgacacagaagcatatccaggagtggggccctttcgacctggtgatcggcggcagcccttgcaatgacctgagcatcgtgaacccagcccggaagggcctgtacgagggaaccggcagactgttcttcgagttttacagactgctgcacgacgcccggcctaaggaaggcgacgaccggcccttcttttggctgttcgagaatgtggtggccatgggagtcagcgacaagcgggatattagccggttcctggagagcaaccccgtgatgatcgatgccaaggaagtgagcgccgcccaccgggccagatacttctggggcaatctgcctggcatgaacagacccctggccagcaccgtgaacgacaagctggagctgcaggagtgcctggagcacggccggatcgccaagttcagcaaggtgagaaccatcaccacccgaagcaacagcatcaaacaaggcaaggaccagcactttcctgtgttcatgaacgagaaggaggacatcctgtggtgtaccgagatggagagagtgttcgggttcccagtccactacacagatgtcagcaacatgtctagactggccagacagagactgctgggaagaagctggtccgtccctgtgatcagacacctgttcgcccctctgaaggagtacttcgcctgcgtgagcagcggcaacagcaacgccaacagccggggccccagcttctctagcggcctggtgccactgtccctgagagggagccacatgggccccatggagatctacaaaaccgtgagcgcctggaagcggcagcctgtgcgcgtgctgagcctgtttcggaatatcgataaagtcctgaaaagcctgggattcctggagagcggctctggctccggcggtggcaccctgaagtacgtggaggatgtgacaaacgtggtcagacgggatgtggagaagtggggccccttcgatctggtgtacggcagcacccaacccctgggcagctcttgtgaccggtgccctggctggtacatgtttcagttccaccggatcctgcagtacgccctgccgagacaggagtcccagcggccattcttttggattttcatggacaacttgctgctgaccgaggatgaccaggaaactaccactcggttcctgcagaccgaagccgtgaccctgcaggacgtgagaggccgggactaccagaacgccatgcgggtgtggtccaacatccctggactgaaaagcaagcacgcacctctgacccctaaagaagaggagtacctgcaggcccaggtgcggagcagaagcaagctggacgcccctaaggtggatctgctggtgaagaattgcctcctgcccctgagagagtacttcaagtatttcagccagaatagtctgcccctgggcggcccaagcagcggcgcccctcctcccagcggcggcagcccagccggctccccaacctctaccgaggagggcacctctgagtccgccacccccgagagcggccctggcacctccaccgagcccagcgagggcagcgcacccggcagccctgccggcagccccacctccacagaggagggaaccagcaccgagcccagcgaaggcagcgccccaggcaccagcaccgagcctagtgagggcggctctggcggcggcagcgcccaggagattaaacggatcaacaagatcagaagaagacttgtgaaagacagcaacaccaagaaggccggcaagacaggccccatgaaaaccctgctggttagagtgatgacacccgatctgagagagcggctggaaaacctgagaaagaagcctgaaaatatcccccagcccatcagcaatacatctagagccaacctgaataagctgctgaccgattacaccgaaatgaagaaggcgatcctgcatgtgtactgggaagagttccagaaggaccctgtgggcctgatgagccgggtggcccagcctgccagcaagaagatcgatcagaacaagctgaaacctgagatggacgagaagggcaacctgaccaccgccggctttgcctgctctcagtgtggccagcccctgttcgtgtacaagctggagcaggtgtctgagaagggcaaggcttacaccaactacttcggacggtgcaatgtggccgagcacgaaaagctgatcctgctggcccagctgaagcccgagaaggatagcgacgaagccgtgacatatagcctgggaaagtttgggcagagggccctggatttctacagcattcatgtgaccaaggagtccacccaccccgtgaagcccctggcccagatcgccggaaacagatacgcctccggacctgtgggaaaggccctgagcgacgcatgtatgggcacaatcgcctccttcctgtctaagtaccaggacatcatcatcgaacaccagaaggtggtgaagggcaaccagaagagactggagagcctgcgggagctggccggcaaggaaaacctggaataccctagcgtgaccctgccacctcagcctcacaccaaggagggcgttgatgcctacaacgaagtgatcgcccgggtgcgaatgtgggtgaacctgaacctgtggcagaagctgaagctaagcagagatgatgccaagcctctgctgagactgaagggattcccttcctttcctctggtcgagagacaggccaacgaagtggactggtgggacatggtgtgtaacgtgaagaagctgatcaacgagaaaaaggaggatggcaaggtgttttggcagaatctggctggctacaagagacaggaagccctgagaccatacctgagcagcgaggaagatcggaagaagggaaagaaattcgctcggtaccagctgggcgacctgctgctgcacctggaaaagaagcacggcgaggactggggaaaggtgtacgacgaggcctgggagcggattgacaagaaagtggaaggcctgagcaagcacatcaagctggaagaggaacggagaagcgaggacgcccagagcaaggccgccctgaccgactggctgcgggctaaggccagcttcgtgatcgagggcctgaaggaggccgacaaggacgagttctgcagatgcgagctgaagctgcagaagtggtacggggacctgcggggaaagcccttcgccatcgaagccgagaacagcatcctggacatcagcggcttcagcaagcagtacaactgtgccttcatctggcagaaggacggcgtgaagaagctgaacctgtacctgatcatcaactacttcaagggcggcaagctgcggttcaagaagatcaaacctgaagccttcgaagccaacagattctacaccgtgatcaacaaaaagagcggcgagatcgtgcccatggaggtgaacttcaacttcgacgaccccaacctgatcatcctgcctctggcctttggcaagagacagggcagagaattcatctggaacgacctgctgtccctggaaaccggcagcctgaagctggccaacggaagagtgatcgagaagacactgtacaacagaagaacccggcaggatgagcctgccctgttcgtggccctgaccttcgagcggcgggaggtcctggactcctccaatatcaaaccaatgaacctgatcggcgtggcaagaggcgaaaacatccccgccgtgatcgccctgaccgaccccgagggctgcccactgagccggtttaaggatagcctgggaaacccaacccacatcctgagaatcggcgagagctataaggagaagcagcggaccatccaggccaagaaggaggtggagcagcggagagccggcggctacagccggaagtacgccagcaaagccaagaatctggcagacgatatggtgagaaacaccgctagagatctgctgtactacgccgtgacccaggatgccatgctgatcttcgccaacctgagccggggcttcggccggcagggcaagcggaccttcatggccgagagacagtacacacggatggaggactggctgaccgccaagctggcctacgagggcctgagcaagacctacctgtccaagacactggcccagtacacctccaagacatgcagcaactgtgggtttaccatcaccagcgccgactacgacagggtgctggagaagctgaagaagacagcaacaggctggatgaccacaattaacggcaaggagctgaaggtggagggccagattacctactacaacagatacaagagacagaacgtagtcaaggacctgtccgtcgagctggatagactgagcgaagaatctgtgaacaacgacatctcctcctggacaaagggcagaagcggagaagctctgagcctcctgaagaaaagattctcccatagacccgtgcaggagaagttcgtgtgcctgaactgcggcttcgagacacacgcagccgagcaagccgccctgaacatcgccagatcctggctgttcctgcggagccaggagtacaagaaataccagacaaacaagacaaccggcaacaccgataagagagccttcgtcgagacctggcagtccttttaccggaagaagcttaaggaggtgtggaaacctgccgtgcggtctggcggatctggcggaggctccacaagcgcccacggcctggtgatgttcaaggacgtggccatcgacgtgagccaggaggagtgggagtgcctgaaccccacccagaggagcctgtacaaggacgtgatgctggagaactacagcaacctggtgagcctgggcctgagcatcagcaagcccgccgtgatcagcagcctggagcagggcaaggagccctggatggtggtgagggaggtgaccggcgagcagtgccccgacctggtgagcaggaccagccccaagaaaaagagaaaagtctaagctgccttctgcggggcttgccttctggccatgcccttcttctctcccttgcacctgtacctcttggtctttgaataaagcctgagtaggaaggctagcaaaaaaaaaaaaaaaaaaaaaaaaaaaaaaaaaaaaaaaaaaaaaaaaaaaaaaaaaaaaaaaaaaaaaaaaaaaaaaaa

SEQ ID NO: 6315 - RNA, 5797 nt, synthetic construct
  source 1..5797: mol_type = other RNA
aggaaataagagagaaaagaagagtaagaagaaatataagagccaccatggcccctaagaagaagcgtaaagtgagccggatggaacgcctcgtctacgaggtgcggcagaagtgcagaaacatcgaggacatctgcatctcctgcggatctctgaacgtgaccctggagcacccactgttcatcggcggcatgtgccagaactgtaaaaactgttttctggagtgtgcctatcaatacgacgatgacggctaccagagctactgcaccatctgttgcggcggaagagaggtgctgatgtgtggaaataacaactgctgccggtgcttctgcgtggaatgcgtggacctgctggtgggccccggcgccgcccaggccgctattaaggaagatccttggaactgctacatgtgcggccacaagggcacatacggcctgctgagacggagagaggactggcctagcagactgcagatgttcttcgccaataaccacgaccaggagttcgacccccctaaggtgtaccctcccgtccccgccgagaagagaaagcccatccgggtcctgagcctgttcgatggcatcgccaccggtctgctggtgctgaaggacctgggcatccaggtggataggtacattgcctccgaggtgtgcgaggactccatcaccgtgggaatggtgcgtcatcagggcaagatcatgtacgtgggcgacgtgcggagcgtgacacagaagcatatccaggagtggggccctttcgacctggtgatcggcggcagcccttgcaatgacctgagcatcgtgaacccagcccggaagggcctgtacgagggaaccggcagactgttcttcgagttttacagactgctgcacgacgcccggcctaaggaaggcgacgaccggcccttcttttggctgttcgagaatgtggtggccatgggagtcagcgacaagcgggatattagccggttcctggagagcaaccccgtgatgatcgatgccaaggaagtgagcgccgcccaccgggccagatacttctggggcaatctgcctggcatgaacagacccctggccagcaccgtgaacgacaagctggagctgcaggagtgcctggagcacggccggatcgccaagttcagcaaggtgagaaccatcaccacccgaagcaacagcatcaaacaaggcaaggaccagcactttcctgtgttcatgaacgagaaggaggacatcctgtggtgtaccgagatggagagagtgttcgggttcccagtccactacacagatgtcagcaacatgtctagactggccagacagagactgctgggaagaagctggtccgtccctgtgatcagacacctgttcgcccctctgaaggagtacttcgcctgcgtgagcagcggcaacagcaacgccaacagccggggccccagcttctctagcggcctggtgccactgtccctgagagggagccacatgggccccatggagatctacaaaaccgtgagcgcctggaagcggcagcctgtgcgcgtgctgagcctgtttcggaatatcgataaagtcctgaaaagcctgggattcctggagagcggctctggctccggcggtggcaccctgaagtacgtggaggatgtgacaaacgtggtcagacgggatgtggagaagtggggccccttcgatctggtgtacggcagcacccaacccctgggcagctcttgtgaccggtgccctggctggtacatgtttcagttccaccggatcctgcagtacgccctgccgagacaggagtcccagcggccattcttttggattttcatggacaacttgctgctgaccgaggatgaccaggaaactaccactcggttcctgcagaccgaagccgtgaccctgcaggacgtgagaggccgggactaccagaacgccatgcgggtgtggtccaacatccctggactgaaaagcaagcacgcacctctgacccctaaagaagaggagtacctgcaggcccaggtgcggagcagaagcaagctggacgcccctaaggtggatctgctggtgaagaattgcctcctgcccctgagagagtacttcaagtatttcagccagaatagtctgcccctgggcggcccaagcagcggcgcccctcctcccagcggcggcagcccagccggctccccaacctctaccgaggagggcacctctgagtccgccacccccgagagcggccctggcacctccaccgagcccagcgagggcagcgcacccggcagccctgccggcagccccacctccacagaggagggaaccagcaccgagcccagcgaaggcagcgccccaggcaccagcaccgagcctagtgagggcggctctggcggcggcagcgcccaggagattaaacggatcaacaagatcagaagaagacttgtgaaagacagcaacaccaagaaggccggcaagacaggccccatgaaaaccctgctggttagagtgatgacacccgatctgagagagcggctggaaaacctgagaaagaagcctgaaaatatcccccagcccatcagcaatacatctagagccaacctgaataagctgctgaccgattacaccgaaatgaagaaggcgatcctgcatgtgtactgggaagagttccagaaggaccctgtgggcctgatgagccgggtggcccagcctgccagcaagaagatcgatcagaacaagctgaaacctgagatggacgagaagggcaacctgaccaccgccggctttgcctgctctcagtgtggccagcccctgttcgtgtacaagctggagcaggtgtctgagaagggcaaggcttacaccaactacttcggacggtgcaatgtggccgagcacgaaaagctgatcctgctggcccagctgaagcccgagaaggatagcgacgaagccgtgacatatagcctgggaaagtttgggcagagggccctggatttctacagcattcatgtgaccaaggagtccacccaccccgtgaagcccctggcccagatcgccggaaacagatacgcctccggacctgtgggaaaggccctgagcgacgcatgtatgggcacaatcgcctccttcctgtctaagtaccaggacatcatcatcgaacaccagaaggtggtgaagggcaaccagaagagactggagagcctgcgggagctggccggcaaggaaaacctggaataccctagcgtgaccctgccacctcagcctcacaccaaggagggcgttgatgcctacaacgaagtgatcgcccgggtgcgaatgtgggtgaacctgaacctgtggcagaagctgaagctaagcagagatgatgccaagcctctgctgagactgaagggattcccttcctttcctctggtcgagagacaggccaacgaagtggactggtgggacatggtgtgtaacgtgaagaagctgatcaacgagaaaaaggaggatggcaaggtgttttggcagaatctggctggctacaagagacaggaagccctgagaccatacctgagcagcgaggaagatcggaagaagggaaagaaattcgctcggtaccagctgggcgacctgctgctgcacctggaaaagaagcacggcgaggactggggaaaggtgtacgacgaggcctgggagcggattgacaagaaagtggaaggcctgagcaagcacatcaagctggaagaggaacggagaagcgaggacgcccagagcaaggccgccctgaccgactggctgcgggctaaggccagcttcgtgatcgagggcctgaaggaggccgacaaggacgagttctgcagatgcgagctgaagctgcagaagtggtacggggacctgcggggaaagcccttcgccatcgaagccgagaacagcatcctggacatcagcggcttcagcaagcagtacaactgtgccttcatctggcagaaggacggcgtgaagaagctgaacctgtacctgatcatcaactacttcaagggcggcaagctgcggttcaagaagatcaaacctgaagccttcgaagccaacagattctacaccgtgatcaacaaaaagagcggcgagatcgtgcccatggaggtgaacttcaacttcgacgaccccaacctgatcatcctgcctctggcctttggcaagagacagggcagagaattcatctggaacgacctgctgtccctggaaaccggcagcctgaagctggccaacggaagagtgatcgagaagacactgtacaacagaagaacccggcaggatgagcctgccctgttcgtggccctgaccttcgagcggcgggaggtcctggactcctccaatatcaaaccaatgaacctgatcggcgtggcaagaggcgaaaacatccccgccgtgatcgccctgaccgaccccgagggctgcccactgagccggtttaaggatagcctgggaaacccaacccacatcctgagaatcggcgagagctataaggagaagcagcggaccatccaggccaagaaggaggtggagcagcggagagccggcggctacagccggaagtacgccagcaaagccaagaatctggcagacgatatggtgagaaacaccgctagagatctgctgtactacgccgtgacccaggatgccatgctgatcttcgccaacctgagccggggcttcggccggcagggcaagcggaccttcatggccgagagacagtacacacggatggaggactggctgaccgccaagctggcctacgagggcctgagcaagacctacctgtccaagacactggcccagtacacctccaagacatgcagcaactgtgggtttaccatcaccagcgccgactacgacagggtgctggagaagctgaagaagacagcaacaggctggatgaccacaattaacggcaaggagctgaaggtggagggccagattacctactacaacagatacaagagacagaacgtagtcaaggacctgtccgtcgagctggatagactgagcgaagaatctgtgaacaacgacatctcctcctggacaaagggcagaagcggagaagctctgagcctcctgaagaaaagattctcccatagacccgtgcaggagaagttcgtgtgcctgaactgcggcttcgagacacacgcagccgagcaagccgccctgaacatcgccagatcctggctgttcctgcggagccaggagtacaagaaataccagacaaacaagacaaccggcaacaccgataagagagccttcgtcgagacctggcagtccttttaccggaagaagcttaaggaggtgtggaaacctgccgtgcggtctggcggatctggcggaggctccacaagccaggagcaggtgagcttcaaggacgtgtgcgtggacttcacccaggaggagtggtacctgctggaccccgcccagaagatcctgtacagggacgtgatcctggagaactacagccacctggtgagcgtgggcaactgcatcaccaagcccgaggtgatcttcaagatcgagcagggcgaggagccctggatcctggaggagaggttccccaagcagtggcacagcggcaagagctacaagtacaccagccccaagaaaaagagaaaagtctaagctgccttctgcggggcttgccttctggccatgcccttcttctctcccttgcacctgtacctcttggtctttgaataaagcctgagtaggaaggctagcaaaaaaaaaaaaaaaaaaaaaaaaaaaaaaaaaaaaaaaaaaaaaaaaaaaaaaaaaaaaaaaaaaaaaaaaaaaaaaaa

SEQ ID NO: 6316 - RNA, 5797 nt, synthetic construct
  source 1..5797: mol_type = other RNA
aggaaataagagagaaaagaagagtaagaagaaatataagagccaccatggcccctaagaagaagcgtaaagtgagccggatggaacgcctcgtctacgaggtgcggcagaagtgcagaaacatcgaggacatctgcatctcctgcggatctctgaacgtgaccctggagcacccactgttcatcggcggcatgtgccagaactgtaaaaactgttttctggagtgtgcctatcaatacgacgatgacggctaccagagctactgcaccatctgttgcggcggaagagaggtgctgatgtgtggaaataacaactgctgccggtgcttctgcgtggaatgcgtggacctgctggtgggccccggcgccgcccaggccgctattaaggaagatccttggaactgctacatgtgcggccacaagggcacatacggcctgctgagacggagagaggactggcctagcagactgcagatgttcttcgccaataaccacgaccaggagttcgacccccctaaggtgtaccctcccgtccccgccgagaagagaaagcccatccgggtcctgagcctgttcgatggcatcgccaccggtctgctggtgctgaaggacctgggcatccaggtggataggtacattgcctccgaggtgtgcgaggactccatcaccgtgggaatggtgcgtcatcagggcaagatcatgtacgtgggcgacgtgcggagcgtgacacagaagcatatccaggagtggggccctttcgacctggtgatcggcggcagcccttgcaatgacctgagcatcgtgaacccagcccggaagggcctgtacgagggaaccggcagactgttcttcgagttttacagactgctgcacgacgcccggcctaaggaaggcgacgaccggcccttcttttggctgttcgagaatgtggtggccatgggagtcagcgacaagcgggatattagccggttcctggagagcaaccccgtgatgatcgatgccaaggaagtgagcgccgcccaccgggccagatacttctggggcaatctgcctggcatgaacagacccctggccagcaccgtgaacgacaagctggagctgcaggagtgcctggagcacggccggatcgccaagttcagcaaggtgagaaccatcaccacccgaagcaacagcatcaaacaaggcaaggaccagcactttcctgtgttcatgaacgagaaggaggacatcctgtggtgtaccgagatggagagagtgttcgggttcccagtccactacacagatgtcagcaacatgtctagactggccagacagagactgctgggaagaagctggtccgtccctgtgatcagacacctgttcgcccctctgaaggagtacttcgcctgcgtgagcagcggcaacagcaacgccaacagccggggccccagcttctctagcggcctggtgccactgtccctgagagggagccacatgggccccatggagatctacaaaaccgtgagcgcctggaagcggcagcctgtgcgcgtgctgagcctgtttcggaatatcgataaagtcctgaaaagcctgggattcctggagagcggctctggctccggcggtggcaccctgaagtacgtggaggatgtgacaaacgtggtcagacgggatgtggagaagtggggccccttcgatctggtgtacggcagcacccaacccctgggcagctcttgtgaccggtgccctggctggtacatgtttcagttccaccggatcctgcagtacgccctgccgagacaggagtcccagcggccattcttttggattttcatggacaacttgctgctgaccgaggatgaccaggaaactaccactcggttcctgcagaccgaagccgtgaccctgcaggacgtgagaggccgggactaccagaacgccatgcgggtgtggtccaacatccctggactgaaaagcaagcacgcacctctgacccctaaagaagaggagtacctgcaggcccaggtgcggagcagaagcaagctggacgcccctaaggtggatctgctggtgaagaattgcctcctgcccctgagagagtacttcaagtatttcagccagaatagtctgcccctgggcggcccaagcagcggcgcccctcctcccagcggcggcagcccagccggctccccaacctctaccgaggagggcacctctgagtccgccacccccgagagcggccctggcacctccaccgagcccagcgagggcagcgcacccggcagccctgccggcagccccacctccacagaggagggaaccagcaccgagcccagcgaaggcagcgccccaggcaccagcaccgagcctagtgagggcggctctggcggcggcagcgcccaggagattaaacggatcaacaagatcagaagaagacttgtgaaagacagcaacaccaagaaggccggcaagacaggccccatgaaaaccctgctggttagagtgatgacacccgatctgagagagcggctggaaaacctgagaaagaagcctgaaaatatcccccagcccatcagcaatacatctagagccaacctgaataagctgctgaccgattacaccgaaatgaagaaggcgatcctgcatgtgtactgggaagagttccagaaggaccctgtgggcctgatgagccgggtggcccagcctgccagcaagaagatcgatcagaacaagctgaaacctgagatggacgagaagggcaacctgaccaccgccggctttgcctgctctcagtgtggccagcccctgttcgtgtacaagctggagcaggtgtctgagaagggcaaggcttacaccaactacttcggacggtgcaatgtggccgagcacgaaaagctgatcctgctggcccagctgaagcccgagaaggatagcgacgaagccgtgacatatagcctgggaaagtttgggcagagggccctggatttctacagcattcatgtgaccaaggagtccacccaccccgtgaagcccctggcccagatcgccggaaacagatacgcctccggacctgtgggaaaggccctgagcgacgcatgtatgggcacaatcgcctccttcctgtctaagtaccaggacatcatcatcgaacaccagaaggtggtgaagggcaaccagaagagactggagagcctgcgggagctggccggcaaggaaaacctggaataccctagcgtgaccctgccacctcagcctcacaccaaggagggcgttgatgcctacaacgaagtgatcgcccgggtgcgaatgtgggtgaacctgaacctgtggcagaagctgaagctaagcagagatgatgccaagcctctgctgagactgaagggattcccttcctttcctctggtcgagagacaggccaacgaagtggactggtgggacatggtgtgtaacgtgaagaagctgatcaacgagaaaaaggaggatggcaaggtgttttggcagaatctggctggctacaagagacaggaagccctgagaccatacctgagcagcgaggaagatcggaagaagggaaagaaattcgctcggtaccagctgggcgacctgctgctgcacctggaaaagaagcacggcgaggactggggaaaggtgtacgacgaggcctgggagcggattgacaagaaagtggaaggcctgagcaagcacatcaagctggaagaggaacggagaagcgaggacgcccagagcaaggccgccctgaccgactggctgcgggctaaggccagcttcgtgatcgagggcctgaaggaggccgacaaggacgagttctgcagatgcgagctgaagctgcagaagtggtacggggacctgcggggaaagcccttcgccatcgaagccgagaacagcatcctggacatcagcggcttcagcaagcagtacaactgtgccttcatctggcagaaggacggcgtgaagaagctgaacctgtacctgatcatcaactacttcaagggcggcaagctgcggttcaagaagatcaaacctgaagccttcgaagccaacagattctacaccgtgatcaacaaaaagagcggcgagatcgtgcccatggaggtgaacttcaacttcgacgaccccaacctgatcatcctgcctctggcctttggcaagagacagggcagagaattcatctggaacgacctgctgtccctggaaaccggcagcctgaagctggccaacggaagagtgatcgagaagacactgtacaacagaagaacccggcaggatgagcctgccctgttcgtggccctgaccttcgagcggcgggaggtcctggactcctccaatatcaaaccaatgaacctgatcggcgtggcaagaggcgaaaacatccccgccgtgatcgccctgaccgaccccgagggctgcccactgagccggtttaaggatagcctgggaaacccaacccacatcctgagaatcggcgagagctataaggagaagcagcggaccatccaggccaagaaggaggtggagcagcggagagccggcggctacagccggaagtacgccagcaaagccaagaatctggcagacgatatggtgagaaacaccgctagagatctgctgtactacgccgtgacccaggatgccatgctgatcttcgccaacctgagccggggcttcggccggcagggcaagcggaccttcatggccgagagacagtacacacggatggaggactggctgaccgccaagctggcctacgagggcctgagcaagacctacctgtccaagacactggcccagtacacctccaagacatgcagcaactgtgggtttaccatcaccagcgccgactacgacagggtgctggagaagctgaagaagacagcaacaggctggatgaccacaattaacggcaaggagctgaaggtggagggccagattacctactacaacagatacaagagacagaacgtagtcaaggacctgtccgtcgagctggatagactgagcgaagaatctgtgaacaacgacatctcctcctggacaaagggcagaagcggagaagctctgagcctcctgaagaaaagattctcccatagacccgtgcaggagaagttcgtgtgcctgaactgcggcttcgagacacacgcagccgagcaagccgccctgaacatcgccagatcctggctgttcctgcggagccaggagtacaagaaataccagacaaacaagacaaccggcaacaccgataagagagccttcgtcgagacctggcagtccttttaccggaagaagcttaaggaggtgtggaaacctgccgtgcggtctggcggatctggcggaggctccacaagcttcctgccccaggtgaccttcgaggacgtggccatctacttcagcagggaggagtgggacgagctgagcgagtggcagagggagctgtaccaggccgtgatgatggagaactacgaggccgtgctgagcctgggcaagaacgacttcatcgcccagtgcacctggggcctgagggagggcgagaagagggccagcggcaagagcgagaaggccaggaacaggcccgtgagcaacctgtggaggaccagccccaagaaaaagagaaaagtctaagctgccttctgcggggcttgccttctggccatgcccttcttctctcccttgcacctgtacctcttggtctttgaataaagcctgagtaggaaggctagcaaaaaaaaaaaaaaaaaaaaaaaaaaaaaaaaaaaaaaaaaaaaaaaaaaaaaaaaaaaaaaaaaaaaaaaaaaaaaaaa

SEQ ID NO: 6317 - RNA, 5797 nt, synthetic construct
  source 1..5797: mol_type = other RNA
aggaaataagagagaaaagaagagtaagaagaaatataagagccaccatggcccctaagaagaagcgtaaagtgagccggatggaacgcctcgtctacgaggtgcggcagaagtgcagaaacatcgaggacatctgcatctcctgcggatctctgaacgtgaccctggagcacccactgttcatcggcggcatgtgccagaactgtaaaaactgttttctggagtgtgcctatcaatacgacgatgacggctaccagagctactgcaccatctgttgcggcggaagagaggtgctgatgtgtggaaataacaactgctgccggtgcttctgcgtggaatgcgtggacctgctggtgggccccggcgccgcccaggccgctattaaggaagatccttggaactgctacatgtgcggccacaagggcacatacggcctgctgagacggagagaggactggcctagcagactgcagatgttcttcgccaataaccacgaccaggagttcgacccccctaaggtgtaccctcccgtccccgccgagaagagaaagcccatccgggtcctgagcctgttcgatggcatcgccaccggtctgctggtgctgaaggacctgggcatccaggtggataggtacattgcctccgaggtgtgcgaggactccatcaccgtgggaatggtgcgtcatcagggcaagatcatgtacgtgggcgacgtgcggagcgtgacacagaagcatatccaggagtggggccctttcgacctggtgatcggcggcagcccttgcaatgacctgagcatcgtgaacccagcccggaagggcctgtacgagggaaccggcagactgttcttcgagttttacagactgctgcacgacgcccggcctaaggaaggcgacgaccggcccttcttttggctgttcgagaatgtggtggccatgggagtcagcgacaagcgggatattagccggttcctggagagcaaccccgtgatgatcgatgccaaggaagtgagcgccgcccaccgggccagatacttctggggcaatctgcctggcatgaacagacccctggccagcaccgtgaacgacaagctggagctgcaggagtgcctggagcacggccggatcgccaagttcagcaaggtgagaaccatcaccacccgaagcaacagcatcaaacaaggcaaggaccagcactttcctgtgttcatgaacgagaaggaggacatcctgtggtgtaccgagatggagagagtgttcgggttcccagtccactacacagatgtcagcaacatgtctagactggccagacagagactgctgggaagaagctggtccgtccctgtgatcagacacctgttcgcccctctgaaggagtacttcgcctgcgtgagcagcggcaacagcaacgccaacagccggggccccagcttctctagcggcctggtgccactgtccctgagagggagccacatgggccccatggagatctacaaaaccgtgagcgcctggaagcggcagcctgtgcgcgtgctgagcctgtttcggaatatcgataaagtcctgaaaagcctgggattcctggagagcggctctggctccggcggtggcaccctgaagtacgtggaggatgtgacaaacgtggtcagacgggatgtggagaagtggggccccttcgatctggtgtacggcagcacccaacccctgggcagctcttgtgaccggtgccctggctggtacatgtttcagttccaccggatcctgcagtacgccctgccgagacaggagtcccagcggccattcttttggattttcatggacaacttgctgctgaccgaggatgaccaggaaactaccactcggttcctgcagaccgaagccgtgaccctgcaggacgtgagaggccgggactaccagaacgccatgcgggtgtggtccaacatccctggactgaaaagcaagcacgcacctctgacccctaaagaagaggagtacctgcaggcccaggtgcggagcagaagcaagctggacgcccctaaggtggatctgctggtgaagaattgcctcctgcccctgagagagtacttcaagtatttcagccagaatagtctgcccctgggcggcccaagcagcggcgcccctcctcccagcggcggcagcccagccggctccccaacctctaccgaggagggcacctctgagtccgccacccccgagagcggccctggcacctccaccgagcccagcgagggcagcgcacccggcagccctgccggcagccccacctccacagaggagggaaccagcaccgagcccagcgaaggcagcgccccaggcaccagcaccgagcctagtgagggcggctctggcggcggcagcgcccaggagattaaacggatcaacaagatcagaagaagacttgtgaaagacagcaacaccaagaaggccggcaagacaggccccatgaaaaccctgctggttagagtgatgacacccgatctgagagagcggctggaaaacctgagaaagaagcctgaaaatatcccccagcccatcagcaatacatctagagccaacctgaataagctgctgaccgattacaccgaaatgaagaaggcgatcctgcatgtgtactgggaagagttccagaaggaccctgtgggcctgatgagccgggtggcccagcctgccagcaagaagatcgatcagaacaagctgaaacctgagatggacgagaagggcaacctgaccaccgccggctttgcctgctctcagtgtggccagcccctgttcgtgtacaagctggagcaggtgtctgagaagggcaaggcttacaccaactacttcggacggtgcaatgtggccgagcacgaaaagctgatcctgctggcccagctgaagcccgagaaggatagcgacgaagccgtgacatatagcctgggaaagtttgggcagagggccctggatttctacagcattcatgtgaccaaggagtccacccaccccgtgaagcccctggcccagatcgccggaaacagatacgcctccggacctgtgggaaaggccctgagcgacgcatgtatgggcacaatcgcctccttcctgtctaagtaccaggacatcatcatcgaacaccagaaggtggtgaagggcaaccagaagagactggagagcctgcgggagctggccggcaaggaaaacctggaataccctagcgtgaccctgccacctcagcctcacaccaaggagggcgttgatgcctacaacgaagtgatcgcccgggtgcgaatgtgggtgaacctgaacctgtggcagaagctgaagctaagcagagatgatgccaagcctctgctgagactgaagggattcccttcctttcctctggtcgagagacaggccaacgaagtggactggtgggacatggtgtgtaacgtgaagaagctgatcaacgagaaaaaggaggatggcaaggtgttttggcagaatctggctggctacaagagacaggaagccctgagaccatacctgagcagcgaggaagatcggaagaagggaaagaaattcgctcggtaccagctgggcgacctgctgctgcacctggaaaagaagcacggcgaggactggggaaaggtgtacgacgaggcctgggagcggattgacaagaaagtggaaggcctgagcaagcacatcaagctggaagaggaacggagaagcgaggacgcccagagcaaggccgccctgaccgactggctgcgggctaaggccagcttcgtgatcgagggcctgaaggaggccgacaaggacgagttctgcagatgcgagctgaagctgcagaagtggtacggggacctgcggggaaagcccttcgccatcgaagccgagaacagcatcctggacatcagcggcttcagcaagcagtacaactgtgccttcatctggcagaaggacggcgtgaagaagctgaacctgtacctgatcatcaactacttcaagggcggcaagctgcggttcaagaagatcaaacctgaagccttcgaagccaacagattctacaccgtgatcaacaaaaagagcggcgagatcgtgcccatggaggtgaacttcaacttcgacgaccccaacctgatcatcctgcctctggcctttggcaagagacagggcagagaattcatctggaacgacctgctgtccctggaaaccggcagcctgaagctggccaacggaagagtgatcgagaagacactgtacaacagaagaacccggcaggatgagcctgccctgttcgtggccctgaccttcgagcggcgggaggtcctggactcctccaatatcaaaccaatgaacctgatcggcgtggcaagaggcgaaaacatccccgccgtgatcgccctgaccgaccccgagggctgcccactgagccggtttaaggatagcctgggaaacccaacccacatcctgagaatcggcgagagctataaggagaagcagcggaccatccaggccaagaaggaggtggagcagcggagagccggcggctacagccggaagtacgccagcaaagccaagaatctggcagacgatatggtgagaaacaccgctagagatctgctgtactacgccgtgacccaggatgccatgctgatcttcgccaacctgagccggggcttcggccggcagggcaagcggaccttcatggccgagagacagtacacacggatggaggactggctgaccgccaagctggcctacgagggcctgagcaagacctacctgtccaagacactggcccagtacacctccaagacatgcagcaactgtgggtttaccatcaccagcgccgactacgacagggtgctggagaagctgaagaagacagcaacaggctggatgaccacaattaacggcaaggagctgaaggtggagggccagattacctactacaacagatacaagagacagaacgtagtcaaggacctgtccgtcgagctggatagactgagcgaagaatctgtgaacaacgacatctcctcctggacaaagggcagaagcggagaagctctgagcctcctgaagaaaagattctcccatagacccgtgcaggagaagttcgtgtgcctgaactgcggcttcgagacacacgcagccgagcaagccgccctgaacatcgccagatcctggctgttcctgcggagccaggagtacaagaaataccagacaaacaagacaaccggcaacaccgataagagagccttcgtcgagacctggcagtccttttaccggaagaagcttaaggaggtgtggaaacctgccgtgcggtctggcggatctggcggaggctccacaagcagccaggagcccgtgaccttcgccgacgtggccgtggtgttcacccccgaggagtgggtgttcctggacagcacccagaggagcctgtacagggacgtgatgctggagaactacaggaacctggccagcgtggccgaccagctgtgcaagcccaacgccctgagctacctggaggagaggggcgagcagtggaccaccgacaggggcgtgctgcccgacacctgcgccgagccccagtgccagaccagccccaagaaaaagagaaaagtctaagctgccttctgcggggcttgccttctggccatgcccttcttctctcccttgcacctgtacctcttggtctttgaataaagcctgagtaggaaggctagcaaaaaaaaaaaaaaaaaaaaaaaaaaaaaaaaaaaaaaaaaaaaaaaaaaaaaaaaaaaaaaaaaaaaaaaaaaaaaaaa

SEQ ID NO: 6318 - RNA, 5797 nt, synthetic construct
  source 1..5797: mol_type = other RNA
aggaaataagagagaaaagaagagtaagaagaaatataagagccaccatggcccctaagaagaagcgtaaagtgagccggatggaacgcctcgtctacgaggtgcggcagaagtgcagaaacatcgaggacatctgcatctcctgcggatctctgaacgtgaccctggagcacccactgttcatcggcggcatgtgccagaactgtaaaaactgttttctggagtgtgcctatcaatacgacgatgacggctaccagagctactgcaccatctgttgcggcggaagagaggtgctgatgtgtggaaataacaactgctgccggtgcttctgcgtggaatgcgtggacctgctggtgggccccggcgccgcccaggccgctattaaggaagatccttggaactgctacatgtgcggccacaagggcacatacggcctgctgagacggagagaggactggcctagcagactgcagatgttcttcgccaataaccacgaccaggagttcgacccccctaaggtgtaccctcccgtccccgccgagaagagaaagcccatccgggtcctgagcctgttcgatggcatcgccaccggtctgctggtgctgaaggacctgggcatccaggtggataggtacattgcctccgaggtgtgcgaggactccatcaccgtgggaatggtgcgtcatcagggcaagatcatgtacgtgggcgacgtgcggagcgtgacacagaagcatatccaggagtggggccctttcgacctggtgatcggcggcagcccttgcaatgacctgagcatcgtgaacccagcccggaagggcctgtacgagggaaccggcagactgttcttcgagttttacagactgctgcacgacgcccggcctaaggaaggcgacgaccggcccttcttttggctgttcgagaatgtggtggccatgggagtcagcgacaagcgggatattagccggttcctggagagcaaccccgtgatgatcgatgccaaggaagtgagcgccgcccaccgggccagatacttctggggcaatctgcctggcatgaacagacccctggccagcaccgtgaacgacaagctggagctgcaggagtgcctggagcacggccggatcgccaagttcagcaaggtgagaaccatcaccacccgaagcaacagcatcaaacaaggcaaggaccagcactttcctgtgttcatgaacgagaaggaggacatcctgtggtgtaccgagatggagagagtgttcgggttcccagtccactacacagatgtcagcaacatgtctagactggccagacagagactgctgggaagaagctggtccgtccctgtgatcagacacctgttcgcccctctgaaggagtacttcgcctgcgtgagcagcggcaacagcaacgccaacagccggggccccagcttctctagcggcctggtgccactgtccctgagagggagccacatgggccccatggagatctacaaaaccgtgagcgcctggaagcggcagcctgtgcgcgtgctgagcctgtttcggaatatcgataaagtcctgaaaagcctgggattcctggagagcggctctggctccggcggtggcaccctgaagtacgtggaggatgtgacaaacgtggtcagacgggatgtggagaagtggggccccttcgatctggtgtacggcagcacccaacccctgggcagctcttgtgaccggtgccctggctggtacatgtttcagttccaccggatcctgcagtacgccctgccgagacaggagtcccagcggccattcttttggattttcatggacaacttgctgctgaccgaggatgaccaggaaactaccactcggttcctgcagaccgaagccgtgaccctgcaggacgtgagaggccgggactaccagaacgccatgcgggtgtggtccaacatccctggactgaaaagcaagcacgcacctctgacccctaaagaagaggagtacctgcaggcccaggtgcggagcagaagcaagctggacgcccctaaggtggatctgctggtgaagaattgcctcctgcccctgagagagtacttcaagtatttcagccagaatagtctgcccctgggcggcccaagcagcggcgcccctcctcccagcggcggcagcccagccggctccccaacctctaccgaggagggcacctctgagtccgccacccccgagagcggccctggcacctccaccgagcccagcgagggcagcgcacccggcagccctgccggcagccccacctccacagaggagggaaccagcaccgagcccagcgaaggcagcgccccaggcaccagcaccgagcctagtgagggcggctctggcggcggcagcgcccaggagattaaacggatcaacaagatcagaagaagacttgtgaaagacagcaacaccaagaaggccggcaagacaggccccatgaaaaccctgctggttagagtgatgacacccgatctgagagagcggctggaaaacctgagaaagaagcctgaaaatatcccccagcccatcagcaatacatctagagccaacctgaataagctgctgaccgattacaccgaaatgaagaaggcgatcctgcatgtgtactgggaagagttccagaaggaccctgtgggcctgatgagccgggtggcccagcctgccagcaagaagatcgatcagaacaagctgaaacctgagatggacgagaagggcaacctgaccaccgccggctttgcctgctctcagtgtggccagcccctgttcgtgtacaagctggagcaggtgtctgagaagggcaaggcttacaccaactacttcggacggtgcaatgtggccgagcacgaaaagctgatcctgctggcccagctgaagcccgagaaggatagcgacgaagccgtgacatatagcctgggaaagtttgggcagagggccctggatttctacagcattcatgtgaccaaggagtccacccaccccgtgaagcccctggcccagatcgccggaaacagatacgcctccggacctgtgggaaaggccctgagcgacgcatgtatgggcacaatcgcctccttcctgtctaagtaccaggacatcatcatcgaacaccagaaggtggtgaagggcaaccagaagagactggagagcctgcgggagctggccggcaaggaaaacctggaataccctagcgtgaccctgccacctcagcctcacaccaaggagggcgttgatgcctacaacgaagtgatcgcccgggtgcgaatgtgggtgaacctgaacctgtggcagaagctgaagctaagcagagatgatgccaagcctctgctgagactgaagggattcccttcctttcctctggtcgagagacaggccaacgaagtggactggtgggacatggtgtgtaacgtgaagaagctgatcaacgagaaaaaggaggatggcaaggtgttttggcagaatctggctggctacaagagacaggaagccctgagaccatacctgagcagcgaggaagatcggaagaagggaaagaaattcgctcggtaccagctgggcgacctgctgctgcacctggaaaagaagcacggcgaggactggggaaaggtgtacgacgaggcctgggagcggattgacaagaaagtggaaggcctgagcaagcacatcaagctggaagaggaacggagaagcgaggacgcccagagcaaggccgccctgaccgactggctgcgggctaaggccagcttcgtgatcgagggcctgaaggaggccgacaaggacgagttctgcagatgcgagctgaagctgcagaagtggtacggggacctgcggggaaagcccttcgccatcgaagccgagaacagcatcctggacatcagcggcttcagcaagcagtacaactgtgccttcatctggcagaaggacggcgtgaagaagctgaacctgtacctgatcatcaactacttcaagggcggcaagctgcggttcaagaagatcaaacctgaagccttcgaagccaacagattctacaccgtgatcaacaaaaagagcggcgagatcgtgcccatggaggtgaacttcaacttcgacgaccccaacctgatcatcctgcctctggcctttggcaagagacagggcagagaattcatctggaacgacctgctgtccctggaaaccggcagcctgaagctggccaacggaagagtgatcgagaagacactgtacaacagaagaacccggcaggatgagcctgccctgttcgtggccctgaccttcgagcggcgggaggtcctggactcctccaatatcaaaccaatgaacctgatcggcgtggcaagaggcgaaaacatccccgccgtgatcgccctgaccgaccccgagggctgcccactgagccggtttaaggatagcctgggaaacccaacccacatcctgagaatcggcgagagctataaggagaagcagcggaccatccaggccaagaaggaggtggagcagcggagagccggcggctacagccggaagtacgccagcaaagccaagaatctggcagacgatatggtgagaaacaccgctagagatctgctgtactacgccgtgacccaggatgccatgctgatcttcgccaacctgagccggggcttcggccggcagggcaagcggaccttcatggccgagagacagtacacacggatggaggactggctgaccgccaagctggcctacgagggcctgagcaagacctacctgtccaagacactggcccagtacacctccaagacatgcagcaactgtgggtttaccatcaccagcgccgactacgacagggtgctggagaagctgaagaagacagcaacaggctggatgaccacaattaacggcaaggagctgaaggtggagggccagattacctactacaacagatacaagagacagaacgtagtcaaggacctgtccgtcgagctggatagactgagcgaagaatctgtgaacaacgacatctcctcctggacaaagggcagaagcggagaagctctgagcctcctgaagaaaagattctcccatagacccgtgcaggagaagttcgtgtgcctgaactgcggcttcgagacacacgcagccgagcaagccgccctgaacatcgccagatcctggctgttcctgcggagccaggagtacaagaaataccagacaaacaagacaaccggcaacaccgataagagagccttcgtcgagacctggcagtccttttaccggaagaagcttaaggaggtgtggaaacctgccgtgcggtctggcggatctggcggaggctccacaagcttccagatgcccgtgaccttcgaggaggtggccgtgtacttcacccagggccagggcgccctgctggaccccgcccagagggccctgtacagggacgtgatgcaggagaactacgagatggtgaccagcctgggcttccccatccccaagcccgagctgatcgccaggctggagaggggcgaggagccctgggtgcccgacctgcaggcctgcaaggagaggaggctgcccaggtgcaccaggaccagccccaagaaaaagagaaaagtctaagctgccttctgcggggcttgccttctggccatgcccttcttctctcccttgcacctgtacctcttggtctttgaataaagcctgagtaggaaggctagcaaaaaaaaaaaaaaaaaaaaaaaaaaaaaaaaaaaaaaaaaaaaaaaaaaaaaaaaaaaaaaaaaaaaaaaaaaaaaaaa

SEQ ID NO: 6319 - RNA, 5797 nt, synthetic construct
  source 1..5797: mol_type = other RNA
aggaaataagagagaaaagaagagtaagaagaaatataagagccaccatggcccctaagaagaagcgtaaagtgagccggatggaacgcctcgtctacgaggtgcggcagaagtgcagaaacatcgaggacatctgcatctcctgcggatctctgaacgtgaccctggagcacccactgttcatcggcggcatgtgccagaactgtaaaaactgttttctggagtgtgcctatcaatacgacgatgacggctaccagagctactgcaccatctgttgcggcggaagagaggtgctgatgtgtggaaataacaactgctgccggtgcttctgcgtggaatgcgtggacctgctggtgggccccggcgccgcccaggccgctattaaggaagatccttggaactgctacatgtgcggccacaagggcacatacggcctgctgagacggagagaggactggcctagcagactgcagatgttcttcgccaataaccacgaccaggagttcgacccccctaaggtgtaccctcccgtccccgccgagaagagaaagcccatccgggtcctgagcctgttcgatggcatcgccaccggtctgctggtgctgaaggacctgggcatccaggtggataggtacattgcctccgaggtgtgcgaggactccatcaccgtgggaatggtgcgtcatcagggcaagatcatgtacgtgggcgacgtgcggagcgtgacacagaagcatatccaggagtggggccctttcgacctggtgatcggcggcagcccttgcaatgacctgagcatcgtgaacccagcccggaagggcctgtacgagggaaccggcagactgttcttcgagttttacagactgctgcacgacgcccggcctaaggaaggcgacgaccggcccttcttttggctgttcgagaatgtggtggccatgggagtcagcgacaagcgggatattagccggttcctggagagcaaccccgtgatgatcgatgccaaggaagtgagcgccgcccaccgggccagatacttctggggcaatctgcctggcatgaacagacccctggccagcaccgtgaacgacaagctggagctgcaggagtgcctggagcacggccggatcgccaagttcagcaaggtgagaaccatcaccacccgaagcaacagcatcaaacaaggcaaggaccagcactttcctgtgttcatgaacgagaaggaggacatcctgtggtgtaccgagatggagagagtgttcgggttcccagtccactacacagatgtcagcaacatgtctagactggccagacagagactgctgggaagaagctggtccgtccctgtgatcagacacctgttcgcccctctgaaggagtacttcgcctgcgtgagcagcggcaacagcaacgccaacagccggggccccagcttctctagcggcctggtgccactgtccctgagagggagccacatgggccccatggagatctacaaaaccgtgagcgcctggaagcggcagcctgtgcgcgtgctgagcctgtttcggaatatcgataaagtcctgaaaagcctgggattcctggagagcggctctggctccggcggtggcaccctgaagtacgtggaggatgtgacaaacgtggtcagacgggatgtggagaagtggggccccttcgatctggtgtacggcagcacccaacccctgggcagctcttgtgaccggtgccctggctggtacatgtttcagttccaccggatcctgcagtacgccctgccgagacaggagtcccagcggccattcttttggattttcatggacaacttgctgctgaccgaggatgaccaggaaactaccactcggttcctgcagaccgaagccgtgaccctgcaggacgtgagaggccgggactaccagaacgccatgcgggtgtggtccaacatccctggactgaaaagcaagcacgcacctctgacccctaaagaagaggagtacctgcaggcccaggtgcggagcagaagcaagctggacgcccctaaggtggatctgctggtgaagaattgcctcctgcccctgagagagtacttcaagtatttcagccagaatagtctgcccctgggcggcccaagcagcggcgcccctcctcccagcggcggcagcccagccggctccccaacctctaccgaggagggcacctctgagtccgccacccccgagagcggccctggcacctccaccgagcccagcgagggcagcgcacccggcagccctgccggcagccccacctccacagaggagggaaccagcaccgagcccagcgaaggcagcgccccaggcaccagcaccgagcctagtgagggcggctctggcggcggcagcgcccaggagattaaacggatcaacaagatcagaagaagacttgtgaaagacagcaacaccaagaaggccggcaagacaggccccatgaaaaccctgctggttagagtgatgacacccgatctgagagagcggctggaaaacctgagaaagaagcctgaaaatatcccccagcccatcagcaatacatctagagccaacctgaataagctgctgaccgattacaccgaaatgaagaaggcgatcctgcatgtgtactgggaagagttccagaaggaccctgtgggcctgatgagccgggtggcccagcctgccagcaagaagatcgatcagaacaagctgaaacctgagatggacgagaagggcaacctgaccaccgccggctttgcctgctctcagtgtggccagcccctgttcgtgtacaagctggagcaggtgtctgagaagggcaaggcttacaccaactacttcggacggtgcaatgtggccgagcacgaaaagctgatcctgctggcccagctgaagcccgagaaggatagcgacgaagccgtgacatatagcctgggaaagtttgggcagagggccctggatttctacagcattcatgtgaccaaggagtccacccaccccgtgaagcccctggcccagatcgccggaaacagatacgcctccggacctgtgggaaaggccctgagcgacgcatgtatgggcacaatcgcctccttcctgtctaagtaccaggacatcatcatcgaacaccagaaggtggtgaagggcaaccagaagagactggagagcctgcgggagctggccggcaaggaaaacctggaataccctagcgtgaccctgccacctcagcctcacaccaaggagggcgttgatgcctacaacgaagtgatcgcccgggtgcgaatgtgggtgaacctgaacctgtggcagaagctgaagctaagcagagatgatgccaagcctctgctgagactgaagggattcccttcctttcctctggtcgagagacaggccaacgaagtggactggtgggacatggtgtgtaacgtgaagaagctgatcaacgagaaaaaggaggatggcaaggtgttttggcagaatctggctggctacaagagacaggaagccctgagaccatacctgagcagcgaggaagatcggaagaagggaaagaaattcgctcggtaccagctgggcgacctgctgctgcacctggaaaagaagcacggcgaggactggggaaaggtgtacgacgaggcctgggagcggattgacaagaaagtggaaggcctgagcaagcacatcaagctggaagaggaacggagaagcgaggacgcccagagcaaggccgccctgaccgactggctgcgggctaaggccagcttcgtgatcgagggcctgaaggaggccgacaaggacgagttctgcagatgcgagctgaagctgcagaagtggtacggggacctgcggggaaagcccttcgccatcgaagccgagaacagcatcctggacatcagcggcttcagcaagcagtacaactgtgccttcatctggcagaaggacggcgtgaagaagctgaacctgtacctgatcatcaactacttcaagggcggcaagctgcggttcaagaagatcaaacctgaagccttcgaagccaacagattctacaccgtgatcaacaaaaagagcggcgagatcgtgcccatggaggtgaacttcaacttcgacgaccccaacctgatcatcctgcctctggcctttggcaagagacagggcagagaattcatctggaacgacctgctgtccctggaaaccggcagcctgaagctggccaacggaagagtgatcgagaagacactgtacaacagaagaacccggcaggatgagcctgccctgttcgtggccctgaccttcgagcggcgggaggtcctggactcctccaatatcaaaccaatgaacctgatcggcgtggcaagaggcgaaaacatccccgccgtgatcgccctgaccgaccccgagggctgcccactgagccggtttaaggatagcctgggaaacccaacccacatcctgagaatcggcgagagctataaggagaagcagcggaccatccaggccaagaaggaggtggagcagcggagagccggcggctacagccggaagtacgccagcaaagccaagaatctggcagacgatatggtgagaaacaccgctagagatctgctgtactacgccgtgacccaggatgccatgctgatcttcgccaacctgagccggggcttcggccggcagggcaagcggaccttcatggccgagagacagtacacacggatggaggactggctgaccgccaagctggcctacgagggcctgagcaagacctacctgtccaagacactggcccagtacacctccaagacatgcagcaactgtgggtttaccatcaccagcgccgactacgacagggtgctggagaagctgaagaagacagcaacaggctggatgaccacaattaacggcaaggagctgaaggtggagggccagattacctactacaacagatacaagagacagaacgtagtcaaggacctgtccgtcgagctggatagactgagcgaagaatctgtgaacaacgacatctcctcctggacaaagggcagaagcggagaagctctgagcctcctgaagaaaagattctcccatagacccgtgcaggagaagttcgtgtgcctgaactgcggcttcgagacacacgcagccgagcaagccgccctgaacatcgccagatcctggctgttcctgcggagccaggagtacaagaaataccagacaaacaagacaaccggcaacaccgataagagagccttcgtcgagacctggcagtccttttaccggaagaagcttaaggaggtgtggaaacctgccgtgcggtctggcggatctggcggaggctccacaagcttccaggagcccgtgaccttcgaggacgtggccgtgtacttcacccagaacgagtgggccagcctgcaccccatgcagagggccctgcacagggaggtgatgctggagaactacgccaacgtgaccagcctgagcgccttccccttccccaagcccgacctgatcttccagctggagcagggcgaggccgcctggggccccgacccctggaccctggccggcggcgagaccctgaggggcatgaccagccccaagaaaaagagaaaagtctaagctgccttctgcggggcttgccttctggccatgcccttcttctctcccttgcacctgtacctcttggtctttgaataaagcctgagtaggaaggctagcaaaaaaaaaaaaaaaaaaaaaaaaaaaaaaaaaaaaaaaaaaaaaaaaaaaaaaaaaaaaaaaaaaaaaaaaaaaaaaaa

SEQ ID NO: 6320 - RNA, 5797 nt, synthetic construct
  source 1..5797: mol_type = other RNA
aggaaataagagagaaaagaagagtaagaagaaatataagagccaccatggcccctaagaagaagcgtaaagtgagccggatggaacgcctcgtctacgaggtgcggcagaagtgcagaaacatcgaggacatctgcatctcctgcggatctctgaacgtgaccctggagcacccactgttcatcggcggcatgtgccagaactgtaaaaactgttttctggagtgtgcctatcaatacgacgatgacggctaccagagctactgcaccatctgttgcggcggaagagaggtgctgatgtgtggaaataacaactgctgccggtgcttctgcgtggaatgcgtggacctgctggtgggccccggcgccgcccaggccgctattaaggaagatccttggaactgctacatgtgcggccacaagggcacatacggcctgctgagacggagagaggactggcctagcagactgcagatgttcttcgccaataaccacgaccaggagttcgacccccctaaggtgtaccctcccgtccccgccgagaagagaaagcccatccgggtcctgagcctgttcgatggcatcgccaccggtctgctggtgctgaaggacctgggcatccaggtggataggtacattgcctccgaggtgtgcgaggactccatcaccgtgggaatggtgcgtcatcagggcaagatcatgtacgtgggcgacgtgcggagcgtgacacagaagcatatccaggagtggggccctttcgacctggtgatcggcggcagcccttgcaatgacctgagcatcgtgaacccagcccggaagggcctgtacgagggaaccggcagactgttcttcgagttttacagactgctgcacgacgcccggcctaaggaaggcgacgaccggcccttcttttggctgttcgagaatgtggtggccatgggagtcagcgacaagcgggatattagccggttcctggagagcaaccccgtgatgatcgatgccaaggaagtgagcgccgcccaccgggccagatacttctggggcaatctgcctggcatgaacagacccctggccagcaccgtgaacgacaagctggagctgcaggagtgcctggagcacggccggatcgccaagttcagcaaggtgagaaccatcaccacccgaagcaacagcatcaaacaaggcaaggaccagcactttcctgtgttcatgaacgagaaggaggacatcctgtggtgtaccgagatggagagagtgttcgggttcccagtccactacacagatgtcagcaacatgtctagactggccagacagagactgctgggaagaagctggtccgtccctgtgatcagacacctgttcgcccctctgaaggagtacttcgcctgcgtgagcagcggcaacagcaacgccaacagccggggccccagcttctctagcggcctggtgccactgtccctgagagggagccacatgggccccatggagatctacaaaaccgtgagcgcctggaagcggcagcctgtgcgcgtgctgagcctgtttcggaatatcgataaagtcctgaaaagcctgggattcctggagagcggctctggctccggcggtggcaccctgaagtacgtggaggatgtgacaaacgtggtcagacgggatgtggagaagtggggccccttcgatctggtgtacggcagcacccaacccctgggcagctcttgtgaccggtgccctggctggtacatgtttcagttccaccggatcctgcagtacgccctgccgagacaggagtcccagcggccattcttttggattttcatggacaacttgctgctgaccgaggatgaccaggaaactaccactcggttcctgcagaccgaagccgtgaccctgcaggacgtgagaggccgggactaccagaacgccatgcgggtgtggtccaacatccctggactgaaaagcaagcacgcacctctgacccctaaagaagaggagtacctgcaggcccaggtgcggagcagaagcaagctggacgcccctaaggtggatctgctggtgaagaattgcctcctgcccctgagagagtacttcaagtatttcagccagaatagtctgcccctgggcggcccaagcagcggcgcccctcctcccagcggcggcagcccagccggctccccaacctctaccgaggagggcacctctgagtccgccacccccgagagcggccctggcacctccaccgagcccagcgagggcagcgcacccggcagccctgccggcagccccacctccacagaggagggaaccagcaccgagcccagcgaaggcagcgccccaggcaccagcaccgagcctagtgagggcggctctggcggcggcagcgcccaggagattaaacggatcaacaagatcagaagaagacttgtgaaagacagcaacaccaagaaggccggcaagacaggccccatgaaaaccctgctggttagagtgatgacacccgatctgagagagcggctggaaaacctgagaaagaagcctgaaaatatcccccagcccatcagcaatacatctagagccaacctgaataagctgctgaccgattacaccgaaatgaagaaggcgatcctgcatgtgtactgggaagagttccagaaggaccctgtgggcctgatgagccgggtggcccagcctgccagcaagaagatcgatcagaacaagctgaaacctgagatggacgagaagggcaacctgaccaccgccggctttgcctgctctcagtgtggccagcccctgttcgtgtacaagctggagcaggtgtctgagaagggcaaggcttacaccaactacttcggacggtgcaatgtggccgagcacgaaaagctgatcctgctggcccagctgaagcccgagaaggatagcgacgaagccgtgacatatagcctgggaaagtttgggcagagggccctggatttctacagcattcatgtgaccaaggagtccacccaccccgtgaagcccctggcccagatcgccggaaacagatacgcctccggacctgtgggaaaggccctgagcgacgcatgtatgggcacaatcgcctccttcctgtctaagtaccaggacatcatcatcgaacaccagaaggtggtgaagggcaaccagaagagactggagagcctgcgggagctggccggcaaggaaaacctggaataccctagcgtgaccctgccacctcagcctcacaccaaggagggcgttgatgcctacaacgaagtgatcgcccgggtgcgaatgtgggtgaacctgaacctgtggcagaagctgaagctaagcagagatgatgccaagcctctgctgagactgaagggattcccttcctttcctctggtcgagagacaggccaacgaagtggactggtgggacatggtgtgtaacgtgaagaagctgatcaacgagaaaaaggaggatggcaaggtgttttggcagaatctggctggctacaagagacaggaagccctgagaccatacctgagcagcgaggaagatcggaagaagggaaagaaattcgctcggtaccagctgggcgacctgctgctgcacctggaaaagaagcacggcgaggactggggaaaggtgtacgacgaggcctgggagcggattgacaagaaagtggaaggcctgagcaagcacatcaagctggaagaggaacggagaagcgaggacgcccagagcaaggccgccctgaccgactggctgcgggctaaggccagcttcgtgatcgagggcctgaaggaggccgacaaggacgagttctgcagatgcgagctgaagctgcagaagtggtacggggacctgcggggaaagcccttcgccatcgaagccgagaacagcatcctggacatcagcggcttcagcaagcagtacaactgtgccttcatctggcagaaggacggcgtgaagaagctgaacctgtacctgatcatcaactacttcaagggcggcaagctgcggttcaagaagatcaaacctgaagccttcgaagccaacagattctacaccgtgatcaacaaaaagagcggcgagatcgtgcccatggaggtgaacttcaacttcgacgaccccaacctgatcatcctgcctctggcctttggcaagagacagggcagagaattcatctggaacgacctgctgtccctggaaaccggcagcctgaagctggccaacggaagagtgatcgagaagacactgtacaacagaagaacccggcaggatgagcctgccctgttcgtggccctgaccttcgagcggcgggaggtcctggactcctccaatatcaaaccaatgaacctgatcggcgtggcaagaggcgaaaacatccccgccgtgatcgccctgaccgaccccgagggctgcccactgagccggtttaaggatagcctgggaaacccaacccacatcctgagaatcggcgagagctataaggagaagcagcggaccatccaggccaagaaggaggtggagcagcggagagccggcggctacagccggaagtacgccagcaaagccaagaatctggcagacgatatggtgagaaacaccgctagagatctgctgtactacgccgtgacccaggatgccatgctgatcttcgccaacctgagccggggcttcggccggcagggcaagcggaccttcatggccgagagacagtacacacggatggaggactggctgaccgccaagctggcctacgagggcctgagcaagacctacctgtccaagacactggcccagtacacctccaagacatgcagcaactgtgggtttaccatcaccagcgccgactacgacagggtgctggagaagctgaagaagacagcaacaggctggatgaccacaattaacggcaaggagctgaaggtggagggccagattacctactacaacagatacaagagacagaacgtagtcaaggacctgtccgtcgagctggatagactgagcgaagaatctgtgaacaacgacatctcctcctggacaaagggcagaagcggagaagctctgagcctcctgaagaaaagattctcccatagacccgtgcaggagaagttcgtgtgcctgaactgcggcttcgagacacacgcagccgagcaagccgccctgaacatcgccagatcctggctgttcctgcggagccaggagtacaagaaataccagacaaacaagacaaccggcaacaccgataagagagccttcgtcgagacctggcagtccttttaccggaagaagcttaaggaggtgtggaaacctgccgtgcggtctggcggatctggcggaggctccacaagcatggccctgacccagggccagctgagcttcagcgacgtggccatcgagttcagccaggaggagtggaagtgcctggaccccggccagaaggccctgtacagggacgtgatgctggagaactacaggaacctgatcagcctgggcatctgcctgcccgacctgagcgtgaccagcatcttcttcaccagcggcctgggcagggccaggctgcagggcggcagcctggccagggtgagcagggtgaccagccccaagaaaaagagaaaagtctaagctgccttctgcggggcttgccttctggccatgcccttcttctctcccttgcacctgtacctcttggtctttgaataaagcctgagtaggaaggctagcaaaaaaaaaaaaaaaaaaaaaaaaaaaaaaaaaaaaaaaaaaaaaaaaaaaaaaaaaaaaaaaaaaaaaaaaaaaaaaaa

SEQ ID NO: 6321 - RNA, 5797 nt, synthetic construct
  source 1..5797: mol_type = other RNA
aggaaataagagagaaaagaagagtaagaagaaatataagagccaccatggcccctaagaagaagcgtaaagtgagccggatggaacgcctcgtctacgaggtgcggcagaagtgcagaaacatcgaggacatctgcatctcctgcggatctctgaacgtgaccctggagcacccactgttcatcggcggcatgtgccagaactgtaaaaactgttttctggagtgtgcctatcaatacgacgatgacggctaccagagctactgcaccatctgttgcggcggaagagaggtgctgatgtgtggaaataacaactgctgccggtgcttctgcgtggaatgcgtggacctgctggtgggccccggcgccgcccaggccgctattaaggaagatccttggaactgctacatgtgcggccacaagggcacatacggcctgctgagacggagagaggactggcctagcagactgcagatgttcttcgccaataaccacgaccaggagttcgacccccctaaggtgtaccctcccgtccccgccgagaagagaaagcccatccgggtcctgagcctgttcgatggcatcgccaccggtctgctggtgctgaaggacctgggcatccaggtggataggtacattgcctccgaggtgtgcgaggactccatcaccgtgggaatggtgcgtcatcagggcaagatcatgtacgtgggcgacgtgcggagcgtgacacagaagcatatccaggagtggggccctttcgacctggtgatcggcggcagcccttgcaatgacctgagcatcgtgaacccagcccggaagggcctgtacgagggaaccggcagactgttcttcgagttttacagactgctgcacgacgcccggcctaaggaaggcgacgaccggcccttcttttggctgttcgagaatgtggtggccatgggagtcagcgacaagcgggatattagccggttcctggagagcaaccccgtgatgatcgatgccaaggaagtgagcgccgcccaccgggccagatacttctggggcaatctgcctggcatgaacagacccctggccagcaccgtgaacgacaagctggagctgcaggagtgcctggagcacggccggatcgccaagttcagcaaggtgagaaccatcaccacccgaagcaacagcatcaaacaaggcaaggaccagcactttcctgtgttcatgaacgagaaggaggacatcctgtggtgtaccgagatggagagagtgttcgggttcccagtccactacacagatgtcagcaacatgtctagactggccagacagagactgctgggaagaagctggtccgtccctgtgatcagacacctgttcgcccctctgaaggagtacttcgcctgcgtgagcagcggcaacagcaacgccaacagccggggccccagcttctctagcggcctggtgccactgtccctgagagggagccacatgggccccatggagatctacaaaaccgtgagcgcctggaagcggcagcctgtgcgcgtgctgagcctgtttcggaatatcgataaagtcctgaaaagcctgggattcctggagagcggctctggctccggcggtggcaccctgaagtacgtggaggatgtgacaaacgtggtcagacgggatgtggagaagtggggccccttcgatctggtgtacggcagcacccaacccctgggcagctcttgtgaccggtgccctggctggtacatgtttcagttccaccggatcctgcagtacgccctgccgagacaggagtcccagcggccattcttttggattttcatggacaacttgctgctgaccgaggatgaccaggaaactaccactcggttcctgcagaccgaagccgtgaccctgcaggacgtgagaggccgggactaccagaacgccatgcgggtgtggtccaacatccctggactgaaaagcaagcacgcacctctgacccctaaagaagaggagtacctgcaggcccaggtgcggagcagaagcaagctggacgcccctaaggtggatctgctggtgaagaattgcctcctgcccctgagagagtacttcaagtatttcagccagaatagtctgcccctgggcggcccaagcagcggcgcccctcctcccagcggcggcagcccagccggctccccaacctctaccgaggagggcacctctgagtccgccacccccgagagcggccctggcacctccaccgagcccagcgagggcagcgcacccggcagccctgccggcagccccacctccacagaggagggaaccagcaccgagcccagcgaaggcagcgccccaggcaccagcaccgagcctagtgagggcggctctggcggcggcagcgcccaggagattaaacggatcaacaagatcagaagaagacttgtgaaagacagcaacaccaagaaggccggcaagacaggccccatgaaaaccctgctggttagagtgatgacacccgatctgagagagcggctggaaaacctgagaaagaagcctgaaaatatcccccagcccatcagcaatacatctagagccaacctgaataagctgctgaccgattacaccgaaatgaagaaggcgatcctgcatgtgtactgggaagagttccagaaggaccctgtgggcctgatgagccgggtggcccagcctgccagcaagaagatcgatcagaacaagctgaaacctgagatggacgagaagggcaacctgaccaccgccggctttgcctgctctcagtgtggccagcccctgttcgtgtacaagctggagcaggtgtctgagaagggcaaggcttacaccaactacttcggacggtgcaatgtggccgagcacgaaaagctgatcctgctggcccagctgaagcccgagaaggatagcgacgaagccgtgacatatagcctgggaaagtttgggcagagggccctggatttctacagcattcatgtgaccaaggagtccacccaccccgtgaagcccctggcccagatcgccggaaacagatacgcctccggacctgtgggaaaggccctgagcgacgcatgtatgggcacaatcgcctccttcctgtctaagtaccaggacatcatcatcgaacaccagaaggtggtgaagggcaaccagaagagactggagagcctgcgggagctggccggcaaggaaaacctggaataccctagcgtgaccctgccacctcagcctcacaccaaggagggcgttgatgcctacaacgaagtgatcgcccgggtgcgaatgtgggtgaacctgaacctgtggcagaagctgaagctaagcagagatgatgccaagcctctgctgagactgaagggattcccttcctttcctctggtcgagagacaggccaacgaagtggactggtgggacatggtgtgtaacgtgaagaagctgatcaacgagaaaaaggaggatggcaaggtgttttggcagaatctggctggctacaagagacaggaagccctgagaccatacctgagcagcgaggaagatcggaagaagggaaagaaattcgctcggtaccagctgggcgacctgctgctgcacctggaaaagaagcacggcgaggactggggaaaggtgtacgacgaggcctgggagcggattgacaagaaagtggaaggcctgagcaagcacatcaagctggaagaggaacggagaagcgaggacgcccagagcaaggccgccctgaccgactggctgcgggctaaggccagcttcgtgatcgagggcctgaaggaggccgacaaggacgagttctgcagatgcgagctgaagctgcagaagtggtacggggacctgcggggaaagcccttcgccatcgaagccgagaacagcatcctggacatcagcggcttcagcaagcagtacaactgtgccttcatctggcagaaggacggcgtgaagaagctgaacctgtacctgatcatcaactacttcaagggcggcaagctgcggttcaagaagatcaaacctgaagccttcgaagccaacagattctacaccgtgatcaacaaaaagagcggcgagatcgtgcccatggaggtgaacttcaacttcgacgaccccaacctgatcatcctgcctctggcctttggcaagagacagggcagagaattcatctggaacgacctgctgtccctggaaaccggcagcctgaagctggccaacggaagagtgatcgagaagacactgtacaacagaagaacccggcaggatgagcctgccctgttcgtggccctgaccttcgagcggcgggaggtcctggactcctccaatatcaaaccaatgaacctgatcggcgtggcaagaggcgaaaacatccccgccgtgatcgccctgaccgaccccgagggctgcccactgagccggtttaaggatagcctgggaaacccaacccacatcctgagaatcggcgagagctataaggagaagcagcggaccatccaggccaagaaggaggtggagcagcggagagccggcggctacagccggaagtacgccagcaaagccaagaatctggcagacgatatggtgagaaacaccgctagagatctgctgtactacgccgtgacccaggatgccatgctgatcttcgccaacctgagccggggcttcggccggcagggcaagcggaccttcatggccgagagacagtacacacggatggaggactggctgaccgccaagctggcctacgagggcctgagcaagacctacctgtccaagacactggcccagtacacctccaagacatgcagcaactgtgggtttaccatcaccagcgccgactacgacagggtgctggagaagctgaagaagacagcaacaggctggatgaccacaattaacggcaaggagctgaaggtggagggccagattacctactacaacagatacaagagacagaacgtagtcaaggacctgtccgtcgagctggatagactgagcgaagaatctgtgaacaacgacatctcctcctggacaaagggcagaagcggagaagctctgagcctcctgaagaaaagattctcccatagacccgtgcaggagaagttcgtgtgcctgaactgcggcttcgagacacacgcagccgagcaagccgccctgaacatcgccagatcctggctgttcctgcggagccaggagtacaagaaataccagacaaacaagacaaccggcaacaccgataagagagccttcgtcgagacctggcagtccttttaccggaagaagcttaaggaggtgtggaaacctgccgtgcggtctggcggatctggcggaggctccacaagctaccaggaggccctgaccttccaggacgtgaaggtgaccttcagccaggaggagtggggctgcctggacagcgcccagaggaacctgtacagggacgtgatgctggagaactacggcaacgtggtgagcgtggtgggcagcagccccaagcccgccctgatcagctggctggaggccaggaagcccagcaccgtgaacatctgcaaggtgcagcccaagagggacagcggcaccgcccccgagaccagccccaagaaaaagagaaaagtctaagctgccttctgcggggcttgccttctggccatgcccttcttctctcccttgcacctgtacctcttggtctttgaataaagcctgagtaggaaggctagcaaaaaaaaaaaaaaaaaaaaaaaaaaaaaaaaaaaaaaaaaaaaaaaaaaaaaaaaaaaaaaaaaaaaaaaaaaaaaaaa

SEQ ID NO: 6322 - RNA, 5797 nt, synthetic construct
  source 1..5797: mol_type = other RNA
aggaaataagagagaaaagaagagtaagaagaaatataagagccaccatggcccctaagaagaagcgtaaagtgagccggatggaacgcctcgtctacgaggtgcggcagaagtgcagaaacatcgaggacatctgcatctcctgcggatctctgaacgtgaccctggagcacccactgttcatcggcggcatgtgccagaactgtaaaaactgttttctggagtgtgcctatcaatacgacgatgacggctaccagagctactgcaccatctgttgcggcggaagagaggtgctgatgtgtggaaataacaactgctgccggtgcttctgcgtggaatgcgtggacctgctggtgggccccggcgccgcccaggccgctattaaggaagatccttggaactgctacatgtgcggccacaagggcacatacggcctgctgagacggagagaggactggcctagcagactgcagatgttcttcgccaataaccacgaccaggagttcgacccccctaaggtgtaccctcccgtccccgccgagaagagaaagcccatccgggtcctgagcctgttcgatggcatcgccaccggtctgctggtgctgaaggacctgggcatccaggtggataggtacattgcctccgaggtgtgcgaggactccatcaccgtgggaatggtgcgtcatcagggcaagatcatgtacgtgggcgacgtgcggagcgtgacacagaagcatatccaggagtggggccctttcgacctggtgatcggcggcagcccttgcaatgacctgagcatcgtgaacccagcccggaagggcctgtacgagggaaccggcagactgttcttcgagttttacagactgctgcacgacgcccggcctaaggaaggcgacgaccggcccttcttttggctgttcgagaatgtggtggccatgggagtcagcgacaagcgggatattagccggttcctggagagcaaccccgtgatgatcgatgccaaggaagtgagcgccgcccaccgggccagatacttctggggcaatctgcctggcatgaacagacccctggccagcaccgtgaacgacaagctggagctgcaggagtgcctggagcacggccggatcgccaagttcagcaaggtgagaaccatcaccacccgaagcaacagcatcaaacaaggcaaggaccagcactttcctgtgttcatgaacgagaaggaggacatcctgtggtgtaccgagatggagagagtgttcgggttcccagtccactacacagatgtcagcaacatgtctagactggccagacagagactgctgggaagaagctggtccgtccctgtgatcagacacctgttcgcccctctgaaggagtacttcgcctgcgtgagcagcggcaacagcaacgccaacagccggggccccagcttctctagcggcctggtgccactgtccctgagagggagccacatgggccccatggagatctacaaaaccgtgagcgcctggaagcggcagcctgtgcgcgtgctgagcctgtttcggaatatcgataaagtcctgaaaagcctgggattcctggagagcggctctggctccggcggtggcaccctgaagtacgtggaggatgtgacaaacgtggtcagacgggatgtggagaagtggggccccttcgatctggtgtacggcagcacccaacccctgggcagctcttgtgaccggtgccctggctggtacatgtttcagttccaccggatcctgcagtacgccctgccgagacaggagtcccagcggccattcttttggattttcatggacaacttgctgctgaccgaggatgaccaggaaactaccactcggttcctgcagaccgaagccgtgaccctgcaggacgtgagaggccgggactaccagaacgccatgcgggtgtggtccaacatccctggactgaaaagcaagcacgcacctctgacccctaaagaagaggagtacctgcaggcccaggtgcggagcagaagcaagctggacgcccctaaggtggatctgctggtgaagaattgcctcctgcccctgagagagtacttcaagtatttcagccagaatagtctgcccctgggcggcccaagcagcggcgcccctcctcccagcggcggcagcccagccggctccccaacctctaccgaggagggcacctctgagtccgccacccccgagagcggccctggcacctccaccgagcccagcgagggcagcgcacccggcagccctgccggcagccccacctccacagaggagggaaccagcaccgagcccagcgaaggcagcgccccaggcaccagcaccgagcctagtgagggcggctctggcggcggcagcgcccaggagattaaacggatcaacaagatcagaagaagacttgtgaaagacagcaacaccaagaaggccggcaagacaggccccatgaaaaccctgctggttagagtgatgacacccgatctgagagagcggctggaaaacctgagaaagaagcctgaaaatatcccccagcccatcagcaatacatctagagccaacctgaataagctgctgaccgattacaccgaaatgaagaaggcgatcctgcatgtgtactgggaagagttccagaaggaccctgtgggcctgatgagccgggtggcccagcctgccagcaagaagatcgatcagaacaagctgaaacctgagatggacgagaagggcaacctgaccaccgccggctttgcctgctctcagtgtggccagcccctgttcgtgtacaagctggagcaggtgtctgagaagggcaaggcttacaccaactacttcggacggtgcaatgtggccgagcacgaaaagctgatcctgctggcccagctgaagcccgagaaggatagcgacgaagccgtgacatatagcctgggaaagtttgggcagagggccctggatttctacagcattcatgtgaccaaggagtccacccaccccgtgaagcccctggcccagatcgccggaaacagatacgcctccggacctgtgggaaaggccctgagcgacgcatgtatgggcacaatcgcctccttcctgtctaagtaccaggacatcatcatcgaacaccagaaggtggtgaagggcaaccagaagagactggagagcctgcgggagctggccggcaaggaaaacctggaataccctagcgtgaccctgccacctcagcctcacaccaaggagggcgttgatgcctacaacgaagtgatcgcccgggtgcgaatgtgggtgaacctgaacctgtggcagaagctgaagctaagcagagatgatgccaagcctctgctgagactgaagggattcccttcctttcctctggtcgagagacaggccaacgaagtggactggtgggacatggtgtgtaacgtgaagaagctgatcaacgagaaaaaggaggatggcaaggtgttttggcagaatctggctggctacaagagacaggaagccctgagaccatacctgagcagcgaggaagatcggaagaagggaaagaaattcgctcggtaccagctgggcgacctgctgctgcacctggaaaagaagcacggcgaggactggggaaaggtgtacgacgaggcctgggagcggattgacaagaaagtggaaggcctgagcaagcacatcaagctggaagaggaacggagaagcgaggacgcccagagcaaggccgccctgaccgactggctgcgggctaaggccagcttcgtgatcgagggcctgaaggaggccgacaaggacgagttctgcagatgcgagctgaagctgcagaagtggtacggggacctgcggggaaagcccttcgccatcgaagccgagaacagcatcctggacatcagcggcttcagcaagcagtacaactgtgccttcatctggcagaaggacggcgtgaagaagctgaacctgtacctgatcatcaactacttcaagggcggcaagctgcggttcaagaagatcaaacctgaagccttcgaagccaacagattctacaccgtgatcaacaaaaagagcggcgagatcgtgcccatggaggtgaacttcaacttcgacgaccccaacctgatcatcctgcctctggcctttggcaagagacagggcagagaattcatctggaacgacctgctgtccctggaaaccggcagcctgaagctggccaacggaagagtgatcgagaagacactgtacaacagaagaacccggcaggatgagcctgccctgttcgtggccctgaccttcgagcggcgggaggtcctggactcctccaatatcaaaccaatgaacctgatcggcgtggcaagaggcgaaaacatccccgccgtgatcgccctgaccgaccccgagggctgcccactgagccggtttaaggatagcctgggaaacccaacccacatcctgagaatcggcgagagctataaggagaagcagcggaccatccaggccaagaaggaggtggagcagcggagagccggcggctacagccggaagtacgccagcaaagccaagaatctggcagacgatatggtgagaaacaccgctagagatctgctgtactacgccgtgacccaggatgccatgctgatcttcgccaacctgagccggggcttcggccggcagggcaagcggaccttcatggccgagagacagtacacacggatggaggactggctgaccgccaagctggcctacgagggcctgagcaagacctacctgtccaagacactggcccagtacacctccaagacatgcagcaactgtgggtttaccatcaccagcgccgactacgacagggtgctggagaagctgaagaagacagcaacaggctggatgaccacaattaacggcaaggagctgaaggtggagggccagattacctactacaacagatacaagagacagaacgtagtcaaggacctgtccgtcgagctggatagactgagcgaagaatctgtgaacaacgacatctcctcctggacaaagggcagaagcggagaagctctgagcctcctgaagaaaagattctcccatagacccgtgcaggagaagttcgtgtgcctgaactgcggcttcgagacacacgcagccgagcaagccgccctgaacatcgccagatcctggctgttcctgcggagccaggagtacaagaaataccagacaaacaagacaaccggcaacaccgataagagagccttcgtcgagacctggcagtccttttaccggaagaagcttaaggaggtgtggaaacctgccgtgcggtctggcggatctggcggaggctccacaagccagggcagcgtgagcttcgaggacgtggccgtgtacttcaccgaggaggagtgggccctgctggacagcagccagagggccctgcacagggaggtgatgctggagaacagcaggaacctggccgccgtgggctacggccaggagcacaagaactaccaggagcccagcctggccctgttccagagcgaggagaggatgctgggcatccagagggtgctgcagaagaccaggaggagctgcctgaccagccccaagaaaaagagaaaagtctaagctgccttctgcggggcttgccttctggccatgcccttcttctctcccttgcacctgtacctcttggtctttgaataaagcctgagtaggaaggctagcaaaaaaaaaaaaaaaaaaaaaaaaaaaaaaaaaaaaaaaaaaaaaaaaaaaaaaaaaaaaaaaaaaaaaaaaaaaaaaaa

SEQ ID NO: 6323 - RNA, 5797 nt, synthetic construct
  source 1..5797: mol_type = other RNA
aggaaataagagagaaaagaagagtaagaagaaatataagagccaccatggcccctaagaagaagcgtaaagtgagccggatggaacgcctcgtctacgaggtgcggcagaagtgcagaaacatcgaggacatctgcatctcctgcggatctctgaacgtgaccctggagcacccactgttcatcggcggcatgtgccagaactgtaaaaactgttttctggagtgtgcctatcaatacgacgatgacggctaccagagctactgcaccatctgttgcggcggaagagaggtgctgatgtgtggaaataacaactgctgccggtgcttctgcgtggaatgcgtggacctgctggtgggccccggcgccgcccaggccgctattaaggaagatccttggaactgctacatgtgcggccacaagggcacatacggcctgctgagacggagagaggactggcctagcagactgcagatgttcttcgccaataaccacgaccaggagttcgacccccctaaggtgtaccctcccgtccccgccgagaagagaaagcccatccgggtcctgagcctgttcgatggcatcgccaccggtctgctggtgctgaaggacctgggcatccaggtggataggtacattgcctccgaggtgtgcgaggactccatcaccgtgggaatggtgcgtcatcagggcaagatcatgtacgtgggcgacgtgcggagcgtgacacagaagcatatccaggagtggggccctttcgacctggtgatcggcggcagcccttgcaatgacctgagcatcgtgaacccagcccggaagggcctgtacgagggaaccggcagactgttcttcgagttttacagactgctgcacgacgcccggcctaaggaaggcgacgaccggcccttcttttggctgttcgagaatgtggtggccatgggagtcagcgacaagcgggatattagccggttcctggagagcaaccccgtgatgatcgatgccaaggaagtgagcgccgcccaccgggccagatacttctggggcaatctgcctggcatgaacagacccctggccagcaccgtgaacgacaagctggagctgcaggagtgcctggagcacggccggatcgccaagttcagcaaggtgagaaccatcaccacccgaagcaacagcatcaaacaaggcaaggaccagcactttcctgtgttcatgaacgagaaggaggacatcctgtggtgtaccgagatggagagagtgttcgggttcccagtccactacacagatgtcagcaacatgtctagactggccagacagagactgctgggaagaagctggtccgtccctgtgatcagacacctgttcgcccctctgaaggagtacttcgcctgcgtgagcagcggcaacagcaacgccaacagccggggccccagcttctctagcggcctggtgccactgtccctgagagggagccacatgggccccatggagatctacaaaaccgtgagcgcctggaagcggcagcctgtgcgcgtgctgagcctgtttcggaatatcgataaagtcctgaaaagcctgggattcctggagagcggctctggctccggcggtggcaccctgaagtacgtggaggatgtgacaaacgtggtcagacgggatgtggagaagtggggccccttcgatctggtgtacggcagcacccaacccctgggcagctcttgtgaccggtgccctggctggtacatgtttcagttccaccggatcctgcagtacgccctgccgagacaggagtcccagcggccattcttttggattttcatggacaacttgctgctgaccgaggatgaccaggaaactaccactcggttcctgcagaccgaagccgtgaccctgcaggacgtgagaggccgggactaccagaacgccatgcgggtgtggtccaacatccctggactgaaaagcaagcacgcacctctgacccctaaagaagaggagtacctgcaggcccaggtgcggagcagaagcaagctggacgcccctaaggtggatctgctggtgaagaattgcctcctgcccctgagagagtacttcaagtatttcagccagaatagtctgcccctgggcggcccaagcagcggcgcccctcctcccagcggcggcagcccagccggctccccaacctctaccgaggagggcacctctgagtccgccacccccgagagcggccctggcacctccaccgagcccagcgagggcagcgcacccggcagccctgccggcagccccacctccacagaggagggaaccagcaccgagcccagcgaaggcagcgccccaggcaccagcaccgagcctagtgagggcggctctggcggcggcagcgcccaggagattaaacggatcaacaagatcagaagaagacttgtgaaagacagcaacaccaagaaggccggcaagacaggccccatgaaaaccctgctggttagagtgatgacacccgatctgagagagcggctggaaaacctgagaaagaagcctgaaaatatcccccagcccatcagcaatacatctagagccaacctgaataagctgctgaccgattacaccgaaatgaagaaggcgatcctgcatgtgtactgggaagagttccagaaggaccctgtgggcctgatgagccgggtggcccagcctgccagcaagaagatcgatcagaacaagctgaaacctgagatggacgagaagggcaacctgaccaccgccggctttgcctgctctcagtgtggccagcccctgttcgtgtacaagctggagcaggtgtctgagaagggcaaggcttacaccaactacttcggacggtgcaatgtggccgagcacgaaaagctgatcctgctggcccagctgaagcccgagaaggatagcgacgaagccgtgacatatagcctgggaaagtttgggcagagggccctggatttctacagcattcatgtgaccaaggagtccacccaccccgtgaagcccctggcccagatcgccggaaacagatacgcctccggacctgtgggaaaggccctgagcgacgcatgtatgggcacaatcgcctccttcctgtctaagtaccaggacatcatcatcgaacaccagaaggtggtgaagggcaaccagaagagactggagagcctgcgggagctggccggcaaggaaaacctggaataccctagcgtgaccctgccacctcagcctcacaccaaggagggcgttgatgcctacaacgaagtgatcgcccgggtgcgaatgtgggtgaacctgaacctgtggcagaagctgaagctaagcagagatgatgccaagcctctgctgagactgaagggattcccttcctttcctctggtcgagagacaggccaacgaagtggactggtgggacatggtgtgtaacgtgaagaagctgatcaacgagaaaaaggaggatggcaaggtgttttggcagaatctggctggctacaagagacaggaagccctgagaccatacctgagcagcgaggaagatcggaagaagggaaagaaattcgctcggtaccagctgggcgacctgctgctgcacctggaaaagaagcacggcgaggactggggaaaggtgtacgacgaggcctgggagcggattgacaagaaagtggaaggcctgagcaagcacatcaagctggaagaggaacggagaagcgaggacgcccagagcaaggccgccctgaccgactggctgcgggctaaggccagcttcgtgatcgagggcctgaaggaggccgacaaggacgagttctgcagatgcgagctgaagctgcagaagtggtacggggacctgcggggaaagcccttcgccatcgaagccgagaacagcatcctggacatcagcggcttcagcaagcagtacaactgtgccttcatctggcagaaggacggcgtgaagaagctgaacctgtacctgatcatcaactacttcaagggcggcaagctgcggttcaagaagatcaaacctgaagccttcgaagccaacagattctacaccgtgatcaacaaaaagagcggcgagatcgtgcccatggaggtgaacttcaacttcgacgaccccaacctgatcatcctgcctctggcctttggcaagagacagggcagagaattcatctggaacgacctgctgtccctggaaaccggcagcctgaagctggccaacggaagagtgatcgagaagacactgtacaacagaagaacccggcaggatgagcctgccctgttcgtggccctgaccttcgagcggcgggaggtcctggactcctccaatatcaaaccaatgaacctgatcggcgtggcaagaggcgaaaacatccccgccgtgatcgccctgaccgaccccgagggctgcccactgagccggtttaaggatagcctgggaaacccaacccacatcctgagaatcggcgagagctataaggagaagcagcggaccatccaggccaagaaggaggtggagcagcggagagccggcggctacagccggaagtacgccagcaaagccaagaatctggcagacgatatggtgagaaacaccgctagagatctgctgtactacgccgtgacccaggatgccatgctgatcttcgccaacctgagccggggcttcggccggcagggcaagcggaccttcatggccgagagacagtacacacggatggaggactggctgaccgccaagctggcctacgagggcctgagcaagacctacctgtccaagacactggcccagtacacctccaagacatgcagcaactgtgggtttaccatcaccagcgccgactacgacagggtgctggagaagctgaagaagacagcaacaggctggatgaccacaattaacggcaaggagctgaaggtggagggccagattacctactacaacagatacaagagacagaacgtagtcaaggacctgtccgtcgagctggatagactgagcgaagaatctgtgaacaacgacatctcctcctggacaaagggcagaagcggagaagctctgagcctcctgaagaaaagattctcccatagacccgtgcaggagaagttcgtgtgcctgaactgcggcttcgagacacacgcagccgagcaagccgccctgaacatcgccagatcctggctgttcctgcggagccaggagtacaagaaataccagacaaacaagacaaccggcaacaccgataagagagccttcgtcgagacctggcagtccttttaccggaagaagcttaaggaggtgtggaaacctgccgtgcggtctggcggatctggcggaggctccacaagcggccaggaggaggtgaccttcaaggacgtggccgtggacttcaccagggaggagtggaggctgctgagccccccccagaaggagctgtacaaggaggtgatggtggagaacgccaggaacctgctgagcgtgggcctgcccgcccccaccaaggacgtgctgagctacctgaagaagaggggcgcccccgtgatgctggagcaggagggcctgaggaactacttccccgagggcgagatcaggaccagccccaagaaaaagagaaaagtctaagctgccttctgcggggcttgccttctggccatgcccttcttctctcccttgcacctgtacctcttggtctttgaataaagcctgagtaggaaggctagcaaaaaaaaaaaaaaaaaaaaaaaaaaaaaaaaaaaaaaaaaaaaaaaaaaaaaaaaaaaaaaaaaaaaaaaaaaaaaaaa

SEQ ID NO: 6324 - RNA, 5797 nt, synthetic construct
  source 1..5797: mol_type = other RNA
aggaaataagagagaaaagaagagtaagaagaaatataagagccaccatggcccctaagaagaagcgtaaagtgagccggatggaacgcctcgtctacgaggtgcggcagaagtgcagaaacatcgaggacatctgcatctcctgcggatctctgaacgtgaccctggagcacccactgttcatcggcggcatgtgccagaactgtaaaaactgttttctggagtgtgcctatcaatacgacgatgacggctaccagagctactgcaccatctgttgcggcggaagagaggtgctgatgtgtggaaataacaactgctgccggtgcttctgcgtggaatgcgtggacctgctggtgggccccggcgccgcccaggccgctattaaggaagatccttggaactgctacatgtgcggccacaagggcacatacggcctgctgagacggagagaggactggcctagcagactgcagatgttcttcgccaataaccacgaccaggagttcgacccccctaaggtgtaccctcccgtccccgccgagaagagaaagcccatccgggtcctgagcctgttcgatggcatcgccaccggtctgctggtgctgaaggacctgggcatccaggtggataggtacattgcctccgaggtgtgcgaggactccatcaccgtgggaatggtgcgtcatcagggcaagatcatgtacgtgggcgacgtgcggagcgtgacacagaagcatatccaggagtggggccctttcgacctggtgatcggcggcagcccttgcaatgacctgagcatcgtgaacccagcccggaagggcctgtacgagggaaccggcagactgttcttcgagttttacagactgctgcacgacgcccggcctaaggaaggcgacgaccggcccttcttttggctgttcgagaatgtggtggccatgggagtcagcgacaagcgggatattagccggttcctggagagcaaccccgtgatgatcgatgccaaggaagtgagcgccgcccaccgggccagatacttctggggcaatctgcctggcatgaacagacccctggccagcaccgtgaacgacaagctggagctgcaggagtgcctggagcacggccggatcgccaagttcagcaaggtgagaaccatcaccacccgaagcaacagcatcaaacaaggcaaggaccagcactttcctgtgttcatgaacgagaaggaggacatcctgtggtgtaccgagatggagagagtgttcgggttcccagtccactacacagatgtcagcaacatgtctagactggccagacagagactgctgggaagaagctggtccgtccctgtgatcagacacctgttcgcccctctgaaggagtacttcgcctgcgtgagcagcggcaacagcaacgccaacagccggggccccagcttctctagcggcctggtgccactgtccctgagagggagccacatgggccccatggagatctacaaaaccgtgagcgcctggaagcggcagcctgtgcgcgtgctgagcctgtttcggaatatcgataaagtcctgaaaagcctgggattcctggagagcggctctggctccggcggtggcaccctgaagtacgtggaggatgtgacaaacgtggtcagacgggatgtggagaagtggggccccttcgatctggtgtacggcagcacccaacccctgggcagctcttgtgaccggtgccctggctggtacatgtttcagttccaccggatcctgcagtacgccctgccgagacaggagtcccagcggccattcttttggattttcatggacaacttgctgctgaccgaggatgaccaggaaactaccactcggttcctgcagaccgaagccgtgaccctgcaggacgtgagaggccgggactaccagaacgccatgcgggtgtggtccaacatccctggactgaaaagcaagcacgcacctctgacccctaaagaagaggagtacctgcaggcccaggtgcggagcagaagcaagctggacgcccctaaggtggatctgctggtgaagaattgcctcctgcccctgagagagtacttcaagtatttcagccagaatagtctgcccctgggcggcccaagcagcggcgcccctcctcccagcggcggcagcccagccggctccccaacctctaccgaggagggcacctctgagtccgccacccccgagagcggccctggcacctccaccgagcccagcgagggcagcgcacccggcagccctgccggcagccccacctccacagaggagggaaccagcaccgagcccagcgaaggcagcgccccaggcaccagcaccgagcctagtgagggcggctctggcggcggcagcgcccaggagattaaacggatcaacaagatcagaagaagacttgtgaaagacagcaacaccaagaaggccggcaagacaggccccatgaaaaccctgctggttagagtgatgacacccgatctgagagagcggctggaaaacctgagaaagaagcctgaaaatatcccccagcccatcagcaatacatctagagccaacctgaataagctgctgaccgattacaccgaaatgaagaaggcgatcctgcatgtgtactgggaagagttccagaaggaccctgtgggcctgatgagccgggtggcccagcctgccagcaagaagatcgatcagaacaagctgaaacctgagatggacgagaagggcaacctgaccaccgccggctttgcctgctctcagtgtggccagcccctgttcgtgtacaagctggagcaggtgtctgagaagggcaaggcttacaccaactacttcggacggtgcaatgtggccgagcacgaaaagctgatcctgctggcccagctgaagcccgagaaggatagcgacgaagccgtgacatatagcctgggaaagtttgggcagagggccctggatttctacagcattcatgtgaccaaggagtccacccaccccgtgaagcccctggcccagatcgccggaaacagatacgcctccggacctgtgggaaaggccctgagcgacgcatgtatgggcacaatcgcctccttcctgtctaagtaccaggacatcatcatcgaacaccagaaggtggtgaagggcaaccagaagagactggagagcctgcgggagctggccggcaaggaaaacctggaataccctagcgtgaccctgccacctcagcctcacaccaaggagggcgttgatgcctacaacgaagtgatcgcccgggtgcgaatgtgggtgaacctgaacctgtggcagaagctgaagctaagcagagatgatgccaagcctctgctgagactgaagggattcccttcctttcctctggtcgagagacaggccaacgaagtggactggtgggacatggtgtgtaacgtgaagaagctgatcaacgagaaaaaggaggatggcaaggtgttttggcagaatctggctggctacaagagacaggaagccctgagaccatacctgagcagcgaggaagatcggaagaagggaaagaaattcgctcggtaccagctgggcgacctgctgctgcacctggaaaagaagcacggcgaggactggggaaaggtgtacgacgaggcctgggagcggattgacaagaaagtggaaggcctgagcaagcacatcaagctggaagaggaacggagaagcgaggacgcccagagcaaggccgccctgaccgactggctgcgggctaaggccagcttcgtgatcgagggcctgaaggaggccgacaaggacgagttctgcagatgcgagctgaagctgcagaagtggtacggggacctgcggggaaagcccttcgccatcgaagccgagaacagcatcctggacatcagcggcttcagcaagcagtacaactgtgccttcatctggcagaaggacggcgtgaagaagctgaacctgtacctgatcatcaactacttcaagggcggcaagctgcggttcaagaagatcaaacctgaagccttcgaagccaacagattctacaccgtgatcaacaaaaagagcggcgagatcgtgcccatggaggtgaacttcaacttcgacgaccccaacctgatcatcctgcctctggcctttggcaagagacagggcagagaattcatctggaacgacctgctgtccctggaaaccggcagcctgaagctggccaacggaagagtgatcgagaagacactgtacaacagaagaacccggcaggatgagcctgccctgttcgtggccctgaccttcgagcggcgggaggtcctggactcctccaatatcaaaccaatgaacctgatcggcgtggcaagaggcgaaaacatccccgccgtgatcgccctgaccgaccccgagggctgcccactgagccggtttaaggatagcctgggaaacccaacccacatcctgagaatcggcgagagctataaggagaagcagcggaccatccaggccaagaaggaggtggagcagcggagagccggcggctacagccggaagtacgccagcaaagccaagaatctggcagacgatatggtgagaaacaccgctagagatctgctgtactacgccgtgacccaggatgccatgctgatcttcgccaacctgagccggggcttcggccggcagggcaagcggaccttcatggccgagagacagtacacacggatggaggactggctgaccgccaagctggcctacgagggcctgagcaagacctacctgtccaagacactggcccagtacacctccaagacatgcagcaactgtgggtttaccatcaccagcgccgactacgacagggtgctggagaagctgaagaagacagcaacaggctggatgaccacaattaacggcaaggagctgaaggtggagggccagattacctactacaacagatacaagagacagaacgtagtcaaggacctgtccgtcgagctggatagactgagcgaagaatctgtgaacaacgacatctcctcctggacaaagggcagaagcggagaagctctgagcctcctgaagaaaagattctcccatagacccgtgcaggagaagttcgtgtgcctgaactgcggcttcgagacacacgcagccgagcaagccgccctgaacatcgccagatcctggctgttcctgcggagccaggagtacaagaaataccagacaaacaagacaaccggcaacaccgataagagagccttcgtcgagacctggcagtccttttaccggaagaagcttaaggaggtgtggaaacctgccgtgcggtctggcggatctggcggaggctccacaagcgagccctgggccgtgaccttcgccgacgtggccgtgtacttcagcagcgaggagtggaggtgcctgaggcccgcccagagggccctgtacagggacgtgatgagggacacctacggcctgctgagcgccctgggcggcggcggcaccaagcccgccctgatcagctgggtggagggcgaggccgagctgtgggaccccgacgcccaggaccccgaggtggtgaggtggcccgccgaggccgacaccagccccaagaaaaagagaaaagtctaagctgccttctgcggggcttgccttctggccatgcccttcttctctcccttgcacctgtacctcttggtctttgaataaagcctgagtaggaaggctagcaaaaaaaaaaaaaaaaaaaaaaaaaaaaaaaaaaaaaaaaaaaaaaaaaaaaaaaaaaaaaaaaaaaaaaaaaaaaaaaa

SEQ ID NO: 6325 - RNA, 5797 nt, synthetic construct
  source 1..5797: mol_type = other RNA
aggaaataagagagaaaagaagagtaagaagaaatataagagccaccatggcccctaagaagaagcgtaaagtgagccggatggaacgcctcgtctacgaggtgcggcagaagtgcagaaacatcgaggacatctgcatctcctgcggatctctgaacgtgaccctggagcacccactgttcatcggcggcatgtgccagaactgtaaaaactgttttctggagtgtgcctatcaatacgacgatgacggctaccagagctactgcaccatctgttgcggcggaagagaggtgctgatgtgtggaaataacaactgctgccggtgcttctgcgtggaatgcgtggacctgctggtgggccccggcgccgcccaggccgctattaaggaagatccttggaactgctacatgtgcggccacaagggcacatacggcctgctgagacggagagaggactggcctagcagactgcagatgttcttcgccaataaccacgaccaggagttcgacccccctaaggtgtaccctcccgtccccgccgagaagagaaagcccatccgggtcctgagcctgttcgatggcatcgccaccggtctgctggtgctgaaggacctgggcatccaggtggataggtacattgcctccgaggtgtgcgaggactccatcaccgtgggaatggtgcgtcatcagggcaagatcatgtacgtgggcgacgtgcggagcgtgacacagaagcatatccaggagtggggccctttcgacctggtgatcggcggcagcccttgcaatgacctgagcatcgtgaacccagcccggaagggcctgtacgagggaaccggcagactgttcttcgagttttacagactgctgcacgacgcccggcctaaggaaggcgacgaccggcccttcttttggctgttcgagaatgtggtggccatgggagtcagcgacaagcgggatattagccggttcctggagagcaaccccgtgatgatcgatgccaaggaagtgagcgccgcccaccgggccagatacttctggggcaatctgcctggcatgaacagacccctggccagcaccgtgaacgacaagctggagctgcaggagtgcctggagcacggccggatcgccaagttcagcaaggtgagaaccatcaccacccgaagcaacagcatcaaacaaggcaaggaccagcactttcctgtgttcatgaacgagaaggaggacatcctgtggtgtaccgagatggagagagtgttcgggttcccagtccactacacagatgtcagcaacatgtctagactggccagacagagactgctgggaagaagctggtccgtccctgtgatcagacacctgttcgcccctctgaaggagtacttcgcctgcgtgagcagcggcaacagcaacgccaacagccggggccccagcttctctagcggcctggtgccactgtccctgagagggagccacatgggccccatggagatctacaaaaccgtgagcgcctggaagcggcagcctgtgcgcgtgctgagcctgtttcggaatatcgataaagtcctgaaaagcctgggattcctggagagcggctctggctccggcggtggcaccctgaagtacgtggaggatgtgacaaacgtggtcagacgggatgtggagaagtggggccccttcgatctggtgtacggcagcacccaacccctgggcagctcttgtgaccggtgccctggctggtacatgtttcagttccaccggatcctgcagtacgccctgccgagacaggagtcccagcggccattcttttggattttcatggacaacttgctgctgaccgaggatgaccaggaaactaccactcggttcctgcagaccgaagccgtgaccctgcaggacgtgagaggccgggactaccagaacgccatgcgggtgtggtccaacatccctggactgaaaagcaagcacgcacctctgacccctaaagaagaggagtacctgcaggcccaggtgcggagcagaagcaagctggacgcccctaaggtggatctgctggtgaagaattgcctcctgcccctgagagagtacttcaagtatttcagccagaatagtctgcccctgggcggcccaagcagcggcgcccctcctcccagcggcggcagcccagccggctccccaacctctaccgaggagggcacctctgagtccgccacccccgagagcggccctggcacctccaccgagcccagcgagggcagcgcacccggcagccctgccggcagccccacctccacagaggagggaaccagcaccgagcccagcgaaggcagcgccccaggcaccagcaccgagcctagtgagggcggctctggcggcggcagcgcccaggagattaaacggatcaacaagatcagaagaagacttgtgaaagacagcaacaccaagaaggccggcaagacaggccccatgaaaaccctgctggttagagtgatgacacccgatctgagagagcggctggaaaacctgagaaagaagcctgaaaatatcccccagcccatcagcaatacatctagagccaacctgaataagctgctgaccgattacaccgaaatgaagaaggcgatcctgcatgtgtactgggaagagttccagaaggaccctgtgggcctgatgagccgggtggcccagcctgccagcaagaagatcgatcagaacaagctgaaacctgagatggacgagaagggcaacctgaccaccgccggctttgcctgctctcagtgtggccagcccctgttcgtgtacaagctggagcaggtgtctgagaagggcaaggcttacaccaactacttcggacggtgcaatgtggccgagcacgaaaagctgatcctgctggcccagctgaagcccgagaaggatagcgacgaagccgtgacatatagcctgggaaagtttgggcagagggccctggatttctacagcattcatgtgaccaaggagtccacccaccccgtgaagcccctggcccagatcgccggaaacagatacgcctccggacctgtgggaaaggccctgagcgacgcatgtatgggcacaatcgcctccttcctgtctaagtaccaggacatcatcatcgaacaccagaaggtggtgaagggcaaccagaagagactggagagcctgcgggagctggccggcaaggaaaacctggaataccctagcgtgaccctgccacctcagcctcacaccaaggagggcgttgatgcctacaacgaagtgatcgcccgggtgcgaatgtgggtgaacctgaacctgtggcagaagctgaagctaagcagagatgatgccaagcctctgctgagactgaagggattcccttcctttcctctggtcgagagacaggccaacgaagtggactggtgggacatggtgtgtaacgtgaagaagctgatcaacgagaaaaaggaggatggcaaggtgttttggcagaatctggctggctacaagagacaggaagccctgagaccatacctgagcagcgaggaagatcggaagaagggaaagaaattcgctcggtaccagctgggcgacctgctgctgcacctggaaaagaagcacggcgaggactggggaaaggtgtacgacgaggcctgggagcggattgacaagaaagtggaaggcctgagcaagcacatcaagctggaagaggaacggagaagcgaggacgcccagagcaaggccgccctgaccgactggctgcgggctaaggccagcttcgtgatcgagggcctgaaggaggccgacaaggacgagttctgcagatgcgagctgaagctgcagaagtggtacggggacctgcggggaaagcccttcgccatcgaagccgagaacagcatcctggacatcagcggcttcagcaagcagtacaactgtgccttcatctggcagaaggacggcgtgaagaagctgaacctgtacctgatcatcaactacttcaagggcggcaagctgcggttcaagaagatcaaacctgaagccttcgaagccaacagattctacaccgtgatcaacaaaaagagcggcgagatcgtgcccatggaggtgaacttcaacttcgacgaccccaacctgatcatcctgcctctggcctttggcaagagacagggcagagaattcatctggaacgacctgctgtccctggaaaccggcagcctgaagctggccaacggaagagtgatcgagaagacactgtacaacagaagaacccggcaggatgagcctgccctgttcgtggccctgaccttcgagcggcgggaggtcctggactcctccaatatcaaaccaatgaacctgatcggcgtggcaagaggcgaaaacatccccgccgtgatcgccctgaccgaccccgagggctgcccactgagccggtttaaggatagcctgggaaacccaacccacatcctgagaatcggcgagagctataaggagaagcagcggaccatccaggccaagaaggaggtggagcagcggagagccggcggctacagccggaagtacgccagcaaagccaagaatctggcagacgatatggtgagaaacaccgctagagatctgctgtactacgccgtgacccaggatgccatgctgatcttcgccaacctgagccggggcttcggccggcagggcaagcggaccttcatggccgagagacagtacacacggatggaggactggctgaccgccaagctggcctacgagggcctgagcaagacctacctgtccaagacactggcccagtacacctccaagacatgcagcaactgtgggtttaccatcaccagcgccgactacgacagggtgctggagaagctgaagaagacagcaacaggctggatgaccacaattaacggcaaggagctgaaggtggagggccagattacctactacaacagatacaagagacagaacgtagtcaaggacctgtccgtcgagctggatagactgagcgaagaatctgtgaacaacgacatctcctcctggacaaagggcagaagcggagaagctctgagcctcctgaagaaaagattctcccatagacccgtgcaggagaagttcgtgtgcctgaactgcggcttcgagacacacgcagccgagcaagccgccctgaacatcgccagatcctggctgttcctgcggagccaggagtacaagaaataccagacaaacaagacaaccggcaacaccgataagagagccttcgtcgagacctggcagtccttttaccggaagaagcttaaggaggtgtggaaacctgccgtgcggtctggcggatctggcggaggctccacaagcgtgcagagccacgtggtgttcgaggacgtggccatctacttcagccaggaggagtggggcctgctggacgaggcccagaggttcctgtaccacgccgtgatgctggagaacttcgccctgctgagcagcctgggctgctggcacggcgcccaggacgagcaggccctgagcgagcagggcgtgagcgtgggcggcagccaggtgaggacccccaagcccgcccccagcatccagaagagccagaccagccccaagaaaaagagaaaagtctaagctgccttctgcggggcttgccttctggccatgcccttcttctctcccttgcacctgtacctcttggtctttgaataaagcctgagtaggaaggctagcaaaaaaaaaaaaaaaaaaaaaaaaaaaaaaaaaaaaaaaaaaaaaaaaaaaaaaaaaaaaaaaaaaaaaaaaaaaaaaaa

SEQ ID NO: 6326 - RNA, 5797 nt, synthetic construct
  source 1..5797: mol_type = other RNA
aggaaataagagagaaaagaagagtaagaagaaatataagagccaccatggcccctaagaagaagcgtaaagtgagccggatggaacgcctcgtctacgaggtgcggcagaagtgcagaaacatcgaggacatctgcatctcctgcggatctctgaacgtgaccctggagcacccactgttcatcggcggcatgtgccagaactgtaaaaactgttttctggagtgtgcctatcaatacgacgatgacggctaccagagctactgcaccatctgttgcggcggaagagaggtgctgatgtgtggaaataacaactgctgccggtgcttctgcgtggaatgcgtggacctgctggtgggccccggcgccgcccaggccgctattaaggaagatccttggaactgctacatgtgcggccacaagggcacatacggcctgctgagacggagagaggactggcctagcagactgcagatgttcttcgccaataaccacgaccaggagttcgacccccctaaggtgtaccctcccgtccccgccgagaagagaaagcccatccgggtcctgagcctgttcgatggcatcgccaccggtctgctggtgctgaaggacctgggcatccaggtggataggtacattgcctccgaggtgtgcgaggactccatcaccgtgggaatggtgcgtcatcagggcaagatcatgtacgtgggcgacgtgcggagcgtgacacagaagcatatccaggagtggggccctttcgacctggtgatcggcggcagcccttgcaatgacctgagcatcgtgaacccagcccggaagggcctgtacgagggaaccggcagactgttcttcgagttttacagactgctgcacgacgcccggcctaaggaaggcgacgaccggcccttcttttggctgttcgagaatgtggtggccatgggagtcagcgacaagcgggatattagccggttcctggagagcaaccccgtgatgatcgatgccaaggaagtgagcgccgcccaccgggccagatacttctggggcaatctgcctggcatgaacagacccctggccagcaccgtgaacgacaagctggagctgcaggagtgcctggagcacggccggatcgccaagttcagcaaggtgagaaccatcaccacccgaagcaacagcatcaaacaaggcaaggaccagcactttcctgtgttcatgaacgagaaggaggacatcctgtggtgtaccgagatggagagagtgttcgggttcccagtccactacacagatgtcagcaacatgtctagactggccagacagagactgctgggaagaagctggtccgtccctgtgatcagacacctgttcgcccctctgaaggagtacttcgcctgcgtgagcagcggcaacagcaacgccaacagccggggccccagcttctctagcggcctggtgccactgtccctgagagggagccacatgggccccatggagatctacaaaaccgtgagcgcctggaagcggcagcctgtgcgcgtgctgagcctgtttcggaatatcgataaagtcctgaaaagcctgggattcctggagagcggctctggctccggcggtggcaccctgaagtacgtggaggatgtgacaaacgtggtcagacgggatgtggagaagtggggccccttcgatctggtgtacggcagcacccaacccctgggcagctcttgtgaccggtgccctggctggtacatgtttcagttccaccggatcctgcagtacgccctgccgagacaggagtcccagcggccattcttttggattttcatggacaacttgctgctgaccgaggatgaccaggaaactaccactcggttcctgcagaccgaagccgtgaccctgcaggacgtgagaggccgggactaccagaacgccatgcgggtgtggtccaacatccctggactgaaaagcaagcacgcacctctgacccctaaagaagaggagtacctgcaggcccaggtgcggagcagaagcaagctggacgcccctaaggtggatctgctggtgaagaattgcctcctgcccctgagagagtacttcaagtatttcagccagaatagtctgcccctgggcggcccaagcagcggcgcccctcctcccagcggcggcagcccagccggctccccaacctctaccgaggagggcacctctgagtccgccacccccgagagcggccctggcacctccaccgagcccagcgagggcagcgcacccggcagccctgccggcagccccacctccacagaggagggaaccagcaccgagcccagcgaaggcagcgccccaggcaccagcaccgagcctagtgagggcggctctggcggcggcagcgcccaggagattaaacggatcaacaagatcagaagaagacttgtgaaagacagcaacaccaagaaggccggcaagacaggccccatgaaaaccctgctggttagagtgatgacacccgatctgagagagcggctggaaaacctgagaaagaagcctgaaaatatcccccagcccatcagcaatacatctagagccaacctgaataagctgctgaccgattacaccgaaatgaagaaggcgatcctgcatgtgtactgggaagagttccagaaggaccctgtgggcctgatgagccgggtggcccagcctgccagcaagaagatcgatcagaacaagctgaaacctgagatggacgagaagggcaacctgaccaccgccggctttgcctgctctcagtgtggccagcccctgttcgtgtacaagctggagcaggtgtctgagaagggcaaggcttacaccaactacttcggacggtgcaatgtggccgagcacgaaaagctgatcctgctggcccagctgaagcccgagaaggatagcgacgaagccgtgacatatagcctgggaaagtttgggcagagggccctggatttctacagcattcatgtgaccaaggagtccacccaccccgtgaagcccctggcccagatcgccggaaacagatacgcctccggacctgtgggaaaggccctgagcgacgcatgtatgggcacaatcgcctccttcctgtctaagtaccaggacatcatcatcgaacaccagaaggtggtgaagggcaaccagaagagactggagagcctgcgggagctggccggcaaggaaaacctggaataccctagcgtgaccctgccacctcagcctcacaccaaggagggcgttgatgcctacaacgaagtgatcgcccgggtgcgaatgtgggtgaacctgaacctgtggcagaagctgaagctaagcagagatgatgccaagcctctgctgagactgaagggattcccttcctttcctctggtcgagagacaggccaacgaagtggactggtgggacatggtgtgtaacgtgaagaagctgatcaacgagaaaaaggaggatggcaaggtgttttggcagaatctggctggctacaagagacaggaagccctgagaccatacctgagcagcgaggaagatcggaagaagggaaagaaattcgctcggtaccagctgggcgacctgctgctgcacctggaaaagaagcacggcgaggactggggaaaggtgtacgacgaggcctgggagcggattgacaagaaagtggaaggcctgagcaagcacatcaagctggaagaggaacggagaagcgaggacgcccagagcaaggccgccctgaccgactggctgcgggctaaggccagcttcgtgatcgagggcctgaaggaggccgacaaggacgagttctgcagatgcgagctgaagctgcagaagtggtacggggacctgcggggaaagcccttcgccatcgaagccgagaacagcatcctggacatcagcggcttcagcaagcagtacaactgtgccttcatctggcagaaggacggcgtgaagaagctgaacctgtacctgatcatcaactacttcaagggcggcaagctgcggttcaagaagatcaaacctgaagccttcgaagccaacagattctacaccgtgatcaacaaaaagagcggcgagatcgtgcccatggaggtgaacttcaacttcgacgaccccaacctgatcatcctgcctctggcctttggcaagagacagggcagagaattcatctggaacgacctgctgtccctggaaaccggcagcctgaagctggccaacggaagagtgatcgagaagacactgtacaacagaagaacccggcaggatgagcctgccctgttcgtggccctgaccttcgagcggcgggaggtcctggactcctccaatatcaaaccaatgaacctgatcggcgtggcaagaggcgaaaacatccccgccgtgatcgccctgaccgaccccgagggctgcccactgagccggtttaaggatagcctgggaaacccaacccacatcctgagaatcggcgagagctataaggagaagcagcggaccatccaggccaagaaggaggtggagcagcggagagccggcggctacagccggaagtacgccagcaaagccaagaatctggcagacgatatggtgagaaacaccgctagagatctgctgtactacgccgtgacccaggatgccatgctgatcttcgccaacctgagccggggcttcggccggcagggcaagcggaccttcatggccgagagacagtacacacggatggaggactggctgaccgccaagctggcctacgagggcctgagcaagacctacctgtccaagacactggcccagtacacctccaagacatgcagcaactgtgggtttaccatcaccagcgccgactacgacagggtgctggagaagctgaagaagacagcaacaggctggatgaccacaattaacggcaaggagctgaaggtggagggccagattacctactacaacagatacaagagacagaacgtagtcaaggacctgtccgtcgagctggatagactgagcgaagaatctgtgaacaacgacatctcctcctggacaaagggcagaagcggagaagctctgagcctcctgaagaaaagattctcccatagacccgtgcaggagaagttcgtgtgcctgaactgcggcttcgagacacacgcagccgagcaagccgccctgaacatcgccagatcctggctgttcctgcggagccaggagtacaagaaataccagacaaacaagacaaccggcaacaccgataagagagccttcgtcgagacctggcagtccttttaccggaagaagcttaaggaggtgtggaaacctgccgtgcggtctggcggatctggcggaggctccacaagcctgcaggagctgctgagcttcgaggacctgagcgtggacttcacccagaaggagtggcagctgctgaacccctaccagaagaacctgtacaaggacgtgatgctggagaactacagcagcctggtgagcctgggctacgaggtgatcaagcccgacgtgatcttcaagctggagcagggcgaggagccctggatcagggacgccgagatgcccagcagccccagcctggaggtgtggcaggtgaccagccccaagaaaaagagaaaagtctaagctgccttctgcggggcttgccttctggccatgcccttcttctctcccttgcacctgtacctcttggtctttgaataaagcctgagtaggaaggctagcaaaaaaaaaaaaaaaaaaaaaaaaaaaaaaaaaaaaaaaaaaaaaaaaaaaaaaaaaaaaaaaaaaaaaaaaaaaaaaaa

SEQ ID NO: 6327 - RNA, 5797 nt, synthetic construct
  source 1..5797: mol_type = other RNA
aggaaataagagagaaaagaagagtaagaagaaatataagagccaccatggcccctaagaagaagcgtaaagtgagccggatggaacgcctcgtctacgaggtgcggcagaagtgcagaaacatcgaggacatctgcatctcctgcggatctctgaacgtgaccctggagcacccactgttcatcggcggcatgtgccagaactgtaaaaactgttttctggagtgtgcctatcaatacgacgatgacggctaccagagctactgcaccatctgttgcggcggaagagaggtgctgatgtgtggaaataacaactgctgccggtgcttctgcgtggaatgcgtggacctgctggtgggccccggcgccgcccaggccgctattaaggaagatccttggaactgctacatgtgcggccacaagggcacatacggcctgctgagacggagagaggactggcctagcagactgcagatgttcttcgccaataaccacgaccaggagttcgacccccctaaggtgtaccctcccgtccccgccgagaagagaaagcccatccgggtcctgagcctgttcgatggcatcgccaccggtctgctggtgctgaaggacctgggcatccaggtggataggtacattgcctccgaggtgtgcgaggactccatcaccgtgggaatggtgcgtcatcagggcaagatcatgtacgtgggcgacgtgcggagcgtgacacagaagcatatccaggagtggggccctttcgacctggtgatcggcggcagcccttgcaatgacctgagcatcgtgaacccagcccggaagggcctgtacgagggaaccggcagactgttcttcgagttttacagactgctgcacgacgcccggcctaaggaaggcgacgaccggcccttcttttggctgttcgagaatgtggtggccatgggagtcagcgacaagcgggatattagccggttcctggagagcaaccccgtgatgatcgatgccaaggaagtgagcgccgcccaccgggccagatacttctggggcaatctgcctggcatgaacagacccctggccagcaccgtgaacgacaagctggagctgcaggagtgcctggagcacggccggatcgccaagttcagcaaggtgagaaccatcaccacccgaagcaacagcatcaaacaaggcaaggaccagcactttcctgtgttcatgaacgagaaggaggacatcctgtggtgtaccgagatggagagagtgttcgggttcccagtccactacacagatgtcagcaacatgtctagactggccagacagagactgctgggaagaagctggtccgtccctgtgatcagacacctgttcgcccctctgaaggagtacttcgcctgcgtgagcagcggcaacagcaacgccaacagccggggccccagcttctctagcggcctggtgccactgtccctgagagggagccacatgggccccatggagatctacaaaaccgtgagcgcctggaagcggcagcctgtgcgcgtgctgagcctgtttcggaatatcgataaagtcctgaaaagcctgggattcctggagagcggctctggctccggcggtggcaccctgaagtacgtggaggatgtgacaaacgtggtcagacgggatgtggagaagtggggccccttcgatctggtgtacggcagcacccaacccctgggcagctcttgtgaccggtgccctggctggtacatgtttcagttccaccggatcctgcagtacgccctgccgagacaggagtcccagcggccattcttttggattttcatggacaacttgctgctgaccgaggatgaccaggaaactaccactcggttcctgcagaccgaagccgtgaccctgcaggacgtgagaggccgggactaccagaacgccatgcgggtgtggtccaacatccctggactgaaaagcaagcacgcacctctgacccctaaagaagaggagtacctgcaggcccaggtgcggagcagaagcaagctggacgcccctaaggtggatctgctggtgaagaattgcctcctgcccctgagagagtacttcaagtatttcagccagaatagtctgcccctgggcggcccaagcagcggcgcccctcctcccagcggcggcagcccagccggctccccaacctctaccgaggagggcacctctgagtccgccacccccgagagcggccctggcacctccaccgagcccagcgagggcagcgcacccggcagccctgccggcagccccacctccacagaggagggaaccagcaccgagcccagcgaaggcagcgccccaggcaccagcaccgagcctagtgagggcggctctggcggcggcagcgcccaggagattaaacggatcaacaagatcagaagaagacttgtgaaagacagcaacaccaagaaggccggcaagacaggccccatgaaaaccctgctggttagagtgatgacacccgatctgagagagcggctggaaaacctgagaaagaagcctgaaaatatcccccagcccatcagcaatacatctagagccaacctgaataagctgctgaccgattacaccgaaatgaagaaggcgatcctgcatgtgtactgggaagagttccagaaggaccctgtgggcctgatgagccgggtggcccagcctgccagcaagaagatcgatcagaacaagctgaaacctgagatggacgagaagggcaacctgaccaccgccggctttgcctgctctcagtgtggccagcccctgttcgtgtacaagctggagcaggtgtctgagaagggcaaggcttacaccaactacttcggacggtgcaatgtggccgagcacgaaaagctgatcctgctggcccagctgaagcccgagaaggatagcgacgaagccgtgacatatagcctgggaaagtttgggcagagggccctggatttctacagcattcatgtgaccaaggagtccacccaccccgtgaagcccctggcccagatcgccggaaacagatacgcctccggacctgtgggaaaggccctgagcgacgcatgtatgggcacaatcgcctccttcctgtctaagtaccaggacatcatcatcgaacaccagaaggtggtgaagggcaaccagaagagactggagagcctgcgggagctggccggcaaggaaaacctggaataccctagcgtgaccctgccacctcagcctcacaccaaggagggcgttgatgcctacaacgaagtgatcgcccgggtgcgaatgtgggtgaacctgaacctgtggcagaagctgaagctaagcagagatgatgccaagcctctgctgagactgaagggattcccttcctttcctctggtcgagagacaggccaacgaagtggactggtgggacatggtgtgtaacgtgaagaagctgatcaacgagaaaaaggaggatggcaaggtgttttggcagaatctggctggctacaagagacaggaagccctgagaccatacctgagcagcgaggaagatcggaagaagggaaagaaattcgctcggtaccagctgggcgacctgctgctgcacctggaaaagaagcacggcgaggactggggaaaggtgtacgacgaggcctgggagcggattgacaagaaagtggaaggcctgagcaagcacatcaagctggaagaggaacggagaagcgaggacgcccagagcaaggccgccctgaccgactggctgcgggctaaggccagcttcgtgatcgagggcctgaaggaggccgacaaggacgagttctgcagatgcgagctgaagctgcagaagtggtacggggacctgcggggaaagcccttcgccatcgaagccgagaacagcatcctggacatcagcggcttcagcaagcagtacaactgtgccttcatctggcagaaggacggcgtgaagaagctgaacctgtacctgatcatcaactacttcaagggcggcaagctgcggttcaagaagatcaaacctgaagccttcgaagccaacagattctacaccgtgatcaacaaaaagagcggcgagatcgtgcccatggaggtgaacttcaacttcgacgaccccaacctgatcatcctgcctctggcctttggcaagagacagggcagagaattcatctggaacgacctgctgtccctggaaaccggcagcctgaagctggccaacggaagagtgatcgagaagacactgtacaacagaagaacccggcaggatgagcctgccctgttcgtggccctgaccttcgagcggcgggaggtcctggactcctccaatatcaaaccaatgaacctgatcggcgtggcaagaggcgaaaacatccccgccgtgatcgccctgaccgaccccgagggctgcccactgagccggtttaaggatagcctgggaaacccaacccacatcctgagaatcggcgagagctataaggagaagcagcggaccatccaggccaagaaggaggtggagcagcggagagccggcggctacagccggaagtacgccagcaaagccaagaatctggcagacgatatggtgagaaacaccgctagagatctgctgtactacgccgtgacccaggatgccatgctgatcttcgccaacctgagccggggcttcggccggcagggcaagcggaccttcatggccgagagacagtacacacggatggaggactggctgaccgccaagctggcctacgagggcctgagcaagacctacctgtccaagacactggcccagtacacctccaagacatgcagcaactgtgggtttaccatcaccagcgccgactacgacagggtgctggagaagctgaagaagacagcaacaggctggatgaccacaattaacggcaaggagctgaaggtggagggccagattacctactacaacagatacaagagacagaacgtagtcaaggacctgtccgtcgagctggatagactgagcgaagaatctgtgaacaacgacatctcctcctggacaaagggcagaagcggagaagctctgagcctcctgaagaaaagattctcccatagacccgtgcaggagaagttcgtgtgcctgaactgcggcttcgagacacacgcagccgagcaagccgccctgaacatcgccagatcctggctgttcctgcggagccaggagtacaagaaataccagacaaacaagacaaccggcaacaccgataagagagccttcgtcgagacctggcagtccttttaccggaagaagcttaaggaggtgtggaaacctgccgtgcggtctggcggatctggcggaggctccacaagccaggccgccgtgaccttcgaggacgtggccgtgctgctgagcagggaggagtggtgcaggctggcccccgcccagagggacctgtacagggacgtgatgctggagacctacaggaacctgatcagcctgggcaccggcctgaccggccccaagcccggcgtgatcagccagctggagaggggccacgagccctgggtgctggacgtgcagagcaccaagggcagggtggacggcagcgactgcaccagccccaagaaaaagagaaaagtctaagctgccttctgcggggcttgccttctggccatgcccttcttctctcccttgcacctgtacctcttggtctttgaataaagcctgagtaggaaggctagcaaaaaaaaaaaaaaaaaaaaaaaaaaaaaaaaaaaaaaaaaaaaaaaaaaaaaaaaaaaaaaaaaaaaaaaaaaaaaaaa

SEQ ID NO: 6328 - RNA, 5797 nt, synthetic construct
  source 1..5797: mol_type = other RNA
aggaaataagagagaaaagaagagtaagaagaaatataagagccaccatggcccctaagaagaagcgtaaagtgagccggatggaacgcctcgtctacgaggtgcggcagaagtgcagaaacatcgaggacatctgcatctcctgcggatctctgaacgtgaccctggagcacccactgttcatcggcggcatgtgccagaactgtaaaaactgttttctggagtgtgcctatcaatacgacgatgacggctaccagagctactgcaccatctgttgcggcggaagagaggtgctgatgtgtggaaataacaactgctgccggtgcttctgcgtggaatgcgtggacctgctggtgggccccggcgccgcccaggccgctattaaggaagatccttggaactgctacatgtgcggccacaagggcacatacggcctgctgagacggagagaggactggcctagcagactgcagatgttcttcgccaataaccacgaccaggagttcgacccccctaaggtgtaccctcccgtccccgccgagaagagaaagcccatccgggtcctgagcctgttcgatggcatcgccaccggtctgctggtgctgaaggacctgggcatccaggtggataggtacattgcctccgaggtgtgcgaggactccatcaccgtgggaatggtgcgtcatcagggcaagatcatgtacgtgggcgacgtgcggagcgtgacacagaagcatatccaggagtggggccctttcgacctggtgatcggcggcagcccttgcaatgacctgagcatcgtgaacccagcccggaagggcctgtacgagggaaccggcagactgttcttcgagttttacagactgctgcacgacgcccggcctaaggaaggcgacgaccggcccttcttttggctgttcgagaatgtggtggccatgggagtcagcgacaagcgggatattagccggttcctggagagcaaccccgtgatgatcgatgccaaggaagtgagcgccgcccaccgggccagatacttctggggcaatctgcctggcatgaacagacccctggccagcaccgtgaacgacaagctggagctgcaggagtgcctggagcacggccggatcgccaagttcagcaaggtgagaaccatcaccacccgaagcaacagcatcaaacaaggcaaggaccagcactttcctgtgttcatgaacgagaaggaggacatcctgtggtgtaccgagatggagagagtgttcgggttcccagtccactacacagatgtcagcaacatgtctagactggccagacagagactgctgggaagaagctggtccgtccctgtgatcagacacctgttcgcccctctgaaggagtacttcgcctgcgtgagcagcggcaacagcaacgccaacagccggggccccagcttctctagcggcctggtgccactgtccctgagagggagccacatgggccccatggagatctacaaaaccgtgagcgcctggaagcggcagcctgtgcgcgtgctgagcctgtttcggaatatcgataaagtcctgaaaagcctgggattcctggagagcggctctggctccggcggtggcaccctgaagtacgtggaggatgtgacaaacgtggtcagacgggatgtggagaagtggggccccttcgatctggtgtacggcagcacccaacccctgggcagctcttgtgaccggtgccctggctggtacatgtttcagttccaccggatcctgcagtacgccctgccgagacaggagtcccagcggccattcttttggattttcatggacaacttgctgctgaccgaggatgaccaggaaactaccactcggttcctgcagaccgaagccgtgaccctgcaggacgtgagaggccgggactaccagaacgccatgcgggtgtggtccaacatccctggactgaaaagcaagcacgcacctctgacccctaaagaagaggagtacctgcaggcccaggtgcggagcagaagcaagctggacgcccctaaggtggatctgctggtgaagaattgcctcctgcccctgagagagtacttcaagtatttcagccagaatagtctgcccctgggcggcccaagcagcggcgcccctcctcccagcggcggcagcccagccggctccccaacctctaccgaggagggcacctctgagtccgccacccccgagagcggccctggcacctccaccgagcccagcgagggcagcgcacccggcagccctgccggcagccccacctccacagaggagggaaccagcaccgagcccagcgaaggcagcgccccaggcaccagcaccgagcctagtgagggcggctctggcggcggcagcgcccaggagattaaacggatcaacaagatcagaagaagacttgtgaaagacagcaacaccaagaaggccggcaagacaggccccatgaaaaccctgctggttagagtgatgacacccgatctgagagagcggctggaaaacctgagaaagaagcctgaaaatatcccccagcccatcagcaatacatctagagccaacctgaataagctgctgaccgattacaccgaaatgaagaaggcgatcctgcatgtgtactgggaagagttccagaaggaccctgtgggcctgatgagccgggtggcccagcctgccagcaagaagatcgatcagaacaagctgaaacctgagatggacgagaagggcaacctgaccaccgccggctttgcctgctctcagtgtggccagcccctgttcgtgtacaagctggagcaggtgtctgagaagggcaaggcttacaccaactacttcggacggtgcaatgtggccgagcacgaaaagctgatcctgctggcccagctgaagcccgagaaggatagcgacgaagccgtgacatatagcctgggaaagtttgggcagagggccctggatttctacagcattcatgtgaccaaggagtccacccaccccgtgaagcccctggcccagatcgccggaaacagatacgcctccggacctgtgggaaaggccctgagcgacgcatgtatgggcacaatcgcctccttcctgtctaagtaccaggacatcatcatcgaacaccagaaggtggtgaagggcaaccagaagagactggagagcctgcgggagctggccggcaaggaaaacctggaataccctagcgtgaccctgccacctcagcctcacaccaaggagggcgttgatgcctacaacgaagtgatcgcccgggtgcgaatgtgggtgaacctgaacctgtggcagaagctgaagctaagcagagatgatgccaagcctctgctgagactgaagggattcccttcctttcctctggtcgagagacaggccaacgaagtggactggtgggacatggtgtgtaacgtgaagaagctgatcaacgagaaaaaggaggatggcaaggtgttttggcagaatctggctggctacaagagacaggaagccctgagaccatacctgagcagcgaggaagatcggaagaagggaaagaaattcgctcggtaccagctgggcgacctgctgctgcacctggaaaagaagcacggcgaggactggggaaaggtgtacgacgaggcctgggagcggattgacaagaaagtggaaggcctgagcaagcacatcaagctggaagaggaacggagaagcgaggacgcccagagcaaggccgccctgaccgactggctgcgggctaaggccagcttcgtgatcgagggcctgaaggaggccgacaaggacgagttctgcagatgcgagctgaagctgcagaagtggtacggggacctgcggggaaagcccttcgccatcgaagccgagaacagcatcctggacatcagcggcttcagcaagcagtacaactgtgccttcatctggcagaaggacggcgtgaagaagctgaacctgtacctgatcatcaactacttcaagggcggcaagctgcggttcaagaagatcaaacctgaagccttcgaagccaacagattctacaccgtgatcaacaaaaagagcggcgagatcgtgcccatggaggtgaacttcaacttcgacgaccccaacctgatcatcctgcctctggcctttggcaagagacagggcagagaattcatctggaacgacctgctgtccctggaaaccggcagcctgaagctggccaacggaagagtgatcgagaagacactgtacaacagaagaacccggcaggatgagcctgccctgttcgtggccctgaccttcgagcggcgggaggtcctggactcctccaatatcaaaccaatgaacctgatcggcgtggcaagaggcgaaaacatccccgccgtgatcgccctgaccgaccccgagggctgcccactgagccggtttaaggatagcctgggaaacccaacccacatcctgagaatcggcgagagctataaggagaagcagcggaccatccaggccaagaaggaggtggagcagcggagagccggcggctacagccggaagtacgccagcaaagccaagaatctggcagacgatatggtgagaaacaccgctagagatctgctgtactacgccgtgacccaggatgccatgctgatcttcgccaacctgagccggggcttcggccggcagggcaagcggaccttcatggccgagagacagtacacacggatggaggactggctgaccgccaagctggcctacgagggcctgagcaagacctacctgtccaagacactggcccagtacacctccaagacatgcagcaactgtgggtttaccatcaccagcgccgactacgacagggtgctggagaagctgaagaagacagcaacaggctggatgaccacaattaacggcaaggagctgaaggtggagggccagattacctactacaacagatacaagagacagaacgtagtcaaggacctgtccgtcgagctggatagactgagcgaagaatctgtgaacaacgacatctcctcctggacaaagggcagaagcggagaagctctgagcctcctgaagaaaagattctcccatagacccgtgcaggagaagttcgtgtgcctgaactgcggcttcgagacacacgcagccgagcaagccgccctgaacatcgccagatcctggctgttcctgcggagccaggagtacaagaaataccagacaaacaagacaaccggcaacaccgataagagagccttcgtcgagacctggcagtccttttaccggaagaagcttaaggaggtgtggaaacctgccgtgcggtctggcggatctggcggaggctccacaagcagccaggaggccgtgaccttcgaggacgtggccgtgaacttcagcaacgaggagtggcagtgcctgacccacgcccagaggcacctgtacaaggacgtgatgctggagaactacggcaacgtggtgagcctgggcttccccttccccaagccccccctgatcagccacctggagcaggaggccgagctgtgcgtgcaggacggccaggacagggagttcctgagctgcagccaccccgtgagcaccagccccaagaaaaagagaaaagtctaagctgccttctgcggggcttgccttctggccatgcccttcttctctcccttgcacctgtacctcttggtctttgaataaagcctgagtaggaaggctagcaaaaaaaaaaaaaaaaaaaaaaaaaaaaaaaaaaaaaaaaaaaaaaaaaaaaaaaaaaaaaaaaaaaaaaaaaaaaaaaa

SEQ ID NO: 6329 - RNA, 5797 nt, synthetic construct
  source 1..5797: mol_type = other RNA
aggaaataagagagaaaagaagagtaagaagaaatataagagccaccatggcccctaagaagaagcgtaaagtgagccggatggaacgcctcgtctacgaggtgcggcagaagtgcagaaacatcgaggacatctgcatctcctgcggatctctgaacgtgaccctggagcacccactgttcatcggcggcatgtgccagaactgtaaaaactgttttctggagtgtgcctatcaatacgacgatgacggctaccagagctactgcaccatctgttgcggcggaagagaggtgctgatgtgtggaaataacaactgctgccggtgcttctgcgtggaatgcgtggacctgctggtgggccccggcgccgcccaggccgctattaaggaagatccttggaactgctacatgtgcggccacaagggcacatacggcctgctgagacggagagaggactggcctagcagactgcagatgttcttcgccaataaccacgaccaggagttcgacccccctaaggtgtaccctcccgtccccgccgagaagagaaagcccatccgggtcctgagcctgttcgatggcatcgccaccggtctgctggtgctgaaggacctgggcatccaggtggataggtacattgcctccgaggtgtgcgaggactccatcaccgtgggaatggtgcgtcatcagggcaagatcatgtacgtgggcgacgtgcggagcgtgacacagaagcatatccaggagtggggccctttcgacctggtgatcggcggcagcccttgcaatgacctgagcatcgtgaacccagcccggaagggcctgtacgagggaaccggcagactgttcttcgagttttacagactgctgcacgacgcccggcctaaggaaggcgacgaccggcccttcttttggctgttcgagaatgtggtggccatgggagtcagcgacaagcgggatattagccggttcctggagagcaaccccgtgatgatcgatgccaaggaagtgagcgccgcccaccgggccagatacttctggggcaatctgcctggcatgaacagacccctggccagcaccgtgaacgacaagctggagctgcaggagtgcctggagcacggccggatcgccaagttcagcaaggtgagaaccatcaccacccgaagcaacagcatcaaacaaggcaaggaccagcactttcctgtgttcatgaacgagaaggaggacatcctgtggtgtaccgagatggagagagtgttcgggttcccagtccactacacagatgtcagcaacatgtctagactggccagacagagactgctgggaagaagctggtccgtccctgtgatcagacacctgttcgcccctctgaaggagtacttcgcctgcgtgagcagcggcaacagcaacgccaacagccggggccccagcttctctagcggcctggtgccactgtccctgagagggagccacatgggccccatggagatctacaaaaccgtgagcgcctggaagcggcagcctgtgcgcgtgctgagcctgtttcggaatatcgataaagtcctgaaaagcctgggattcctggagagcggctctggctccggcggtggcaccctgaagtacgtggaggatgtgacaaacgtggtcagacgggatgtggagaagtggggccccttcgatctggtgtacggcagcacccaacccctgggcagctcttgtgaccggtgccctggctggtacatgtttcagttccaccggatcctgcagtacgccctgccgagacaggagtcccagcggccattcttttggattttcatggacaacttgctgctgaccgaggatgaccaggaaactaccactcggttcctgcagaccgaagccgtgaccctgcaggacgtgagaggccgggactaccagaacgccatgcgggtgtggtccaacatccctggactgaaaagcaagcacgcacctctgacccctaaagaagaggagtacctgcaggcccaggtgcggagcagaagcaagctggacgcccctaaggtggatctgctggtgaagaattgcctcctgcccctgagagagtacttcaagtatttcagccagaatagtctgcccctgggcggcccaagcagcggcgcccctcctcccagcggcggcagcccagccggctccccaacctctaccgaggagggcacctctgagtccgccacccccgagagcggccctggcacctccaccgagcccagcgagggcagcgcacccggcagccctgccggcagccccacctccacagaggagggaaccagcaccgagcccagcgaaggcagcgccccaggcaccagcaccgagcctagtgagggcggctctggcggcggcagcgcccaggagattaaacggatcaacaagatcagaagaagacttgtgaaagacagcaacaccaagaaggccggcaagacaggccccatgaaaaccctgctggttagagtgatgacacccgatctgagagagcggctggaaaacctgagaaagaagcctgaaaatatcccccagcccatcagcaatacatctagagccaacctgaataagctgctgaccgattacaccgaaatgaagaaggcgatcctgcatgtgtactgggaagagttccagaaggaccctgtgggcctgatgagccgggtggcccagcctgccagcaagaagatcgatcagaacaagctgaaacctgagatggacgagaagggcaacctgaccaccgccggctttgcctgctctcagtgtggccagcccctgttcgtgtacaagctggagcaggtgtctgagaagggcaaggcttacaccaactacttcggacggtgcaatgtggccgagcacgaaaagctgatcctgctggcccagctgaagcccgagaaggatagcgacgaagccgtgacatatagcctgggaaagtttgggcagagggccctggatttctacagcattcatgtgaccaaggagtccacccaccccgtgaagcccctggcccagatcgccggaaacagatacgcctccggacctgtgggaaaggccctgagcgacgcatgtatgggcacaatcgcctccttcctgtctaagtaccaggacatcatcatcgaacaccagaaggtggtgaagggcaaccagaagagactggagagcctgcgggagctggccggcaaggaaaacctggaataccctagcgtgaccctgccacctcagcctcacaccaaggagggcgttgatgcctacaacgaagtgatcgcccgggtgcgaatgtgggtgaacctgaacctgtggcagaagctgaagctaagcagagatgatgccaagcctctgctgagactgaagggattcccttcctttcctctggtcgagagacaggccaacgaagtggactggtgggacatggtgtgtaacgtgaagaagctgatcaacgagaaaaaggaggatggcaaggtgttttggcagaatctggctggctacaagagacaggaagccctgagaccatacctgagcagcgaggaagatcggaagaagggaaagaaattcgctcggtaccagctgggcgacctgctgctgcacctggaaaagaagcacggcgaggactggggaaaggtgtacgacgaggcctgggagcggattgacaagaaagtggaaggcctgagcaagcacatcaagctggaagaggaacggagaagcgaggacgcccagagcaaggccgccctgaccgactggctgcgggctaaggccagcttcgtgatcgagggcctgaaggaggccgacaaggacgagttctgcagatgcgagctgaagctgcagaagtggtacggggacctgcggggaaagcccttcgccatcgaagccgagaacagcatcctggacatcagcggcttcagcaagcagtacaactgtgccttcatctggcagaaggacggcgtgaagaagctgaacctgtacctgatcatcaactacttcaagggcggcaagctgcggttcaagaagatcaaacctgaagccttcgaagccaacagattctacaccgtgatcaacaaaaagagcggcgagatcgtgcccatggaggtgaacttcaacttcgacgaccccaacctgatcatcctgcctctggcctttggcaagagacagggcagagaattcatctggaacgacctgctgtccctggaaaccggcagcctgaagctggccaacggaagagtgatcgagaagacactgtacaacagaagaacccggcaggatgagcctgccctgttcgtggccctgaccttcgagcggcgggaggtcctggactcctccaatatcaaaccaatgaacctgatcggcgtggcaagaggcgaaaacatccccgccgtgatcgccctgaccgaccccgagggctgcccactgagccggtttaaggatagcctgggaaacccaacccacatcctgagaatcggcgagagctataaggagaagcagcggaccatccaggccaagaaggaggtggagcagcggagagccggcggctacagccggaagtacgccagcaaagccaagaatctggcagacgatatggtgagaaacaccgctagagatctgctgtactacgccgtgacccaggatgccatgctgatcttcgccaacctgagccggggcttcggccggcagggcaagcggaccttcatggccgagagacagtacacacggatggaggactggctgaccgccaagctggcctacgagggcctgagcaagacctacctgtccaagacactggcccagtacacctccaagacatgcagcaactgtgggtttaccatcaccagcgccgactacgacagggtgctggagaagctgaagaagacagcaacaggctggatgaccacaattaacggcaaggagctgaaggtggagggccagattacctactacaacagatacaagagacagaacgtagtcaaggacctgtccgtcgagctggatagactgagcgaagaatctgtgaacaacgacatctcctcctggacaaagggcagaagcggagaagctctgagcctcctgaagaaaagattctcccatagacccgtgcaggagaagttcgtgtgcctgaactgcggcttcgagacacacgcagccgagcaagccgccctgaacatcgccagatcctggctgttcctgcggagccaggagtacaagaaataccagacaaacaagacaaccggcaacaccgataagagagccttcgtcgagacctggcagtccttttaccggaagaagcttaaggaggtgtggaaacctgccgtgcggtctggcggatctggcggaggctccacaagcaagcccctggccgtgaggttcgccgacgtggccgtgtacttcagccccgaggagtggggctgcctgctgcccgcccagagggccctgtacagggacgtgatgagggagacctacggccacctgggcgccctgggcttccccggccccaagcccgccctgatcagctggatggagcaggagagcgaggcctggagccccgacgcccaggaccccgaggagggcgagagcctgggcggcgccctgaccagccccaagaaaaagagaaaagtctaagctgccttctgcggggcttgccttctggccatgcccttcttctctcccttgcacctgtacctcttggtctttgaataaagcctgagtaggaaggctagcaaaaaaaaaaaaaaaaaaaaaaaaaaaaaaaaaaaaaaaaaaaaaaaaaaaaaaaaaaaaaaaaaaaaaaaaaaaaaaaa

SEQ ID NO: 6330 - RNA, 5797 nt, synthetic construct
  source 1..5797: mol_type = other RNA
aggaaataagagagaaaagaagagtaagaagaaatataagagccaccatggcccctaagaagaagcgtaaagtgagccggatggaacgcctcgtctacgaggtgcggcagaagtgcagaaacatcgaggacatctgcatctcctgcggatctctgaacgtgaccctggagcacccactgttcatcggcggcatgtgccagaactgtaaaaactgttttctggagtgtgcctatcaatacgacgatgacggctaccagagctactgcaccatctgttgcggcggaagagaggtgctgatgtgtggaaataacaactgctgccggtgcttctgcgtggaatgcgtggacctgctggtgggccccggcgccgcccaggccgctattaaggaagatccttggaactgctacatgtgcggccacaagggcacatacggcctgctgagacggagagaggactggcctagcagactgcagatgttcttcgccaataaccacgaccaggagttcgacccccctaaggtgtaccctcccgtccccgccgagaagagaaagcccatccgggtcctgagcctgttcgatggcatcgccaccggtctgctggtgctgaaggacctgggcatccaggtggataggtacattgcctccgaggtgtgcgaggactccatcaccgtgggaatggtgcgtcatcagggcaagatcatgtacgtgggcgacgtgcggagcgtgacacagaagcatatccaggagtggggccctttcgacctggtgatcggcggcagcccttgcaatgacctgagcatcgtgaacccagcccggaagggcctgtacgagggaaccggcagactgttcttcgagttttacagactgctgcacgacgcccggcctaaggaaggcgacgaccggcccttcttttggctgttcgagaatgtggtggccatgggagtcagcgacaagcgggatattagccggttcctggagagcaaccccgtgatgatcgatgccaaggaagtgagcgccgcccaccgggccagatacttctggggcaatctgcctggcatgaacagacccctggccagcaccgtgaacgacaagctggagctgcaggagtgcctggagcacggccggatcgccaagttcagcaaggtgagaaccatcaccacccgaagcaacagcatcaaacaaggcaaggaccagcactttcctgtgttcatgaacgagaaggaggacatcctgtggtgtaccgagatggagagagtgttcgggttcccagtccactacacagatgtcagcaacatgtctagactggccagacagagactgctgggaagaagctggtccgtccctgtgatcagacacctgttcgcccctctgaaggagtacttcgcctgcgtgagcagcggcaacagcaacgccaacagccggggccccagcttctctagcggcctggtgccactgtccctgagagggagccacatgggccccatggagatctacaaaaccgtgagcgcctggaagcggcagcctgtgcgcgtgctgagcctgtttcggaatatcgataaagtcctgaaaagcctgggattcctggagagcggctctggctccggcggtggcaccctgaagtacgtggaggatgtgacaaacgtggtcagacgggatgtggagaagtggggccccttcgatctggtgtacggcagcacccaacccctgggcagctcttgtgaccggtgccctggctggtacatgtttcagttccaccggatcctgcagtacgccctgccgagacaggagtcccagcggccattcttttggattttcatggacaacttgctgctgaccgaggatgaccaggaaactaccactcggttcctgcagaccgaagccgtgaccctgcaggacgtgagaggccgggactaccagaacgccatgcgggtgtggtccaacatccctggactgaaaagcaagcacgcacctctgacccctaaagaagaggagtacctgcaggcccaggtgcggagcagaagcaagctggacgcccctaaggtggatctgctggtgaagaattgcctcctgcccctgagagagtacttcaagtatttcagccagaatagtctgcccctgggcggcccaagcagcggcgcccctcctcccagcggcggcagcccagccggctccccaacctctaccgaggagggcacctctgagtccgccacccccgagagcggccctggcacctccaccgagcccagcgagggcagcgcacccggcagccctgccggcagccccacctccacagaggagggaaccagcaccgagcccagcgaaggcagcgccccaggcaccagcaccgagcctagtgagggcggctctggcggcggcagcgcccaggagattaaacggatcaacaagatcagaagaagacttgtgaaagacagcaacaccaagaaggccggcaagacaggccccatgaaaaccctgctggttagagtgatgacacccgatctgagagagcggctggaaaacctgagaaagaagcctgaaaatatcccccagcccatcagcaatacatctagagccaacctgaataagctgctgaccgattacaccgaaatgaagaaggcgatcctgcatgtgtactgggaagagttccagaaggaccctgtgggcctgatgagccgggtggcccagcctgccagcaagaagatcgatcagaacaagctgaaacctgagatggacgagaagggcaacctgaccaccgccggctttgcctgctctcagtgtggccagcccctgttcgtgtacaagctggagcaggtgtctgagaagggcaaggcttacaccaactacttcggacggtgcaatgtggccgagcacgaaaagctgatcctgctggcccagctgaagcccgagaaggatagcgacgaagccgtgacatatagcctgggaaagtttgggcagagggccctggatttctacagcattcatgtgaccaaggagtccacccaccccgtgaagcccctggcccagatcgccggaaacagatacgcctccggacctgtgggaaaggccctgagcgacgcatgtatgggcacaatcgcctccttcctgtctaagtaccaggacatcatcatcgaacaccagaaggtggtgaagggcaaccagaagagactggagagcctgcgggagctggccggcaaggaaaacctggaataccctagcgtgaccctgccacctcagcctcacaccaaggagggcgttgatgcctacaacgaagtgatcgcccgggtgcgaatgtgggtgaacctgaacctgtggcagaagctgaagctaagcagagatgatgccaagcctctgctgagactgaagggattcccttcctttcctctggtcgagagacaggccaacgaagtggactggtgggacatggtgtgtaacgtgaagaagctgatcaacgagaaaaaggaggatggcaaggtgttttggcagaatctggctggctacaagagacaggaagccctgagaccatacctgagcagcgaggaagatcggaagaagggaaagaaattcgctcggtaccagctgggcgacctgctgctgcacctggaaaagaagcacggcgaggactggggaaaggtgtacgacgaggcctgggagcggattgacaagaaagtggaaggcctgagcaagcacatcaagctggaagaggaacggagaagcgaggacgcccagagcaaggccgccctgaccgactggctgcgggctaaggccagcttcgtgatcgagggcctgaaggaggccgacaaggacgagttctgcagatgcgagctgaagctgcagaagtggtacggggacctgcggggaaagcccttcgccatcgaagccgagaacagcatcctggacatcagcggcttcagcaagcagtacaactgtgccttcatctggcagaaggacggcgtgaagaagctgaacctgtacctgatcatcaactacttcaagggcggcaagctgcggttcaagaagatcaaacctgaagccttcgaagccaacagattctacaccgtgatcaacaaaaagagcggcgagatcgtgcccatggaggtgaacttcaacttcgacgaccccaacctgatcatcctgcctctggcctttggcaagagacagggcagagaattcatctggaacgacctgctgtccctggaaaccggcagcctgaagctggccaacggaagagtgatcgagaagacactgtacaacagaagaacccggcaggatgagcctgccctgttcgtggccctgaccttcgagcggcgggaggtcctggactcctccaatatcaaaccaatgaacctgatcggcgtggcaagaggcgaaaacatccccgccgtgatcgccctgaccgaccccgagggctgcccactgagccggtttaaggatagcctgggaaacccaacccacatcctgagaatcggcgagagctataaggagaagcagcggaccatccaggccaagaaggaggtggagcagcggagagccggcggctacagccggaagtacgccagcaaagccaagaatctggcagacgatatggtgagaaacaccgctagagatctgctgtactacgccgtgacccaggatgccatgctgatcttcgccaacctgagccggggcttcggccggcagggcaagcggaccttcatggccgagagacagtacacacggatggaggactggctgaccgccaagctggcctacgagggcctgagcaagacctacctgtccaagacactggcccagtacacctccaagacatgcagcaactgtgggtttaccatcaccagcgccgactacgacagggtgctggagaagctgaagaagacagcaacaggctggatgaccacaattaacggcaaggagctgaaggtggagggccagattacctactacaacagatacaagagacagaacgtagtcaaggacctgtccgtcgagctggatagactgagcgaagaatctgtgaacaacgacatctcctcctggacaaagggcagaagcggagaagctctgagcctcctgaagaaaagattctcccatagacccgtgcaggagaagttcgtgtgcctgaactgcggcttcgagacacacgcagccgagcaagccgccctgaacatcgccagatcctggctgttcctgcggagccaggagtacaagaaataccagacaaacaagacaaccggcaacaccgataagagagccttcgtcgagacctggcagtccttttaccggaagaagcttaaggaggtgtggaaacctgccgtgcggtctggcggatctggcggaggctccacaagcctgaagggcctggtgaccttcgaggacgtggccgtggagttcacccaggaggagtgggccctgctggaccccgcccagaggaccctgtacagggacgtgatgctggagaacttcaggaacctggccagcctgggcgaccaggtggacaagcccggcctgatcgcccagctggagcaggaggacaaggtgatgaccgaggagaggggcatcctgcccggcacctgccccgacgtggagaaccccaccagccccaagaaaaagagaaaagtctaagctgccttctgcggggcttgccttctggccatgcccttcttctctcccttgcacctgtacctcttggtctttgaataaagcctgagtaggaaggctagcaaaaaaaaaaaaaaaaaaaaaaaaaaaaaaaaaaaaaaaaaaaaaaaaaaaaaaaaaaaaaaaaaaaaaaaaaaaaaaaa

SEQ ID NO: 6331 - RNA, 5797 nt, synthetic construct
  source 1..5797: mol_type = other RNA
aggaaataagagagaaaagaagagtaagaagaaatataagagccaccatggcccctaagaagaagcgtaaagtgagccggatggaacgcctcgtctacgaggtgcggcagaagtgcagaaacatcgaggacatctgcatctcctgcggatctctgaacgtgaccctggagcacccactgttcatcggcggcatgtgccagaactgtaaaaactgttttctggagtgtgcctatcaatacgacgatgacggctaccagagctactgcaccatctgttgcggcggaagagaggtgctgatgtgtggaaataacaactgctgccggtgcttctgcgtggaatgcgtggacctgctggtgggccccggcgccgcccaggccgctattaaggaagatccttggaactgctacatgtgcggccacaagggcacatacggcctgctgagacggagagaggactggcctagcagactgcagatgttcttcgccaataaccacgaccaggagttcgacccccctaaggtgtaccctcccgtccccgccgagaagagaaagcccatccgggtcctgagcctgttcgatggcatcgccaccggtctgctggtgctgaaggacctgggcatccaggtggataggtacattgcctccgaggtgtgcgaggactccatcaccgtgggaatggtgcgtcatcagggcaagatcatgtacgtgggcgacgtgcggagcgtgacacagaagcatatccaggagtggggccctttcgacctggtgatcggcggcagcccttgcaatgacctgagcatcgtgaacccagcccggaagggcctgtacgagggaaccggcagactgttcttcgagttttacagactgctgcacgacgcccggcctaaggaaggcgacgaccggcccttcttttggctgttcgagaatgtggtggccatgggagtcagcgacaagcgggatattagccggttcctggagagcaaccccgtgatgatcgatgccaaggaagtgagcgccgcccaccgggccagatacttctggggcaatctgcctggcatgaacagacccctggccagcaccgtgaacgacaagctggagctgcaggagtgcctggagcacggccggatcgccaagttcagcaaggtgagaaccatcaccacccgaagcaacagcatcaaacaaggcaaggaccagcactttcctgtgttcatgaacgagaaggaggacatcctgtggtgtaccgagatggagagagtgttcgggttcccagtccactacacagatgtcagcaacatgtctagactggccagacagagactgctgggaagaagctggtccgtccctgtgatcagacacctgttcgcccctctgaaggagtacttcgcctgcgtgagcagcggcaacagcaacgccaacagccggggccccagcttctctagcggcctggtgccactgtccctgagagggagccacatgggccccatggagatctacaaaaccgtgagcgcctggaagcggcagcctgtgcgcgtgctgagcctgtttcggaatatcgataaagtcctgaaaagcctgggattcctggagagcggctctggctccggcggtggcaccctgaagtacgtggaggatgtgacaaacgtggtcagacgggatgtggagaagtggggccccttcgatctggtgtacggcagcacccaacccctgggcagctcttgtgaccggtgccctggctggtacatgtttcagttccaccggatcctgcagtacgccctgccgagacaggagtcccagcggccattcttttggattttcatggacaacttgctgctgaccgaggatgaccaggaaactaccactcggttcctgcagaccgaagccgtgaccctgcaggacgtgagaggccgggactaccagaacgccatgcgggtgtggtccaacatccctggactgaaaagcaagcacgcacctctgacccctaaagaagaggagtacctgcaggcccaggtgcggagcagaagcaagctggacgcccctaaggtggatctgctggtgaagaattgcctcctgcccctgagagagtacttcaagtatttcagccagaatagtctgcccctgggcggcccaagcagcggcgcccctcctcccagcggcggcagcccagccggctccccaacctctaccgaggagggcacctctgagtccgccacccccgagagcggccctggcacctccaccgagcccagcgagggcagcgcacccggcagccctgccggcagccccacctccacagaggagggaaccagcaccgagcccagcgaaggcagcgccccaggcaccagcaccgagcctagtgagggcggctctggcggcggcagcgcccaggagattaaacggatcaacaagatcagaagaagacttgtgaaagacagcaacaccaagaaggccggcaagacaggccccatgaaaaccctgctggttagagtgatgacacccgatctgagagagcggctggaaaacctgagaaagaagcctgaaaatatcccccagcccatcagcaatacatctagagccaacctgaataagctgctgaccgattacaccgaaatgaagaaggcgatcctgcatgtgtactgggaagagttccagaaggaccctgtgggcctgatgagccgggtggcccagcctgccagcaagaagatcgatcagaacaagctgaaacctgagatggacgagaagggcaacctgaccaccgccggctttgcctgctctcagtgtggccagcccctgttcgtgtacaagctggagcaggtgtctgagaagggcaaggcttacaccaactacttcggacggtgcaatgtggccgagcacgaaaagctgatcctgctggcccagctgaagcccgagaaggatagcgacgaagccgtgacatatagcctgggaaagtttgggcagagggccctggatttctacagcattcatgtgaccaaggagtccacccaccccgtgaagcccctggcccagatcgccggaaacagatacgcctccggacctgtgggaaaggccctgagcgacgcatgtatgggcacaatcgcctccttcctgtctaagtaccaggacatcatcatcgaacaccagaaggtggtgaagggcaaccagaagagactggagagcctgcgggagctggccggcaaggaaaacctggaataccctagcgtgaccctgccacctcagcctcacaccaaggagggcgttgatgcctacaacgaagtgatcgcccgggtgcgaatgtgggtgaacctgaacctgtggcagaagctgaagctaagcagagatgatgccaagcctctgctgagactgaagggattcccttcctttcctctggtcgagagacaggccaacgaagtggactggtgggacatggtgtgtaacgtgaagaagctgatcaacgagaaaaaggaggatggcaaggtgttttggcagaatctggctggctacaagagacaggaagccctgagaccatacctgagcagcgaggaagatcggaagaagggaaagaaattcgctcggtaccagctgggcgacctgctgctgcacctggaaaagaagcacggcgaggactggggaaaggtgtacgacgaggcctgggagcggattgacaagaaagtggaaggcctgagcaagcacatcaagctggaagaggaacggagaagcgaggacgcccagagcaaggccgccctgaccgactggctgcgggctaaggccagcttcgtgatcgagggcctgaaggaggccgacaaggacgagttctgcagatgcgagctgaagctgcagaagtggtacggggacctgcggggaaagcccttcgccatcgaagccgagaacagcatcctggacatcagcggcttcagcaagcagtacaactgtgccttcatctggcagaaggacggcgtgaagaagctgaacctgtacctgatcatcaactacttcaagggcggcaagctgcggttcaagaagatcaaacctgaagccttcgaagccaacagattctacaccgtgatcaacaaaaagagcggcgagatcgtgcccatggaggtgaacttcaacttcgacgaccccaacctgatcatcctgcctctggcctttggcaagagacagggcagagaattcatctggaacgacctgctgtccctggaaaccggcagcctgaagctggccaacggaagagtgatcgagaagacactgtacaacagaagaacccggcaggatgagcctgccctgttcgtggccctgaccttcgagcggcgggaggtcctggactcctccaatatcaaaccaatgaacctgatcggcgtggcaagaggcgaaaacatccccgccgtgatcgccctgaccgaccccgagggctgcccactgagccggtttaaggatagcctgggaaacccaacccacatcctgagaatcggcgagagctataaggagaagcagcggaccatccaggccaagaaggaggtggagcagcggagagccggcggctacagccggaagtacgccagcaaagccaagaatctggcagacgatatggtgagaaacaccgctagagatctgctgtactacgccgtgacccaggatgccatgctgatcttcgccaacctgagccggggcttcggccggcagggcaagcggaccttcatggccgagagacagtacacacggatggaggactggctgaccgccaagctggcctacgagggcctgagcaagacctacctgtccaagacactggcccagtacacctccaagacatgcagcaactgtgggtttaccatcaccagcgccgactacgacagggtgctggagaagctgaagaagacagcaacaggctggatgaccacaattaacggcaaggagctgaaggtggagggccagattacctactacaacagatacaagagacagaacgtagtcaaggacctgtccgtcgagctggatagactgagcgaagaatctgtgaacaacgacatctcctcctggacaaagggcagaagcggagaagctctgagcctcctgaagaaaagattctcccatagacccgtgcaggagaagttcgtgtgcctgaactgcggcttcgagacacacgcagccgagcaagccgccctgaacatcgccagatcctggctgttcctgcggagccaggagtacaagaaataccagacaaacaagacaaccggcaacaccgataagagagccttcgtcgagacctggcagtccttttaccggaagaagcttaaggaggtgtggaaacctgccgtgcggtctggcggatctggcggaggctccacaagcatgatcaacgcccaggagctgctgaccctggaggacgtgaccgtggagttcacctgggaggagtggcagctgctggaccccttccagaaggacctgtacagggacgtgatgctggagatctacagcaacctggtgagcatcggctaccaggtgagcaagcccgacgccctgagcaagctggagaggggcgaggagccctggaccgtggaggacgagaggcacagccagatctgccccgagaacaccagccccaagaaaaagagaaaagtctaagctgccttctgcggggcttgccttctggccatgcccttcttctctcccttgcacctgtacctcttggtctttgaataaagcctgagtaggaaggctagcaaaaaaaaaaaaaaaaaaaaaaaaaaaaaaaaaaaaaaaaaaaaaaaaaaaaaaaaaaaaaaaaaaaaaaaaaaaaaaaa

SEQ ID NO: 6332 - RNA, 5797 nt, synthetic construct
  source 1..5797: mol_type = other RNA
aggaaataagagagaaaagaagagtaagaagaaatataagagccaccatggcccctaagaagaagcgtaaagtgagccggatggaacgcctcgtctacgaggtgcggcagaagtgcagaaacatcgaggacatctgcatctcctgcggatctctgaacgtgaccctggagcacccactgttcatcggcggcatgtgccagaactgtaaaaactgttttctggagtgtgcctatcaatacgacgatgacggctaccagagctactgcaccatctgttgcggcggaagagaggtgctgatgtgtggaaataacaactgctgccggtgcttctgcgtggaatgcgtggacctgctggtgggccccggcgccgcccaggccgctattaaggaagatccttggaactgctacatgtgcggccacaagggcacatacggcctgctgagacggagagaggactggcctagcagactgcagatgttcttcgccaataaccacgaccaggagttcgacccccctaaggtgtaccctcccgtccccgccgagaagagaaagcccatccgggtcctgagcctgttcgatggcatcgccaccggtctgctggtgctgaaggacctgggcatccaggtggataggtacattgcctccgaggtgtgcgaggactccatcaccgtgggaatggtgcgtcatcagggcaagatcatgtacgtgggcgacgtgcggagcgtgacacagaagcatatccaggagtggggccctttcgacctggtgatcggcggcagcccttgcaatgacctgagcatcgtgaacccagcccggaagggcctgtacgagggaaccggcagactgttcttcgagttttacagactgctgcacgacgcccggcctaaggaaggcgacgaccggcccttcttttggctgttcgagaatgtggtggccatgggagtcagcgacaagcgggatattagccggttcctggagagcaaccccgtgatgatcgatgccaaggaagtgagcgccgcccaccgggccagatacttctggggcaatctgcctggcatgaacagacccctggccagcaccgtgaacgacaagctggagctgcaggagtgcctggagcacggccggatcgccaagttcagcaaggtgagaaccatcaccacccgaagcaacagcatcaaacaaggcaaggaccagcactttcctgtgttcatgaacgagaaggaggacatcctgtggtgtaccgagatggagagagtgttcgggttcccagtccactacacagatgtcagcaacatgtctagactggccagacagagactgctgggaagaagctggtccgtccctgtgatcagacacctgttcgcccctctgaaggagtacttcgcctgcgtgagcagcggcaacagcaacgccaacagccggggccccagcttctctagcggcctggtgccactgtccctgagagggagccacatgggccccatggagatctacaaaaccgtgagcgcctggaagcggcagcctgtgcgcgtgctgagcctgtttcggaatatcgataaagtcctgaaaagcctgggattcctggagagcggctctggctccggcggtggcaccctgaagtacgtggaggatgtgacaaacgtggtcagacgggatgtggagaagtggggccccttcgatctggtgtacggcagcacccaacccctgggcagctcttgtgaccggtgccctggctggtacatgtttcagttccaccggatcctgcagtacgccctgccgagacaggagtcccagcggccattcttttggattttcatggacaacttgctgctgaccgaggatgaccaggaaactaccactcggttcctgcagaccgaagccgtgaccctgcaggacgtgagaggccgggactaccagaacgccatgcgggtgtggtccaacatccctggactgaaaagcaagcacgcacctctgacccctaaagaagaggagtacctgcaggcccaggtgcggagcagaagcaagctggacgcccctaaggtggatctgctggtgaagaattgcctcctgcccctgagagagtacttcaagtatttcagccagaatagtctgcccctgggcggcccaagcagcggcgcccctcctcccagcggcggcagcccagccggctccccaacctctaccgaggagggcacctctgagtccgccacccccgagagcggccctggcacctccaccgagcccagcgagggcagcgcacccggcagccctgccggcagccccacctccacagaggagggaaccagcaccgagcccagcgaaggcagcgccccaggcaccagcaccgagcctagtgagggcggctctggcggcggcagcgcccaggagattaaacggatcaacaagatcagaagaagacttgtgaaagacagcaacaccaagaaggccggcaagacaggccccatgaaaaccctgctggttagagtgatgacacccgatctgagagagcggctggaaaacctgagaaagaagcctgaaaatatcccccagcccatcagcaatacatctagagccaacctgaataagctgctgaccgattacaccgaaatgaagaaggcgatcctgcatgtgtactgggaagagttccagaaggaccctgtgggcctgatgagccgggtggcccagcctgccagcaagaagatcgatcagaacaagctgaaacctgagatggacgagaagggcaacctgaccaccgccggctttgcctgctctcagtgtggccagcccctgttcgtgtacaagctggagcaggtgtctgagaagggcaaggcttacaccaactacttcggacggtgcaatgtggccgagcacgaaaagctgatcctgctggcccagctgaagcccgagaaggatagcgacgaagccgtgacatatagcctgggaaagtttgggcagagggccctggatttctacagcattcatgtgaccaaggagtccacccaccccgtgaagcccctggcccagatcgccggaaacagatacgcctccggacctgtgggaaaggccctgagcgacgcatgtatgggcacaatcgcctccttcctgtctaagtaccaggacatcatcatcgaacaccagaaggtggtgaagggcaaccagaagagactggagagcctgcgggagctggccggcaaggaaaacctggaataccctagcgtgaccctgccacctcagcctcacaccaaggagggcgttgatgcctacaacgaagtgatcgcccgggtgcgaatgtgggtgaacctgaacctgtggcagaagctgaagctaagcagagatgatgccaagcctctgctgagactgaagggattcccttcctttcctctggtcgagagacaggccaacgaagtggactggtgggacatggtgtgtaacgtgaagaagctgatcaacgagaaaaaggaggatggcaaggtgttttggcagaatctggctggctacaagagacaggaagccctgagaccatacctgagcagcgaggaagatcggaagaagggaaagaaattcgctcggtaccagctgggcgacctgctgctgcacctggaaaagaagcacggcgaggactggggaaaggtgtacgacgaggcctgggagcggattgacaagaaagtggaaggcctgagcaagcacatcaagctggaagaggaacggagaagcgaggacgcccagagcaaggccgccctgaccgactggctgcgggctaaggccagcttcgtgatcgagggcctgaaggaggccgacaaggacgagttctgcagatgcgagctgaagctgcagaagtggtacggggacctgcggggaaagcccttcgccatcgaagccgagaacagcatcctggacatcagcggcttcagcaagcagtacaactgtgccttcatctggcagaaggacggcgtgaagaagctgaacctgtacctgatcatcaactacttcaagggcggcaagctgcggttcaagaagatcaaacctgaagccttcgaagccaacagattctacaccgtgatcaacaaaaagagcggcgagatcgtgcccatggaggtgaacttcaacttcgacgaccccaacctgatcatcctgcctctggcctttggcaagagacagggcagagaattcatctggaacgacctgctgtccctggaaaccggcagcctgaagctggccaacggaagagtgatcgagaagacactgtacaacagaagaacccggcaggatgagcctgccctgttcgtggccctgaccttcgagcggcgggaggtcctggactcctccaatatcaaaccaatgaacctgatcggcgtggcaagaggcgaaaacatccccgccgtgatcgccctgaccgaccccgagggctgcccactgagccggtttaaggatagcctgggaaacccaacccacatcctgagaatcggcgagagctataaggagaagcagcggaccatccaggccaagaaggaggtggagcagcggagagccggcggctacagccggaagtacgccagcaaagccaagaatctggcagacgatatggtgagaaacaccgctagagatctgctgtactacgccgtgacccaggatgccatgctgatcttcgccaacctgagccggggcttcggccggcagggcaagcggaccttcatggccgagagacagtacacacggatggaggactggctgaccgccaagctggcctacgagggcctgagcaagacctacctgtccaagacactggcccagtacacctccaagacatgcagcaactgtgggtttaccatcaccagcgccgactacgacagggtgctggagaagctgaagaagacagcaacaggctggatgaccacaattaacggcaaggagctgaaggtggagggccagattacctactacaacagatacaagagacagaacgtagtcaaggacctgtccgtcgagctggatagactgagcgaagaatctgtgaacaacgacatctcctcctggacaaagggcagaagcggagaagctctgagcctcctgaagaaaagattctcccatagacccgtgcaggagaagttcgtgtgcctgaactgcggcttcgagacacacgcagccgagcaagccgccctgaacatcgccagatcctggctgttcctgcggagccaggagtacaagaaataccagacaaacaagacaaccggcaacaccgataagagagccttcgtcgagacctggcagtccttttaccggaagaagcttaaggaggtgtggaaacctgccgtgcggtctggcggatctggcggaggctccacaagcatggacgtggcccaggagcaggtgaccttccaggacgtggccatctacttcagctgggaggagtgggagtgcctggagcccagccagagggccctgtacagggacgtgatgctggacaacttcagcaacgtggccgccctgggcttctgcagccccaggcccgacctggtgagcaggctggagcagtgggaggagccctgggtggaggacagggacaggcccgagctgcaggccgtgcagaggaccagccccaagaaaaagagaaaagtctaagctgccttctgcggggcttgccttctggccatgcccttcttctctcccttgcacctgtacctcttggtctttgaataaagcctgagtaggaaggctagcaaaaaaaaaaaaaaaaaaaaaaaaaaaaaaaaaaaaaaaaaaaaaaaaaaaaaaaaaaaaaaaaaaaaaaaaaaaaaaaa

SEQ ID NO: 6333 - RNA, 5797 nt, synthetic construct
  source 1..5797: mol_type = other RNA
aggaaataagagagaaaagaagagtaagaagaaatataagagccaccatggcccctaagaagaagcgtaaagtgagccggatggaacgcctcgtctacgaggtgcggcagaagtgcagaaacatcgaggacatctgcatctcctgcggatctctgaacgtgaccctggagcacccactgttcatcggcggcatgtgccagaactgtaaaaactgttttctggagtgtgcctatcaatacgacgatgacggctaccagagctactgcaccatctgttgcggcggaagagaggtgctgatgtgtggaaataacaactgctgccggtgcttctgcgtggaatgcgtggacctgctggtgggccccggcgccgcccaggccgctattaaggaagatccttggaactgctacatgtgcggccacaagggcacatacggcctgctgagacggagagaggactggcctagcagactgcagatgttcttcgccaataaccacgaccaggagttcgacccccctaaggtgtaccctcccgtccccgccgagaagagaaagcccatccgggtcctgagcctgttcgatggcatcgccaccggtctgctggtgctgaaggacctgggcatccaggtggataggtacattgcctccgaggtgtgcgaggactccatcaccgtgggaatggtgcgtcatcagggcaagatcatgtacgtgggcgacgtgcggagcgtgacacagaagcatatccaggagtggggccctttcgacctggtgatcggcggcagcccttgcaatgacctgagcatcgtgaacccagcccggaagggcctgtacgagggaaccggcagactgttcttcgagttttacagactgctgcacgacgcccggcctaaggaaggcgacgaccggcccttcttttggctgttcgagaatgtggtggccatgggagtcagcgacaagcgggatattagccggttcctggagagcaaccccgtgatgatcgatgccaaggaagtgagcgccgcccaccgggccagatacttctggggcaatctgcctggcatgaacagacccctggccagcaccgtgaacgacaagctggagctgcaggagtgcctggagcacggccggatcgccaagttcagcaaggtgagaaccatcaccacccgaagcaacagcatcaaacaaggcaaggaccagcactttcctgtgttcatgaacgagaaggaggacatcctgtggtgtaccgagatggagagagtgttcgggttcccagtccactacacagatgtcagcaacatgtctagactggccagacagagactgctgggaagaagctggtccgtccctgtgatcagacacctgttcgcccctctgaaggagtacttcgcctgcgtgagcagcggcaacagcaacgccaacagccggggccccagcttctctagcggcctggtgccactgtccctgagagggagccacatgggccccatggagatctacaaaaccgtgagcgcctggaagcggcagcctgtgcgcgtgctgagcctgtttcggaatatcgataaagtcctgaaaagcctgggattcctggagagcggctctggctccggcggtggcaccctgaagtacgtggaggatgtgacaaacgtggtcagacgggatgtggagaagtggggccccttcgatctggtgtacggcagcacccaacccctgggcagctcttgtgaccggtgccctggctggtacatgtttcagttccaccggatcctgcagtacgccctgccgagacaggagtcccagcggccattcttttggattttcatggacaacttgctgctgaccgaggatgaccaggaaactaccactcggttcctgcagaccgaagccgtgaccctgcaggacgtgagaggccgggactaccagaacgccatgcgggtgtggtccaacatccctggactgaaaagcaagcacgcacctctgacccctaaagaagaggagtacctgcaggcccaggtgcggagcagaagcaagctggacgcccctaaggtggatctgctggtgaagaattgcctcctgcccctgagagagtacttcaagtatttcagccagaatagtctgcccctgggcggcccaagcagcggcgcccctcctcccagcggcggcagcccagccggctccccaacctctaccgaggagggcacctctgagtccgccacccccgagagcggccctggcacctccaccgagcccagcgagggcagcgcacccggcagccctgccggcagccccacctccacagaggagggaaccagcaccgagcccagcgaaggcagcgccccaggcaccagcaccgagcctagtgagggcggctctggcggcggcagcgcccaggagattaaacggatcaacaagatcagaagaagacttgtgaaagacagcaacaccaagaaggccggcaagacaggccccatgaaaaccctgctggttagagtgatgacacccgatctgagagagcggctggaaaacctgagaaagaagcctgaaaatatcccccagcccatcagcaatacatctagagccaacctgaataagctgctgaccgattacaccgaaatgaagaaggcgatcctgcatgtgtactgggaagagttccagaaggaccctgtgggcctgatgagccgggtggcccagcctgccagcaagaagatcgatcagaacaagctgaaacctgagatggacgagaagggcaacctgaccaccgccggctttgcctgctctcagtgtggccagcccctgttcgtgtacaagctggagcaggtgtctgagaagggcaaggcttacaccaactacttcggacggtgcaatgtggccgagcacgaaaagctgatcctgctggcccagctgaagcccgagaaggatagcgacgaagccgtgacatatagcctgggaaagtttgggcagagggccctggatttctacagcattcatgtgaccaaggagtccacccaccccgtgaagcccctggcccagatcgccggaaacagatacgcctccggacctgtgggaaaggccctgagcgacgcatgtatgggcacaatcgcctccttcctgtctaagtaccaggacatcatcatcgaacaccagaaggtggtgaagggcaaccagaagagactggagagcctgcgggagctggccggcaaggaaaacctggaataccctagcgtgaccctgccacctcagcctcacaccaaggagggcgttgatgcctacaacgaagtgatcgcccgggtgcgaatgtgggtgaacctgaacctgtggcagaagctgaagctaagcagagatgatgccaagcctctgctgagactgaagggattcccttcctttcctctggtcgagagacaggccaacgaagtggactggtgggacatggtgtgtaacgtgaagaagctgatcaacgagaaaaaggaggatggcaaggtgttttggcagaatctggctggctacaagagacaggaagccctgagaccatacctgagcagcgaggaagatcggaagaagggaaagaaattcgctcggtaccagctgggcgacctgctgctgcacctggaaaagaagcacggcgaggactggggaaaggtgtacgacgaggcctgggagcggattgacaagaaagtggaaggcctgagcaagcacatcaagctggaagaggaacggagaagcgaggacgcccagagcaaggccgccctgaccgactggctgcgggctaaggccagcttcgtgatcgagggcctgaaggaggccgacaaggacgagttctgcagatgcgagctgaagctgcagaagtggtacggggacctgcggggaaagcccttcgccatcgaagccgagaacagcatcctggacatcagcggcttcagcaagcagtacaactgtgccttcatctggcagaaggacggcgtgaagaagctgaacctgtacctgatcatcaactacttcaagggcggcaagctgcggttcaagaagatcaaacctgaagccttcgaagccaacagattctacaccgtgatcaacaaaaagagcggcgagatcgtgcccatggaggtgaacttcaacttcgacgaccccaacctgatcatcctgcctctggcctttggcaagagacagggcagagaattcatctggaacgacctgctgtccctggaaaccggcagcctgaagctggccaacggaagagtgatcgagaagacactgtacaacagaagaacccggcaggatgagcctgccctgttcgtggccctgaccttcgagcggcgggaggtcctggactcctccaatatcaaaccaatgaacctgatcggcgtggcaagaggcgaaaacatccccgccgtgatcgccctgaccgaccccgagggctgcccactgagccggtttaaggatagcctgggaaacccaacccacatcctgagaatcggcgagagctataaggagaagcagcggaccatccaggccaagaaggaggtggagcagcggagagccggcggctacagccggaagtacgccagcaaagccaagaatctggcagacgatatggtgagaaacaccgctagagatctgctgtactacgccgtgacccaggatgccatgctgatcttcgccaacctgagccggggcttcggccggcagggcaagcggaccttcatggccgagagacagtacacacggatggaggactggctgaccgccaagctggcctacgagggcctgagcaagacctacctgtccaagacactggcccagtacacctccaagacatgcagcaactgtgggtttaccatcaccagcgccgactacgacagggtgctggagaagctgaagaagacagcaacaggctggatgaccacaattaacggcaaggagctgaaggtggagggccagattacctactacaacagatacaagagacagaacgtagtcaaggacctgtccgtcgagctggatagactgagcgaagaatctgtgaacaacgacatctcctcctggacaaagggcagaagcggagaagctctgagcctcctgaagaaaagattctcccatagacccgtgcaggagaagttcgtgtgcctgaactgcggcttcgagacacacgcagccgagcaagccgccctgaacatcgccagatcctggctgttcctgcggagccaggagtacaagaaataccagacaaacaagacaaccggcaacaccgataagagagccttcgtcgagacctggcagtccttttaccggaagaagcttaaggaggtgtggaaacctgccgtgcggtctggcggatctggcggaggctccacaagcgaggagctgcccgtggtgttcgaggacgtggccgtgtacttcaccagggaggagtggggcatgctggacaagaggcagaaggagctgtacagggacgtgatgaggatgaactacgagctgctggccagcctgggccccgccgccgccaagcccgacctgatcagcaagctggagaggagggccgccccctggatcaaggaccccaacggccccaagtggggcaagggcaggccccccggcaacaccagccccaagaaaaagagaaaagtctaagctgccttctgcggggcttgccttctggccatgcccttcttctctcccttgcacctgtacctcttggtctttgaataaagcctgagtaggaaggctagcaaaaaaaaaaaaaaaaaaaaaaaaaaaaaaaaaaaaaaaaaaaaaaaaaaaaaaaaaaaaaaaaaaaaaaaaaaaaaaaa

SEQ ID NO: 6334 - RNA, 5797 nt, synthetic construct
  source 1..5797: mol_type = other RNA
aggaaataagagagaaaagaagagtaagaagaaatataagagccaccatggcccctaagaagaagcgtaaagtgagccggatggaacgcctcgtctacgaggtgcggcagaagtgcagaaacatcgaggacatctgcatctcctgcggatctctgaacgtgaccctggagcacccactgttcatcggcggcatgtgccagaactgtaaaaactgttttctggagtgtgcctatcaatacgacgatgacggctaccagagctactgcaccatctgttgcggcggaagagaggtgctgatgtgtggaaataacaactgctgccggtgcttctgcgtggaatgcgtggacctgctggtgggccccggcgccgcccaggccgctattaaggaagatccttggaactgctacatgtgcggccacaagggcacatacggcctgctgagacggagagaggactggcctagcagactgcagatgttcttcgccaataaccacgaccaggagttcgacccccctaaggtgtaccctcccgtccccgccgagaagagaaagcccatccgggtcctgagcctgttcgatggcatcgccaccggtctgctggtgctgaaggacctgggcatccaggtggataggtacattgcctccgaggtgtgcgaggactccatcaccgtgggaatggtgcgtcatcagggcaagatcatgtacgtgggcgacgtgcggagcgtgacacagaagcatatccaggagtggggccctttcgacctggtgatcggcggcagcccttgcaatgacctgagcatcgtgaacccagcccggaagggcctgtacgagggaaccggcagactgttcttcgagttttacagactgctgcacgacgcccggcctaaggaaggcgacgaccggcccttcttttggctgttcgagaatgtggtggccatgggagtcagcgacaagcgggatattagccggttcctggagagcaaccccgtgatgatcgatgccaaggaagtgagcgccgcccaccgggccagatacttctggggcaatctgcctggcatgaacagacccctggccagcaccgtgaacgacaagctggagctgcaggagtgcctggagcacggccggatcgccaagttcagcaaggtgagaaccatcaccacccgaagcaacagcatcaaacaaggcaaggaccagcactttcctgtgttcatgaacgagaaggaggacatcctgtggtgtaccgagatggagagagtgttcgggttcccagtccactacacagatgtcagcaacatgtctagactggccagacagagactgctgggaagaagctggtccgtccctgtgatcagacacctgttcgcccctctgaaggagtacttcgcctgcgtgagcagcggcaacagcaacgccaacagccggggccccagcttctctagcggcctggtgccactgtccctgagagggagccacatgggccccatggagatctacaaaaccgtgagcgcctggaagcggcagcctgtgcgcgtgctgagcctgtttcggaatatcgataaagtcctgaaaagcctgggattcctggagagcggctctggctccggcggtggcaccctgaagtacgtggaggatgtgacaaacgtggtcagacgggatgtggagaagtggggccccttcgatctggtgtacggcagcacccaacccctgggcagctcttgtgaccggtgccctggctggtacatgtttcagttccaccggatcctgcagtacgccctgccgagacaggagtcccagcggccattcttttggattttcatggacaacttgctgctgaccgaggatgaccaggaaactaccactcggttcctgcagaccgaagccgtgaccctgcaggacgtgagaggccgggactaccagaacgccatgcgggtgtggtccaacatccctggactgaaaagcaagcacgcacctctgacccctaaagaagaggagtacctgcaggcccaggtgcggagcagaagcaagctggacgcccctaaggtggatctgctggtgaagaattgcctcctgcccctgagagagtacttcaagtatttcagccagaatagtctgcccctgggcggcccaagcagcggcgcccctcctcccagcggcggcagcccagccggctccccaacctctaccgaggagggcacctctgagtccgccacccccgagagcggccctggcacctccaccgagcccagcgagggcagcgcacccggcagccctgccggcagccccacctccacagaggagggaaccagcaccgagcccagcgaaggcagcgccccaggcaccagcaccgagcctagtgagggcggctctggcggcggcagcgcccaggagattaaacggatcaacaagatcagaagaagacttgtgaaagacagcaacaccaagaaggccggcaagacaggccccatgaaaaccctgctggttagagtgatgacacccgatctgagagagcggctggaaaacctgagaaagaagcctgaaaatatcccccagcccatcagcaatacatctagagccaacctgaataagctgctgaccgattacaccgaaatgaagaaggcgatcctgcatgtgtactgggaagagttccagaaggaccctgtgggcctgatgagccgggtggcccagcctgccagcaagaagatcgatcagaacaagctgaaacctgagatggacgagaagggcaacctgaccaccgccggctttgcctgctctcagtgtggccagcccctgttcgtgtacaagctggagcaggtgtctgagaagggcaaggcttacaccaactacttcggacggtgcaatgtggccgagcacgaaaagctgatcctgctggcccagctgaagcccgagaaggatagcgacgaagccgtgacatatagcctgggaaagtttgggcagagggccctggatttctacagcattcatgtgaccaaggagtccacccaccccgtgaagcccctggcccagatcgccggaaacagatacgcctccggacctgtgggaaaggccctgagcgacgcatgtatgggcacaatcgcctccttcctgtctaagtaccaggacatcatcatcgaacaccagaaggtggtgaagggcaaccagaagagactggagagcctgcgggagctggccggcaaggaaaacctggaataccctagcgtgaccctgccacctcagcctcacaccaaggagggcgttgatgcctacaacgaagtgatcgcccgggtgcgaatgtgggtgaacctgaacctgtggcagaagctgaagctaagcagagatgatgccaagcctctgctgagactgaagggattcccttcctttcctctggtcgagagacaggccaacgaagtggactggtgggacatggtgtgtaacgtgaagaagctgatcaacgagaaaaaggaggatggcaaggtgttttggcagaatctggctggctacaagagacaggaagccctgagaccatacctgagcagcgaggaagatcggaagaagggaaagaaattcgctcggtaccagctgggcgacctgctgctgcacctggaaaagaagcacggcgaggactggggaaaggtgtacgacgaggcctgggagcggattgacaagaaagtggaaggcctgagcaagcacatcaagctggaagaggaacggagaagcgaggacgcccagagcaaggccgccctgaccgactggctgcgggctaaggccagcttcgtgatcgagggcctgaaggaggccgacaaggacgagttctgcagatgcgagctgaagctgcagaagtggtacggggacctgcggggaaagcccttcgccatcgaagccgagaacagcatcctggacatcagcggcttcagcaagcagtacaactgtgccttcatctggcagaaggacggcgtgaagaagctgaacctgtacctgatcatcaactacttcaagggcggcaagctgcggttcaagaagatcaaacctgaagccttcgaagccaacagattctacaccgtgatcaacaaaaagagcggcgagatcgtgcccatggaggtgaacttcaacttcgacgaccccaacctgatcatcctgcctctggcctttggcaagagacagggcagagaattcatctggaacgacctgctgtccctggaaaccggcagcctgaagctggccaacggaagagtgatcgagaagacactgtacaacagaagaacccggcaggatgagcctgccctgttcgtggccctgaccttcgagcggcgggaggtcctggactcctccaatatcaaaccaatgaacctgatcggcgtggcaagaggcgaaaacatccccgccgtgatcgccctgaccgaccccgagggctgcccactgagccggtttaaggatagcctgggaaacccaacccacatcctgagaatcggcgagagctataaggagaagcagcggaccatccaggccaagaaggaggtggagcagcggagagccggcggctacagccggaagtacgccagcaaagccaagaatctggcagacgatatggtgagaaacaccgctagagatctgctgtactacgccgtgacccaggatgccatgctgatcttcgccaacctgagccggggcttcggccggcagggcaagcggaccttcatggccgagagacagtacacacggatggaggactggctgaccgccaagctggcctacgagggcctgagcaagacctacctgtccaagacactggcccagtacacctccaagacatgcagcaactgtgggtttaccatcaccagcgccgactacgacagggtgctggagaagctgaagaagacagcaacaggctggatgaccacaattaacggcaaggagctgaaggtggagggccagattacctactacaacagatacaagagacagaacgtagtcaaggacctgtccgtcgagctggatagactgagcgaagaatctgtgaacaacgacatctcctcctggacaaagggcagaagcggagaagctctgagcctcctgaagaaaagattctcccatagacccgtgcaggagaagttcgtgtgcctgaactgcggcttcgagacacacgcagccgagcaagccgccctgaacatcgccagatcctggctgttcctgcggagccaggagtacaagaaataccagacaaacaagacaaccggcaacaccgataagagagccttcgtcgagacctggcagtccttttaccggaagaagcttaaggaggtgtggaaacctgccgtgcggtctggcggatctggcggaggctccacaagcccccaggagagcgtgaccttcaaggacatcgccgtggacttcacccaggaggagtgggccctgctggacaccagccagaggaagctgtacagggacgtgatgctggagaacatcagccacctggtgagcgtgggctaccacctgtgcaagagcgacgtgatcagccagctggagcagggcgtggagctgtggagggagggcaggggcttcccccagggccccaaccccgacaggaagagcggcaccagccccaagaaaaagagaaaagtctaagctgccttctgcggggcttgccttctggccatgcccttcttctctcccttgcacctgtacctcttggtctttgaataaagcctgagtaggaaggctagcaaaaaaaaaaaaaaaaaaaaaaaaaaaaaaaaaaaaaaaaaaaaaaaaaaaaaaaaaaaaaaaaaaaaaaaaaaaaaaaa

SEQ ID NO: 6335 - RNA, 5797 nt, synthetic construct
  source 1..5797: mol_type = other RNA
aggaaataagagagaaaagaagagtaagaagaaatataagagccaccatggcccctaagaagaagcgtaaagtgagccggatggaacgcctcgtctacgaggtgcggcagaagtgcagaaacatcgaggacatctgcatctcctgcggatctctgaacgtgaccctggagcacccactgttcatcggcggcatgtgccagaactgtaaaaactgttttctggagtgtgcctatcaatacgacgatgacggctaccagagctactgcaccatctgttgcggcggaagagaggtgctgatgtgtggaaataacaactgctgccggtgcttctgcgtggaatgcgtggacctgctggtgggccccggcgccgcccaggccgctattaaggaagatccttggaactgctacatgtgcggccacaagggcacatacggcctgctgagacggagagaggactggcctagcagactgcagatgttcttcgccaataaccacgaccaggagttcgacccccctaaggtgtaccctcccgtccccgccgagaagagaaagcccatccgggtcctgagcctgttcgatggcatcgccaccggtctgctggtgctgaaggacctgggcatccaggtggataggtacattgcctccgaggtgtgcgaggactccatcaccgtgggaatggtgcgtcatcagggcaagatcatgtacgtgggcgacgtgcggagcgtgacacagaagcatatccaggagtggggccctttcgacctggtgatcggcggcagcccttgcaatgacctgagcatcgtgaacccagcccggaagggcctgtacgagggaaccggcagactgttcttcgagttttacagactgctgcacgacgcccggcctaaggaaggcgacgaccggcccttcttttggctgttcgagaatgtggtggccatgggagtcagcgacaagcgggatattagccggttcctggagagcaaccccgtgatgatcgatgccaaggaagtgagcgccgcccaccgggccagatacttctggggcaatctgcctggcatgaacagacccctggccagcaccgtgaacgacaagctggagctgcaggagtgcctggagcacggccggatcgccaagttcagcaaggtgagaaccatcaccacccgaagcaacagcatcaaacaaggcaaggaccagcactttcctgtgttcatgaacgagaaggaggacatcctgtggtgtaccgagatggagagagtgttcgggttcccagtccactacacagatgtcagcaacatgtctagactggccagacagagactgctgggaagaagctggtccgtccctgtgatcagacacctgttcgcccctctgaaggagtacttcgcctgcgtgagcagcggcaacagcaacgccaacagccggggccccagcttctctagcggcctggtgccactgtccctgagagggagccacatgggccccatggagatctacaaaaccgtgagcgcctggaagcggcagcctgtgcgcgtgctgagcctgtttcggaatatcgataaagtcctgaaaagcctgggattcctggagagcggctctggctccggcggtggcaccctgaagtacgtggaggatgtgacaaacgtggtcagacgggatgtggagaagtggggccccttcgatctggtgtacggcagcacccaacccctgggcagctcttgtgaccggtgccctggctggtacatgtttcagttccaccggatcctgcagtacgccctgccgagacaggagtcccagcggccattcttttggattttcatggacaacttgctgctgaccgaggatgaccaggaaactaccactcggttcctgcagaccgaagccgtgaccctgcaggacgtgagaggccgggactaccagaacgccatgcgggtgtggtccaacatccctggactgaaaagcaagcacgcacctctgacccctaaagaagaggagtacctgcaggcccaggtgcggagcagaagcaagctggacgcccctaaggtggatctgctggtgaagaattgcctcctgcccctgagagagtacttcaagtatttcagccagaatagtctgcccctgggcggcccaagcagcggcgcccctcctcccagcggcggcagcccagccggctccccaacctctaccgaggagggcacctctgagtccgccacccccgagagcggccctggcacctccaccgagcccagcgagggcagcgcacccggcagccctgccggcagccccacctccacagaggagggaaccagcaccgagcccagcgaaggcagcgccccaggcaccagcaccgagcctagtgagggcggctctggcggcggcagcgcccaggagattaaacggatcaacaagatcagaagaagacttgtgaaagacagcaacaccaagaaggccggcaagacaggccccatgaaaaccctgctggttagagtgatgacacccgatctgagagagcggctggaaaacctgagaaagaagcctgaaaatatcccccagcccatcagcaatacatctagagccaacctgaataagctgctgaccgattacaccgaaatgaagaaggcgatcctgcatgtgtactgggaagagttccagaaggaccctgtgggcctgatgagccgggtggcccagcctgccagcaagaagatcgatcagaacaagctgaaacctgagatggacgagaagggcaacctgaccaccgccggctttgcctgctctcagtgtggccagcccctgttcgtgtacaagctggagcaggtgtctgagaagggcaaggcttacaccaactacttcggacggtgcaatgtggccgagcacgaaaagctgatcctgctggcccagctgaagcccgagaaggatagcgacgaagccgtgacatatagcctgggaaagtttgggcagagggccctggatttctacagcattcatgtgaccaaggagtccacccaccccgtgaagcccctggcccagatcgccggaaacagatacgcctccggacctgtgggaaaggccctgagcgacgcatgtatgggcacaatcgcctccttcctgtctaagtaccaggacatcatcatcgaacaccagaaggtggtgaagggcaaccagaagagactggagagcctgcgggagctggccggcaaggaaaacctggaataccctagcgtgaccctgccacctcagcctcacaccaaggagggcgttgatgcctacaacgaagtgatcgcccgggtgcgaatgtgggtgaacctgaacctgtggcagaagctgaagctaagcagagatgatgccaagcctctgctgagactgaagggattcccttcctttcctctggtcgagagacaggccaacgaagtggactggtgggacatggtgtgtaacgtgaagaagctgatcaacgagaaaaaggaggatggcaaggtgttttggcagaatctggctggctacaagagacaggaagccctgagaccatacctgagcagcgaggaagatcggaagaagggaaagaaattcgctcggtaccagctgggcgacctgctgctgcacctggaaaagaagcacggcgaggactggggaaaggtgtacgacgaggcctgggagcggattgacaagaaagtggaaggcctgagcaagcacatcaagctggaagaggaacggagaagcgaggacgcccagagcaaggccgccctgaccgactggctgcgggctaaggccagcttcgtgatcgagggcctgaaggaggccgacaaggacgagttctgcagatgcgagctgaagctgcagaagtggtacggggacctgcggggaaagcccttcgccatcgaagccgagaacagcatcctggacatcagcggcttcagcaagcagtacaactgtgccttcatctggcagaaggacggcgtgaagaagctgaacctgtacctgatcatcaactacttcaagggcggcaagctgcggttcaagaagatcaaacctgaagccttcgaagccaacagattctacaccgtgatcaacaaaaagagcggcgagatcgtgcccatggaggtgaacttcaacttcgacgaccccaacctgatcatcctgcctctggcctttggcaagagacagggcagagaattcatctggaacgacctgctgtccctggaaaccggcagcctgaagctggccaacggaagagtgatcgagaagacactgtacaacagaagaacccggcaggatgagcctgccctgttcgtggccctgaccttcgagcggcgggaggtcctggactcctccaatatcaaaccaatgaacctgatcggcgtggcaagaggcgaaaacatccccgccgtgatcgccctgaccgaccccgagggctgcccactgagccggtttaaggatagcctgggaaacccaacccacatcctgagaatcggcgagagctataaggagaagcagcggaccatccaggccaagaaggaggtggagcagcggagagccggcggctacagccggaagtacgccagcaaagccaagaatctggcagacgatatggtgagaaacaccgctagagatctgctgtactacgccgtgacccaggatgccatgctgatcttcgccaacctgagccggggcttcggccggcagggcaagcggaccttcatggccgagagacagtacacacggatggaggactggctgaccgccaagctggcctacgagggcctgagcaagacctacctgtccaagacactggcccagtacacctccaagacatgcagcaactgtgggtttaccatcaccagcgccgactacgacagggtgctggagaagctgaagaagacagcaacaggctggatgaccacaattaacggcaaggagctgaaggtggagggccagattacctactacaacagatacaagagacagaacgtagtcaaggacctgtccgtcgagctggatagactgagcgaagaatctgtgaacaacgacatctcctcctggacaaagggcagaagcggagaagctctgagcctcctgaagaaaagattctcccatagacccgtgcaggagaagttcgtgtgcctgaactgcggcttcgagacacacgcagccgagcaagccgccctgaacatcgccagatcctggctgttcctgcggagccaggagtacaagaaataccagacaaacaagacaaccggcaacaccgataagagagccttcgtcgagacctggcagtccttttaccggaagaagcttaaggaggtgtggaaacctgccgtgcggtctggcggatctggcggaggctccacaagcatggccgccctgttcctgagcgcccccccccaggccgaggtgaccttcgaggacgtggccgtgtacctgagcagggaggagtggggcaggctgggccccgcccagaggggcctgtacagggacgtgatgctggagacctacggcaacctggtgagcctgggcgtgggccccgccggccccaagcccggcgtgatcagccagctggagaggggcgacgagccctgggtgctggacgtgcagggcaccagccccaagaaaaagagaaaagtctaagctgccttctgcggggcttgccttctggccatgcccttcttctctcccttgcacctgtacctcttggtctttgaataaagcctgagtaggaaggctagcaaaaaaaaaaaaaaaaaaaaaaaaaaaaaaaaaaaaaaaaaaaaaaaaaaaaaaaaaaaaaaaaaaaaaaaaaaaaaaaa

SEQ ID NO: 6336 - RNA, 5797 nt, synthetic construct
  source 1..5797: mol_type = other RNA
aggaaataagagagaaaagaagagtaagaagaaatataagagccaccatggcccctaagaagaagcgtaaagtgagccggatggaacgcctcgtctacgaggtgcggcagaagtgcagaaacatcgaggacatctgcatctcctgcggatctctgaacgtgaccctggagcacccactgttcatcggcggcatgtgccagaactgtaaaaactgttttctggagtgtgcctatcaatacgacgatgacggctaccagagctactgcaccatctgttgcggcggaagagaggtgctgatgtgtggaaataacaactgctgccggtgcttctgcgtggaatgcgtggacctgctggtgggccccggcgccgcccaggccgctattaaggaagatccttggaactgctacatgtgcggccacaagggcacatacggcctgctgagacggagagaggactggcctagcagactgcagatgttcttcgccaataaccacgaccaggagttcgacccccctaaggtgtaccctcccgtccccgccgagaagagaaagcccatccgggtcctgagcctgttcgatggcatcgccaccggtctgctggtgctgaaggacctgggcatccaggtggataggtacattgcctccgaggtgtgcgaggactccatcaccgtgggaatggtgcgtcatcagggcaagatcatgtacgtgggcgacgtgcggagcgtgacacagaagcatatccaggagtggggccctttcgacctggtgatcggcggcagcccttgcaatgacctgagcatcgtgaacccagcccggaagggcctgtacgagggaaccggcagactgttcttcgagttttacagactgctgcacgacgcccggcctaaggaaggcgacgaccggcccttcttttggctgttcgagaatgtggtggccatgggagtcagcgacaagcgggatattagccggttcctggagagcaaccccgtgatgatcgatgccaaggaagtgagcgccgcccaccgggccagatacttctggggcaatctgcctggcatgaacagacccctggccagcaccgtgaacgacaagctggagctgcaggagtgcctggagcacggccggatcgccaagttcagcaaggtgagaaccatcaccacccgaagcaacagcatcaaacaaggcaaggaccagcactttcctgtgttcatgaacgagaaggaggacatcctgtggtgtaccgagatggagagagtgttcgggttcccagtccactacacagatgtcagcaacatgtctagactggccagacagagactgctgggaagaagctggtccgtccctgtgatcagacacctgttcgcccctctgaaggagtacttcgcctgcgtgagcagcggcaacagcaacgccaacagccggggccccagcttctctagcggcctggtgccactgtccctgagagggagccacatgggccccatggagatctacaaaaccgtgagcgcctggaagcggcagcctgtgcgcgtgctgagcctgtttcggaatatcgataaagtcctgaaaagcctgggattcctggagagcggctctggctccggcggtggcaccctgaagtacgtggaggatgtgacaaacgtggtcagacgggatgtggagaagtggggccccttcgatctggtgtacggcagcacccaacccctgggcagctcttgtgaccggtgccctggctggtacatgtttcagttccaccggatcctgcagtacgccctgccgagacaggagtcccagcggccattcttttggattttcatggacaacttgctgctgaccgaggatgaccaggaaactaccactcggttcctgcagaccgaagccgtgaccctgcaggacgtgagaggccgggactaccagaacgccatgcgggtgtggtccaacatccctggactgaaaagcaagcacgcacctctgacccctaaagaagaggagtacctgcaggcccaggtgcggagcagaagcaagctggacgcccctaaggtggatctgctggtgaagaattgcctcctgcccctgagagagtacttcaagtatttcagccagaatagtctgcccctgggcggcccaagcagcggcgcccctcctcccagcggcggcagcccagccggctccccaacctctaccgaggagggcacctctgagtccgccacccccgagagcggccctggcacctccaccgagcccagcgagggcagcgcacccggcagccctgccggcagccccacctccacagaggagggaaccagcaccgagcccagcgaaggcagcgccccaggcaccagcaccgagcctagtgagggcggctctggcggcggcagcgcccaggagattaaacggatcaacaagatcagaagaagacttgtgaaagacagcaacaccaagaaggccggcaagacaggccccatgaaaaccctgctggttagagtgatgacacccgatctgagagagcggctggaaaacctgagaaagaagcctgaaaatatcccccagcccatcagcaatacatctagagccaacctgaataagctgctgaccgattacaccgaaatgaagaaggcgatcctgcatgtgtactgggaagagttccagaaggaccctgtgggcctgatgagccgggtggcccagcctgccagcaagaagatcgatcagaacaagctgaaacctgagatggacgagaagggcaacctgaccaccgccggctttgcctgctctcagtgtggccagcccctgttcgtgtacaagctggagcaggtgtctgagaagggcaaggcttacaccaactacttcggacggtgcaatgtggccgagcacgaaaagctgatcctgctggcccagctgaagcccgagaaggatagcgacgaagccgtgacatatagcctgggaaagtttgggcagagggccctggatttctacagcattcatgtgaccaaggagtccacccaccccgtgaagcccctggcccagatcgccggaaacagatacgcctccggacctgtgggaaaggccctgagcgacgcatgtatgggcacaatcgcctccttcctgtctaagtaccaggacatcatcatcgaacaccagaaggtggtgaagggcaaccagaagagactggagagcctgcgggagctggccggcaaggaaaacctggaataccctagcgtgaccctgccacctcagcctcacaccaaggagggcgttgatgcctacaacgaagtgatcgcccgggtgcgaatgtgggtgaacctgaacctgtggcagaagctgaagctaagcagagatgatgccaagcctctgctgagactgaagggattcccttcctttcctctggtcgagagacaggccaacgaagtggactggtgggacatggtgtgtaacgtgaagaagctgatcaacgagaaaaaggaggatggcaaggtgttttggcagaatctggctggctacaagagacaggaagccctgagaccatacctgagcagcgaggaagatcggaagaagggaaagaaattcgctcggtaccagctgggcgacctgctgctgcacctggaaaagaagcacggcgaggactggggaaaggtgtacgacgaggcctgggagcggattgacaagaaagtggaaggcctgagcaagcacatcaagctggaagaggaacggagaagcgaggacgcccagagcaaggccgccctgaccgactggctgcgggctaaggccagcttcgtgatcgagggcctgaaggaggccgacaaggacgagttctgcagatgcgagctgaagctgcagaagtggtacggggacctgcggggaaagcccttcgccatcgaagccgagaacagcatcctggacatcagcggcttcagcaagcagtacaactgtgccttcatctggcagaaggacggcgtgaagaagctgaacctgtacctgatcatcaactacttcaagggcggcaagctgcggttcaagaagatcaaacctgaagccttcgaagccaacagattctacaccgtgatcaacaaaaagagcggcgagatcgtgcccatggaggtgaacttcaacttcgacgaccccaacctgatcatcctgcctctggcctttggcaagagacagggcagagaattcatctggaacgacctgctgtccctggaaaccggcagcctgaagctggccaacggaagagtgatcgagaagacactgtacaacagaagaacccggcaggatgagcctgccctgttcgtggccctgaccttcgagcggcgggaggtcctggactcctccaatatcaaaccaatgaacctgatcggcgtggcaagaggcgaaaacatccccgccgtgatcgccctgaccgaccccgagggctgcccactgagccggtttaaggatagcctgggaaacccaacccacatcctgagaatcggcgagagctataaggagaagcagcggaccatccaggccaagaaggaggtggagcagcggagagccggcggctacagccggaagtacgccagcaaagccaagaatctggcagacgatatggtgagaaacaccgctagagatctgctgtactacgccgtgacccaggatgccatgctgatcttcgccaacctgagccggggcttcggccggcagggcaagcggaccttcatggccgagagacagtacacacggatggaggactggctgaccgccaagctggcctacgagggcctgagcaagacctacctgtccaagacactggcccagtacacctccaagacatgcagcaactgtgggtttaccatcaccagcgccgactacgacagggtgctggagaagctgaagaagacagcaacaggctggatgaccacaattaacggcaaggagctgaaggtggagggccagattacctactacaacagatacaagagacagaacgtagtcaaggacctgtccgtcgagctggatagactgagcgaagaatctgtgaacaacgacatctcctcctggacaaagggcagaagcggagaagctctgagcctcctgaagaaaagattctcccatagacccgtgcaggagaagttcgtgtgcctgaactgcggcttcgagacacacgcagccgagcaagccgccctgaacatcgccagatcctggctgttcctgcggagccaggagtacaagaaataccagacaaacaagacaaccggcaacaccgataagagagccttcgtcgagacctggcagtccttttaccggaagaagcttaaggaggtgtggaaacctgccgtgcggtctggcggatctggcggaggctccacaagcaagcccggcatcgtgaggttcgccgacgtggccgtgtacttcagcagggaggagtgggcctgcctgaggcccgcccagagggccctgtacagggacgtgatgagggagacctacggccacctgggcgccctgggcttccccggccccaagcccgccctgatcagctggatggagagggagagcgaggcctggagccccgccgcccaggagcccaaggagggcgagaacctgggcggcgcccccaccagccccaagaaaaagagaaaagtctaagctgccttctgcggggcttgccttctggccatgcccttcttctctcccttgcacctgtacctcttggtctttgaataaagcctgagtaggaaggctagcaaaaaaaaaaaaaaaaaaaaaaaaaaaaaaaaaaaaaaaaaaaaaaaaaaaaaaaaaaaaaaaaaaaaaaaaaaaaaaaa

SEQ ID NO: 6337 - RNA, 5797 nt, synthetic construct
  source 1..5797: mol_type = other RNA
aggaaataagagagaaaagaagagtaagaagaaatataagagccaccatggcccctaagaagaagcgtaaagtgagccggatggaacgcctcgtctacgaggtgcggcagaagtgcagaaacatcgaggacatctgcatctcctgcggatctctgaacgtgaccctggagcacccactgttcatcggcggcatgtgccagaactgtaaaaactgttttctggagtgtgcctatcaatacgacgatgacggctaccagagctactgcaccatctgttgcggcggaagagaggtgctgatgtgtggaaataacaactgctgccggtgcttctgcgtggaatgcgtggacctgctggtgggccccggcgccgcccaggccgctattaaggaagatccttggaactgctacatgtgcggccacaagggcacatacggcctgctgagacggagagaggactggcctagcagactgcagatgttcttcgccaataaccacgaccaggagttcgacccccctaaggtgtaccctcccgtccccgccgagaagagaaagcccatccgggtcctgagcctgttcgatggcatcgccaccggtctgctggtgctgaaggacctgggcatccaggtggataggtacattgcctccgaggtgtgcgaggactccatcaccgtgggaatggtgcgtcatcagggcaagatcatgtacgtgggcgacgtgcggagcgtgacacagaagcatatccaggagtggggccctttcgacctggtgatcggcggcagcccttgcaatgacctgagcatcgtgaacccagcccggaagggcctgtacgagggaaccggcagactgttcttcgagttttacagactgctgcacgacgcccggcctaaggaaggcgacgaccggcccttcttttggctgttcgagaatgtggtggccatgggagtcagcgacaagcgggatattagccggttcctggagagcaaccccgtgatgatcgatgccaaggaagtgagcgccgcccaccgggccagatacttctggggcaatctgcctggcatgaacagacccctggccagcaccgtgaacgacaagctggagctgcaggagtgcctggagcacggccggatcgccaagttcagcaaggtgagaaccatcaccacccgaagcaacagcatcaaacaaggcaaggaccagcactttcctgtgttcatgaacgagaaggaggacatcctgtggtgtaccgagatggagagagtgttcgggttcccagtccactacacagatgtcagcaacatgtctagactggccagacagagactgctgggaagaagctggtccgtccctgtgatcagacacctgttcgcccctctgaaggagtacttcgcctgcgtgagcagcggcaacagcaacgccaacagccggggccccagcttctctagcggcctggtgccactgtccctgagagggagccacatgggccccatggagatctacaaaaccgtgagcgcctggaagcggcagcctgtgcgcgtgctgagcctgtttcggaatatcgataaagtcctgaaaagcctgggattcctggagagcggctctggctccggcggtggcaccctgaagtacgtggaggatgtgacaaacgtggtcagacgggatgtggagaagtggggccccttcgatctggtgtacggcagcacccaacccctgggcagctcttgtgaccggtgccctggctggtacatgtttcagttccaccggatcctgcagtacgccctgccgagacaggagtcccagcggccattcttttggattttcatggacaacttgctgctgaccgaggatgaccaggaaactaccactcggttcctgcagaccgaagccgtgaccctgcaggacgtgagaggccgggactaccagaacgccatgcgggtgtggtccaacatccctggactgaaaagcaagcacgcacctctgacccctaaagaagaggagtacctgcaggcccaggtgcggagcagaagcaagctggacgcccctaaggtggatctgctggtgaagaattgcctcctgcccctgagagagtacttcaagtatttcagccagaatagtctgcccctgggcggcccaagcagcggcgcccctcctcccagcggcggcagcccagccggctccccaacctctaccgaggagggcacctctgagtccgccacccccgagagcggccctggcacctccaccgagcccagcgagggcagcgcacccggcagccctgccggcagccccacctccacagaggagggaaccagcaccgagcccagcgaaggcagcgccccaggcaccagcaccgagcctagtgagggcggctctggcggcggcagcgcccaggagattaaacggatcaacaagatcagaagaagacttgtgaaagacagcaacaccaagaaggccggcaagacaggccccatgaaaaccctgctggttagagtgatgacacccgatctgagagagcggctggaaaacctgagaaagaagcctgaaaatatcccccagcccatcagcaatacatctagagccaacctgaataagctgctgaccgattacaccgaaatgaagaaggcgatcctgcatgtgtactgggaagagttccagaaggaccctgtgggcctgatgagccgggtggcccagcctgccagcaagaagatcgatcagaacaagctgaaacctgagatggacgagaagggcaacctgaccaccgccggctttgcctgctctcagtgtggccagcccctgttcgtgtacaagctggagcaggtgtctgagaagggcaaggcttacaccaactacttcggacggtgcaatgtggccgagcacgaaaagctgatcctgctggcccagctgaagcccgagaaggatagcgacgaagccgtgacatatagcctgggaaagtttgggcagagggccctggatttctacagcattcatgtgaccaaggagtccacccaccccgtgaagcccctggcccagatcgccggaaacagatacgcctccggacctgtgggaaaggccctgagcgacgcatgtatgggcacaatcgcctccttcctgtctaagtaccaggacatcatcatcgaacaccagaaggtggtgaagggcaaccagaagagactggagagcctgcgggagctggccggcaaggaaaacctggaataccctagcgtgaccctgccacctcagcctcacaccaaggagggcgttgatgcctacaacgaagtgatcgcccgggtgcgaatgtgggtgaacctgaacctgtggcagaagctgaagctaagcagagatgatgccaagcctctgctgagactgaagggattcccttcctttcctctggtcgagagacaggccaacgaagtggactggtgggacatggtgtgtaacgtgaagaagctgatcaacgagaaaaaggaggatggcaaggtgttttggcagaatctggctggctacaagagacaggaagccctgagaccatacctgagcagcgaggaagatcggaagaagggaaagaaattcgctcggtaccagctgggcgacctgctgctgcacctggaaaagaagcacggcgaggactggggaaaggtgtacgacgaggcctgggagcggattgacaagaaagtggaaggcctgagcaagcacatcaagctggaagaggaacggagaagcgaggacgcccagagcaaggccgccctgaccgactggctgcgggctaaggccagcttcgtgatcgagggcctgaaggaggccgacaaggacgagttctgcagatgcgagctgaagctgcagaagtggtacggggacctgcggggaaagcccttcgccatcgaagccgagaacagcatcctggacatcagcggcttcagcaagcagtacaactgtgccttcatctggcagaaggacggcgtgaagaagctgaacctgtacctgatcatcaactacttcaagggcggcaagctgcggttcaagaagatcaaacctgaagccttcgaagccaacagattctacaccgtgatcaacaaaaagagcggcgagatcgtgcccatggaggtgaacttcaacttcgacgaccccaacctgatcatcctgcctctggcctttggcaagagacagggcagagaattcatctggaacgacctgctgtccctggaaaccggcagcctgaagctggccaacggaagagtgatcgagaagacactgtacaacagaagaacccggcaggatgagcctgccctgttcgtggccctgaccttcgagcggcgggaggtcctggactcctccaatatcaaaccaatgaacctgatcggcgtggcaagaggcgaaaacatccccgccgtgatcgccctgaccgaccccgagggctgcccactgagccggtttaaggatagcctgggaaacccaacccacatcctgagaatcggcgagagctataaggagaagcagcggaccatccaggccaagaaggaggtggagcagcggagagccggcggctacagccggaagtacgccagcaaagccaagaatctggcagacgatatggtgagaaacaccgctagagatctgctgtactacgccgtgacccaggatgccatgctgatcttcgccaacctgagccggggcttcggccggcagggcaagcggaccttcatggccgagagacagtacacacggatggaggactggctgaccgccaagctggcctacgagggcctgagcaagacctacctgtccaagacactggcccagtacacctccaagacatgcagcaactgtgggtttaccatcaccagcgccgactacgacagggtgctggagaagctgaagaagacagcaacaggctggatgaccacaattaacggcaaggagctgaaggtggagggccagattacctactacaacagatacaagagacagaacgtagtcaaggacctgtccgtcgagctggatagactgagcgaagaatctgtgaacaacgacatctcctcctggacaaagggcagaagcggagaagctctgagcctcctgaagaaaagattctcccatagacccgtgcaggagaagttcgtgtgcctgaactgcggcttcgagacacacgcagccgagcaagccgccctgaacatcgccagatcctggctgttcctgcggagccaggagtacaagaaataccagacaaacaagacaaccggcaacaccgataagagagccttcgtcgagacctggcagtccttttaccggaagaagcttaaggaggtgtggaaacctgccgtgcggtctggcggatctggcggaggctccacaagcatggcccacgccctggtgaccttcagggacgtggccatcgacttcagccagaaggagtgggagtgcctggacaccacccagaggaagctgtacagggacgtgatgctggagaactacaacaacctggtgagcctgggctacagcggcagcaagcccgacgtgatcaccctgctggagcagggcaaggagccctgcatggccgccagggacgtgaccggcaggcagtaccccggcctgctgagcaccagccccaagaaaaagagaaaagtctaagctgccttctgcggggcttgccttctggccatgcccttcttctctcccttgcacctgtacctcttggtctttgaataaagcctgagtaggaaggctagcaaaaaaaaaaaaaaaaaaaaaaaaaaaaaaaaaaaaaaaaaaaaaaaaaaaaaaaaaaaaaaaaaaaaaaaaaaaaaaaa

SEQ ID NO: 6338 - RNA, 5797 nt, synthetic construct
  source 1..5797: mol_type = other RNA
aggaaataagagagaaaagaagagtaagaagaaatataagagccaccatggcccctaagaagaagcgtaaagtgagccggatggaacgcctcgtctacgaggtgcggcagaagtgcagaaacatcgaggacatctgcatctcctgcggatctctgaacgtgaccctggagcacccactgttcatcggcggcatgtgccagaactgtaaaaactgttttctggagtgtgcctatcaatacgacgatgacggctaccagagctactgcaccatctgttgcggcggaagagaggtgctgatgtgtggaaataacaactgctgccggtgcttctgcgtggaatgcgtggacctgctggtgggccccggcgccgcccaggccgctattaaggaagatccttggaactgctacatgtgcggccacaagggcacatacggcctgctgagacggagagaggactggcctagcagactgcagatgttcttcgccaataaccacgaccaggagttcgacccccctaaggtgtaccctcccgtccccgccgagaagagaaagcccatccgggtcctgagcctgttcgatggcatcgccaccggtctgctggtgctgaaggacctgggcatccaggtggataggtacattgcctccgaggtgtgcgaggactccatcaccgtgggaatggtgcgtcatcagggcaagatcatgtacgtgggcgacgtgcggagcgtgacacagaagcatatccaggagtggggccctttcgacctggtgatcggcggcagcccttgcaatgacctgagcatcgtgaacccagcccggaagggcctgtacgagggaaccggcagactgttcttcgagttttacagactgctgcacgacgcccggcctaaggaaggcgacgaccggcccttcttttggctgttcgagaatgtggtggccatgggagtcagcgacaagcgggatattagccggttcctggagagcaaccccgtgatgatcgatgccaaggaagtgagcgccgcccaccgggccagatacttctggggcaatctgcctggcatgaacagacccctggccagcaccgtgaacgacaagctggagctgcaggagtgcctggagcacggccggatcgccaagttcagcaaggtgagaaccatcaccacccgaagcaacagcatcaaacaaggcaaggaccagcactttcctgtgttcatgaacgagaaggaggacatcctgtggtgtaccgagatggagagagtgttcgggttcccagtccactacacagatgtcagcaacatgtctagactggccagacagagactgctgggaagaagctggtccgtccctgtgatcagacacctgttcgcccctctgaaggagtacttcgcctgcgtgagcagcggcaacagcaacgccaacagccggggccccagcttctctagcggcctggtgccactgtccctgagagggagccacatgggccccatggagatctacaaaaccgtgagcgcctggaagcggcagcctgtgcgcgtgctgagcctgtttcggaatatcgataaagtcctgaaaagcctgggattcctggagagcggctctggctccggcggtggcaccctgaagtacgtggaggatgtgacaaacgtggtcagacgggatgtggagaagtggggccccttcgatctggtgtacggcagcacccaacccctgggcagctcttgtgaccggtgccctggctggtacatgtttcagttccaccggatcctgcagtacgccctgccgagacaggagtcccagcggccattcttttggattttcatggacaacttgctgctgaccgaggatgaccaggaaactaccactcggttcctgcagaccgaagccgtgaccctgcaggacgtgagaggccgggactaccagaacgccatgcgggtgtggtccaacatccctggactgaaaagcaagcacgcacctctgacccctaaagaagaggagtacctgcaggcccaggtgcggagcagaagcaagctggacgcccctaaggtggatctgctggtgaagaattgcctcctgcccctgagagagtacttcaagtatttcagccagaatagtctgcccctgggcggcccaagcagcggcgcccctcctcccagcggcggcagcccagccggctccccaacctctaccgaggagggcacctctgagtccgccacccccgagagcggccctggcacctccaccgagcccagcgagggcagcgcacccggcagccctgccggcagccccacctccacagaggagggaaccagcaccgagcccagcgaaggcagcgccccaggcaccagcaccgagcctagtgagggcggctctggcggcggcagcgcccaggagattaaacggatcaacaagatcagaagaagacttgtgaaagacagcaacaccaagaaggccggcaagacaggccccatgaaaaccctgctggttagagtgatgacacccgatctgagagagcggctggaaaacctgagaaagaagcctgaaaatatcccccagcccatcagcaatacatctagagccaacctgaataagctgctgaccgattacaccgaaatgaagaaggcgatcctgcatgtgtactgggaagagttccagaaggaccctgtgggcctgatgagccgggtggcccagcctgccagcaagaagatcgatcagaacaagctgaaacctgagatggacgagaagggcaacctgaccaccgccggctttgcctgctctcagtgtggccagcccctgttcgtgtacaagctggagcaggtgtctgagaagggcaaggcttacaccaactacttcggacggtgcaatgtggccgagcacgaaaagctgatcctgctggcccagctgaagcccgagaaggatagcgacgaagccgtgacatatagcctgggaaagtttgggcagagggccctggatttctacagcattcatgtgaccaaggagtccacccaccccgtgaagcccctggcccagatcgccggaaacagatacgcctccggacctgtgggaaaggccctgagcgacgcatgtatgggcacaatcgcctccttcctgtctaagtaccaggacatcatcatcgaacaccagaaggtggtgaagggcaaccagaagagactggagagcctgcgggagctggccggcaaggaaaacctggaataccctagcgtgaccctgccacctcagcctcacaccaaggagggcgttgatgcctacaacgaagtgatcgcccgggtgcgaatgtgggtgaacctgaacctgtggcagaagctgaagctaagcagagatgatgccaagcctctgctgagactgaagggattcccttcctttcctctggtcgagagacaggccaacgaagtggactggtgggacatggtgtgtaacgtgaagaagctgatcaacgagaaaaaggaggatggcaaggtgttttggcagaatctggctggctacaagagacaggaagccctgagaccatacctgagcagcgaggaagatcggaagaagggaaagaaattcgctcggtaccagctgggcgacctgctgctgcacctggaaaagaagcacggcgaggactggggaaaggtgtacgacgaggcctgggagcggattgacaagaaagtggaaggcctgagcaagcacatcaagctggaagaggaacggagaagcgaggacgcccagagcaaggccgccctgaccgactggctgcgggctaaggccagcttcgtgatcgagggcctgaaggaggccgacaaggacgagttctgcagatgcgagctgaagctgcagaagtggtacggggacctgcggggaaagcccttcgccatcgaagccgagaacagcatcctggacatcagcggcttcagcaagcagtacaactgtgccttcatctggcagaaggacggcgtgaagaagctgaacctgtacctgatcatcaactacttcaagggcggcaagctgcggttcaagaagatcaaacctgaagccttcgaagccaacagattctacaccgtgatcaacaaaaagagcggcgagatcgtgcccatggaggtgaacttcaacttcgacgaccccaacctgatcatcctgcctctggcctttggcaagagacagggcagagaattcatctggaacgacctgctgtccctggaaaccggcagcctgaagctggccaacggaagagtgatcgagaagacactgtacaacagaagaacccggcaggatgagcctgccctgttcgtggccctgaccttcgagcggcgggaggtcctggactcctccaatatcaaaccaatgaacctgatcggcgtggcaagaggcgaaaacatccccgccgtgatcgccctgaccgaccccgagggctgcccactgagccggtttaaggatagcctgggaaacccaacccacatcctgagaatcggcgagagctataaggagaagcagcggaccatccaggccaagaaggaggtggagcagcggagagccggcggctacagccggaagtacgccagcaaagccaagaatctggcagacgatatggtgagaaacaccgctagagatctgctgtactacgccgtgacccaggatgccatgctgatcttcgccaacctgagccggggcttcggccggcagggcaagcggaccttcatggccgagagacagtacacacggatggaggactggctgaccgccaagctggcctacgagggcctgagcaagacctacctgtccaagacactggcccagtacacctccaagacatgcagcaactgtgggtttaccatcaccagcgccgactacgacagggtgctggagaagctgaagaagacagcaacaggctggatgaccacaattaacggcaaggagctgaaggtggagggccagattacctactacaacagatacaagagacagaacgtagtcaaggacctgtccgtcgagctggatagactgagcgaagaatctgtgaacaacgacatctcctcctggacaaagggcagaagcggagaagctctgagcctcctgaagaaaagattctcccatagacccgtgcaggagaagttcgtgtgcctgaactgcggcttcgagacacacgcagccgagcaagccgccctgaacatcgccagatcctggctgttcctgcggagccaggagtacaagaaataccagacaaacaagacaaccggcaacaccgataagagagccttcgtcgagacctggcagtccttttaccggaagaagcttaaggaggtgtggaaacctgccgtgcggtctggcggatctggcggaggctccacaagcatgcccgtgaccttcgaggacgtggccgtgtacttcacccagggccagggcgccctgctggaccccacccagagggccctgtacagggacgtgatgcaggagaactacgagaccgtgaccagcctgggcaagagcgtgaagggcttccccctggccaagcccgacctgatcaccaggctggagaggggcgaggagccctgggtgagcgacctgcaggccaccggcgacgagaggatgagcgagaccagccccaagaaaaagagaaaagtctaagctgccttctgcggggcttgccttctggccatgcccttcttctctcccttgcacctgtacctcttggtctttgaataaagcctgagtaggaaggctagcaaaaaaaaaaaaaaaaaaaaaaaaaaaaaaaaaaaaaaaaaaaaaaaaaaaaaaaaaaaaaaaaaaaaaaaaaaaaaaaa

SEQ ID NO: 6339 - RNA, 5797 nt, synthetic construct
  source 1..5797: mol_type = other RNA
aggaaataagagagaaaagaagagtaagaagaaatataagagccaccatggcccctaagaagaagcgtaaagtgagccggatggaacgcctcgtctacgaggtgcggcagaagtgcagaaacatcgaggacatctgcatctcctgcggatctctgaacgtgaccctggagcacccactgttcatcggcggcatgtgccagaactgtaaaaactgttttctggagtgtgcctatcaatacgacgatgacggctaccagagctactgcaccatctgttgcggcggaagagaggtgctgatgtgtggaaataacaactgctgccggtgcttctgcgtggaatgcgtggacctgctggtgggccccggcgccgcccaggccgctattaaggaagatccttggaactgctacatgtgcggccacaagggcacatacggcctgctgagacggagagaggactggcctagcagactgcagatgttcttcgccaataaccacgaccaggagttcgacccccctaaggtgtaccctcccgtccccgccgagaagagaaagcccatccgggtcctgagcctgttcgatggcatcgccaccggtctgctggtgctgaaggacctgggcatccaggtggataggtacattgcctccgaggtgtgcgaggactccatcaccgtgggaatggtgcgtcatcagggcaagatcatgtacgtgggcgacgtgcggagcgtgacacagaagcatatccaggagtggggccctttcgacctggtgatcggcggcagcccttgcaatgacctgagcatcgtgaacccagcccggaagggcctgtacgagggaaccggcagactgttcttcgagttttacagactgctgcacgacgcccggcctaaggaaggcgacgaccggcccttcttttggctgttcgagaatgtggtggccatgggagtcagcgacaagcgggatattagccggttcctggagagcaaccccgtgatgatcgatgccaaggaagtgagcgccgcccaccgggccagatacttctggggcaatctgcctggcatgaacagacccctggccagcaccgtgaacgacaagctggagctgcaggagtgcctggagcacggccggatcgccaagttcagcaaggtgagaaccatcaccacccgaagcaacagcatcaaacaaggcaaggaccagcactttcctgtgttcatgaacgagaaggaggacatcctgtggtgtaccgagatggagagagtgttcgggttcccagtccactacacagatgtcagcaacatgtctagactggccagacagagactgctgggaagaagctggtccgtccctgtgatcagacacctgttcgcccctctgaaggagtacttcgcctgcgtgagcagcggcaacagcaacgccaacagccggggccccagcttctctagcggcctggtgccactgtccctgagagggagccacatgggccccatggagatctacaaaaccgtgagcgcctggaagcggcagcctgtgcgcgtgctgagcctgtttcggaatatcgataaagtcctgaaaagcctgggattcctggagagcggctctggctccggcggtggcaccctgaagtacgtggaggatgtgacaaacgtggtcagacgggatgtggagaagtggggccccttcgatctggtgtacggcagcacccaacccctgggcagctcttgtgaccggtgccctggctggtacatgtttcagttccaccggatcctgcagtacgccctgccgagacaggagtcccagcggccattcttttggattttcatggacaacttgctgctgaccgaggatgaccaggaaactaccactcggttcctgcagaccgaagccgtgaccctgcaggacgtgagaggccgggactaccagaacgccatgcgggtgtggtccaacatccctggactgaaaagcaagcacgcacctctgacccctaaagaagaggagtacctgcaggcccaggtgcggagcagaagcaagctggacgcccctaaggtggatctgctggtgaagaattgcctcctgcccctgagagagtacttcaagtatttcagccagaatagtctgcccctgggcggcccaagcagcggcgcccctcctcccagcggcggcagcccagccggctccccaacctctaccgaggagggcacctctgagtccgccacccccgagagcggccctggcacctccaccgagcccagcgagggcagcgcacccggcagccctgccggcagccccacctccacagaggagggaaccagcaccgagcccagcgaaggcagcgccccaggcaccagcaccgagcctagtgagggcggctctggcggcggcagcgcccaggagattaaacggatcaacaagatcagaagaagacttgtgaaagacagcaacaccaagaaggccggcaagacaggccccatgaaaaccctgctggttagagtgatgacacccgatctgagagagcggctggaaaacctgagaaagaagcctgaaaatatcccccagcccatcagcaatacatctagagccaacctgaataagctgctgaccgattacaccgaaatgaagaaggcgatcctgcatgtgtactgggaagagttccagaaggaccctgtgggcctgatgagccgggtggcccagcctgccagcaagaagatcgatcagaacaagctgaaacctgagatggacgagaagggcaacctgaccaccgccggctttgcctgctctcagtgtggccagcccctgttcgtgtacaagctggagcaggtgtctgagaagggcaaggcttacaccaactacttcggacggtgcaatgtggccgagcacgaaaagctgatcctgctggcccagctgaagcccgagaaggatagcgacgaagccgtgacatatagcctgggaaagtttgggcagagggccctggatttctacagcattcatgtgaccaaggagtccacccaccccgtgaagcccctggcccagatcgccggaaacagatacgcctccggacctgtgggaaaggccctgagcgacgcatgtatgggcacaatcgcctccttcctgtctaagtaccaggacatcatcatcgaacaccagaaggtggtgaagggcaaccagaagagactggagagcctgcgggagctggccggcaaggaaaacctggaataccctagcgtgaccctgccacctcagcctcacaccaaggagggcgttgatgcctacaacgaagtgatcgcccgggtgcgaatgtgggtgaacctgaacctgtggcagaagctgaagctaagcagagatgatgccaagcctctgctgagactgaagggattcccttcctttcctctggtcgagagacaggccaacgaagtggactggtgggacatggtgtgtaacgtgaagaagctgatcaacgagaaaaaggaggatggcaaggtgttttggcagaatctggctggctacaagagacaggaagccctgagaccatacctgagcagcgaggaagatcggaagaagggaaagaaattcgctcggtaccagctgggcgacctgctgctgcacctggaaaagaagcacggcgaggactggggaaaggtgtacgacgaggcctgggagcggattgacaagaaagtggaaggcctgagcaagcacatcaagctggaagaggaacggagaagcgaggacgcccagagcaaggccgccctgaccgactggctgcgggctaaggccagcttcgtgatcgagggcctgaaggaggccgacaaggacgagttctgcagatgcgagctgaagctgcagaagtggtacggggacctgcggggaaagcccttcgccatcgaagccgagaacagcatcctggacatcagcggcttcagcaagcagtacaactgtgccttcatctggcagaaggacggcgtgaagaagctgaacctgtacctgatcatcaactacttcaagggcggcaagctgcggttcaagaagatcaaacctgaagccttcgaagccaacagattctacaccgtgatcaacaaaaagagcggcgagatcgtgcccatggaggtgaacttcaacttcgacgaccccaacctgatcatcctgcctctggcctttggcaagagacagggcagagaattcatctggaacgacctgctgtccctggaaaccggcagcctgaagctggccaacggaagagtgatcgagaagacactgtacaacagaagaacccggcaggatgagcctgccctgttcgtggccctgaccttcgagcggcgggaggtcctggactcctccaatatcaaaccaatgaacctgatcggcgtggcaagaggcgaaaacatccccgccgtgatcgccctgaccgaccccgagggctgcccactgagccggtttaaggatagcctgggaaacccaacccacatcctgagaatcggcgagagctataaggagaagcagcggaccatccaggccaagaaggaggtggagcagcggagagccggcggctacagccggaagtacgccagcaaagccaagaatctggcagacgatatggtgagaaacaccgctagagatctgctgtactacgccgtgacccaggatgccatgctgatcttcgccaacctgagccggggcttcggccggcagggcaagcggaccttcatggccgagagacagtacacacggatggaggactggctgaccgccaagctggcctacgagggcctgagcaagacctacctgtccaagacactggcccagtacacctccaagacatgcagcaactgtgggtttaccatcaccagcgccgactacgacagggtgctggagaagctgaagaagacagcaacaggctggatgaccacaattaacggcaaggagctgaaggtggagggccagattacctactacaacagatacaagagacagaacgtagtcaaggacctgtccgtcgagctggatagactgagcgaagaatctgtgaacaacgacatctcctcctggacaaagggcagaagcggagaagctctgagcctcctgaagaaaagattctcccatagacccgtgcaggagaagttcgtgtgcctgaactgcggcttcgagacacacgcagccgagcaagccgccctgaacatcgccagatcctggctgttcctgcggagccaggagtacaagaaataccagacaaacaagacaaccggcaacaccgataagagagccttcgtcgagacctggcagtccttttaccggaagaagcttaaggaggtgtggaaacctgccgtgcggtctggcggatctggcggaggctccacaagcggcaagatgagcgtgaccttcgaggacgtggccctgtacttcagccccgaggagtgggccaagctgagcggctgccagaggcagctgtacagggaggtgatgctggagaactaccagatggtggccagcctgggctgggccaacatcaagcccgagatcatctgcaagatggagagggaggagaccctgtgcgtgcccgccccccccagggagtggcagagggaccagagccccgtgcccgccaccagccccaagaaaaagagaaaagtctaagctgccttctgcggggcttgccttctggccatgcccttcttctctcccttgcacctgtacctcttggtctttgaataaagcctgagtaggaaggctagcaaaaaaaaaaaaaaaaaaaaaaaaaaaaaaaaaaaaaaaaaaaaaaaaaaaaaaaaaaaaaaaaaaaaaaaaaaaaaaaa

SEQ ID NO: 6340 - RNA, 5797 nt, synthetic construct
  source 1..5797: mol_type = other RNA
aggaaataagagagaaaagaagagtaagaagaaatataagagccaccatggcccctaagaagaagcgtaaagtgagccggatggaacgcctcgtctacgaggtgcggcagaagtgcagaaacatcgaggacatctgcatctcctgcggatctctgaacgtgaccctggagcacccactgttcatcggcggcatgtgccagaactgtaaaaactgttttctggagtgtgcctatcaatacgacgatgacggctaccagagctactgcaccatctgttgcggcggaagagaggtgctgatgtgtggaaataacaactgctgccggtgcttctgcgtggaatgcgtggacctgctggtgggccccggcgccgcccaggccgctattaaggaagatccttggaactgctacatgtgcggccacaagggcacatacggcctgctgagacggagagaggactggcctagcagactgcagatgttcttcgccaataaccacgaccaggagttcgacccccctaaggtgtaccctcccgtccccgccgagaagagaaagcccatccgggtcctgagcctgttcgatggcatcgccaccggtctgctggtgctgaaggacctgggcatccaggtggataggtacattgcctccgaggtgtgcgaggactccatcaccgtgggaatggtgcgtcatcagggcaagatcatgtacgtgggcgacgtgcggagcgtgacacagaagcatatccaggagtggggccctttcgacctggtgatcggcggcagcccttgcaatgacctgagcatcgtgaacccagcccggaagggcctgtacgagggaaccggcagactgttcttcgagttttacagactgctgcacgacgcccggcctaaggaaggcgacgaccggcccttcttttggctgttcgagaatgtggtggccatgggagtcagcgacaagcgggatattagccggttcctggagagcaaccccgtgatgatcgatgccaaggaagtgagcgccgcccaccgggccagatacttctggggcaatctgcctggcatgaacagacccctggccagcaccgtgaacgacaagctggagctgcaggagtgcctggagcacggccggatcgccaagttcagcaaggtgagaaccatcaccacccgaagcaacagcatcaaacaaggcaaggaccagcactttcctgtgttcatgaacgagaaggaggacatcctgtggtgtaccgagatggagagagtgttcgggttcccagtccactacacagatgtcagcaacatgtctagactggccagacagagactgctgggaagaagctggtccgtccctgtgatcagacacctgttcgcccctctgaaggagtacttcgcctgcgtgagcagcggcaacagcaacgccaacagccggggccccagcttctctagcggcctggtgccactgtccctgagagggagccacatgggccccatggagatctacaaaaccgtgagcgcctggaagcggcagcctgtgcgcgtgctgagcctgtttcggaatatcgataaagtcctgaaaagcctgggattcctggagagcggctctggctccggcggtggcaccctgaagtacgtggaggatgtgacaaacgtggtcagacgggatgtggagaagtggggccccttcgatctggtgtacggcagcacccaacccctgggcagctcttgtgaccggtgccctggctggtacatgtttcagttccaccggatcctgcagtacgccctgccgagacaggagtcccagcggccattcttttggattttcatggacaacttgctgctgaccgaggatgaccaggaaactaccactcggttcctgcagaccgaagccgtgaccctgcaggacgtgagaggccgggactaccagaacgccatgcgggtgtggtccaacatccctggactgaaaagcaagcacgcacctctgacccctaaagaagaggagtacctgcaggcccaggtgcggagcagaagcaagctggacgcccctaaggtggatctgctggtgaagaattgcctcctgcccctgagagagtacttcaagtatttcagccagaatagtctgcccctgggcggcccaagcagcggcgcccctcctcccagcggcggcagcccagccggctccccaacctctaccgaggagggcacctctgagtccgccacccccgagagcggccctggcacctccaccgagcccagcgagggcagcgcacccggcagccctgccggcagccccacctccacagaggagggaaccagcaccgagcccagcgaaggcagcgccccaggcaccagcaccgagcctagtgagggcggctctggcggcggcagcgcccaggagattaaacggatcaacaagatcagaagaagacttgtgaaagacagcaacaccaagaaggccggcaagacaggccccatgaaaaccctgctggttagagtgatgacacccgatctgagagagcggctggaaaacctgagaaagaagcctgaaaatatcccccagcccatcagcaatacatctagagccaacctgaataagctgctgaccgattacaccgaaatgaagaaggcgatcctgcatgtgtactgggaagagttccagaaggaccctgtgggcctgatgagccgggtggcccagcctgccagcaagaagatcgatcagaacaagctgaaacctgagatggacgagaagggcaacctgaccaccgccggctttgcctgctctcagtgtggccagcccctgttcgtgtacaagctggagcaggtgtctgagaagggcaaggcttacaccaactacttcggacggtgcaatgtggccgagcacgaaaagctgatcctgctggcccagctgaagcccgagaaggatagcgacgaagccgtgacatatagcctgggaaagtttgggcagagggccctggatttctacagcattcatgtgaccaaggagtccacccaccccgtgaagcccctggcccagatcgccggaaacagatacgcctccggacctgtgggaaaggccctgagcgacgcatgtatgggcacaatcgcctccttcctgtctaagtaccaggacatcatcatcgaacaccagaaggtggtgaagggcaaccagaagagactggagagcctgcgggagctggccggcaaggaaaacctggaataccctagcgtgaccctgccacctcagcctcacaccaaggagggcgttgatgcctacaacgaagtgatcgcccgggtgcgaatgtgggtgaacctgaacctgtggcagaagctgaagctaagcagagatgatgccaagcctctgctgagactgaagggattcccttcctttcctctggtcgagagacaggccaacgaagtggactggtgggacatggtgtgtaacgtgaagaagctgatcaacgagaaaaaggaggatggcaaggtgttttggcagaatctggctggctacaagagacaggaagccctgagaccatacctgagcagcgaggaagatcggaagaagggaaagaaattcgctcggtaccagctgggcgacctgctgctgcacctggaaaagaagcacggcgaggactggggaaaggtgtacgacgaggcctgggagcggattgacaagaaagtggaaggcctgagcaagcacatcaagctggaagaggaacggagaagcgaggacgcccagagcaaggccgccctgaccgactggctgcgggctaaggccagcttcgtgatcgagggcctgaaggaggccgacaaggacgagttctgcagatgcgagctgaagctgcagaagtggtacggggacctgcggggaaagcccttcgccatcgaagccgagaacagcatcctggacatcagcggcttcagcaagcagtacaactgtgccttcatctggcagaaggacggcgtgaagaagctgaacctgtacctgatcatcaactacttcaagggcggcaagctgcggttcaagaagatcaaacctgaagccttcgaagccaacagattctacaccgtgatcaacaaaaagagcggcgagatcgtgcccatggaggtgaacttcaacttcgacgaccccaacctgatcatcctgcctctggcctttggcaagagacagggcagagaattcatctggaacgacctgctgtccctggaaaccggcagcctgaagctggccaacggaagagtgatcgagaagacactgtacaacagaagaacccggcaggatgagcctgccctgttcgtggccctgaccttcgagcggcgggaggtcctggactcctccaatatcaaaccaatgaacctgatcggcgtggcaagaggcgaaaacatccccgccgtgatcgccctgaccgaccccgagggctgcccactgagccggtttaaggatagcctgggaaacccaacccacatcctgagaatcggcgagagctataaggagaagcagcggaccatccaggccaagaaggaggtggagcagcggagagccggcggctacagccggaagtacgccagcaaagccaagaatctggcagacgatatggtgagaaacaccgctagagatctgctgtactacgccgtgacccaggatgccatgctgatcttcgccaacctgagccggggcttcggccggcagggcaagcggaccttcatggccgagagacagtacacacggatggaggactggctgaccgccaagctggcctacgagggcctgagcaagacctacctgtccaagacactggcccagtacacctccaagacatgcagcaactgtgggtttaccatcaccagcgccgactacgacagggtgctggagaagctgaagaagacagcaacaggctggatgaccacaattaacggcaaggagctgaaggtggagggccagattacctactacaacagatacaagagacagaacgtagtcaaggacctgtccgtcgagctggatagactgagcgaagaatctgtgaacaacgacatctcctcctggacaaagggcagaagcggagaagctctgagcctcctgaagaaaagattctcccatagacccgtgcaggagaagttcgtgtgcctgaactgcggcttcgagacacacgcagccgagcaagccgccctgaacatcgccagatcctggctgttcctgcggagccaggagtacaagaaataccagacaaacaagacaaccggcaacaccgataagagagccttcgtcgagacctggcagtccttttaccggaagaagcttaaggaggtgtggaaacctgccgtgcggtctggcggatctggcggaggctccacaagcatgaacaacagccagggcagggtgaccttcgaggacgtgaccgtgaacttcacccagggcgagtggcagaggctgaaccccgagcagaggaacctgtacagggacgtgatgctggagaactacagcaacctggtgagcgtgggccagagggagaccaccaagcccgacgtgatcctgaggctggagcagggcaaggagccctggagcgaggaggaggaggtgctgggcagcggcagggccgagaccagccccaagaaaaagagaaaagtctaagctgccttctgcggggcttgccttctggccatgcccttcttctctcccttgcacctgtacctcttggtctttgaataaagcctgagtaggaaggctagcaaaaaaaaaaaaaaaaaaaaaaaaaaaaaaaaaaaaaaaaaaaaaaaaaaaaaaaaaaaaaaaaaaaaaaaaaaaaaaaa

SEQ ID NO: 6341 - RNA, 5797 nt, synthetic construct
  source 1..5797: mol_type = other RNA
aggaaataagagagaaaagaagagtaagaagaaatataagagccaccatggcccctaagaagaagcgtaaagtgagccggatggaacgcctcgtctacgaggtgcggcagaagtgcagaaacatcgaggacatctgcatctcctgcggatctctgaacgtgaccctggagcacccactgttcatcggcggcatgtgccagaactgtaaaaactgttttctggagtgtgcctatcaatacgacgatgacggctaccagagctactgcaccatctgttgcggcggaagagaggtgctgatgtgtggaaataacaactgctgccggtgcttctgcgtggaatgcgtggacctgctggtgggccccggcgccgcccaggccgctattaaggaagatccttggaactgctacatgtgcggccacaagggcacatacggcctgctgagacggagagaggactggcctagcagactgcagatgttcttcgccaataaccacgaccaggagttcgacccccctaaggtgtaccctcccgtccccgccgagaagagaaagcccatccgggtcctgagcctgttcgatggcatcgccaccggtctgctggtgctgaaggacctgggcatccaggtggataggtacattgcctccgaggtgtgcgaggactccatcaccgtgggaatggtgcgtcatcagggcaagatcatgtacgtgggcgacgtgcggagcgtgacacagaagcatatccaggagtggggccctttcgacctggtgatcggcggcagcccttgcaatgacctgagcatcgtgaacccagcccggaagggcctgtacgagggaaccggcagactgttcttcgagttttacagactgctgcacgacgcccggcctaaggaaggcgacgaccggcccttcttttggctgttcgagaatgtggtggccatgggagtcagcgacaagcgggatattagccggttcctggagagcaaccccgtgatgatcgatgccaaggaagtgagcgccgcccaccgggccagatacttctggggcaatctgcctggcatgaacagacccctggccagcaccgtgaacgacaagctggagctgcaggagtgcctggagcacggccggatcgccaagttcagcaaggtgagaaccatcaccacccgaagcaacagcatcaaacaaggcaaggaccagcactttcctgtgttcatgaacgagaaggaggacatcctgtggtgtaccgagatggagagagtgttcgggttcccagtccactacacagatgtcagcaacatgtctagactggccagacagagactgctgggaagaagctggtccgtccctgtgatcagacacctgttcgcccctctgaaggagtacttcgcctgcgtgagcagcggcaacagcaacgccaacagccggggccccagcttctctagcggcctggtgccactgtccctgagagggagccacatgggccccatggagatctacaaaaccgtgagcgcctggaagcggcagcctgtgcgcgtgctgagcctgtttcggaatatcgataaagtcctgaaaagcctgggattcctggagagcggctctggctccggcggtggcaccctgaagtacgtggaggatgtgacaaacgtggtcagacgggatgtggagaagtggggccccttcgatctggtgtacggcagcacccaacccctgggcagctcttgtgaccggtgccctggctggtacatgtttcagttccaccggatcctgcagtacgccctgccgagacaggagtcccagcggccattcttttggattttcatggacaacttgctgctgaccgaggatgaccaggaaactaccactcggttcctgcagaccgaagccgtgaccctgcaggacgtgagaggccgggactaccagaacgccatgcgggtgtggtccaacatccctggactgaaaagcaagcacgcacctctgacccctaaagaagaggagtacctgcaggcccaggtgcggagcagaagcaagctggacgcccctaaggtggatctgctggtgaagaattgcctcctgcccctgagagagtacttcaagtatttcagccagaatagtctgcccctgggcggcccaagcagcggcgcccctcctcccagcggcggcagcccagccggctccccaacctctaccgaggagggcacctctgagtccgccacccccgagagcggccctggcacctccaccgagcccagcgagggcagcgcacccggcagccctgccggcagccccacctccacagaggagggaaccagcaccgagcccagcgaaggcagcgccccaggcaccagcaccgagcctagtgagggcggctctggcggcggcagcgcccaggagattaaacggatcaacaagatcagaagaagacttgtgaaagacagcaacaccaagaaggccggcaagacaggccccatgaaaaccctgctggttagagtgatgacacccgatctgagagagcggctggaaaacctgagaaagaagcctgaaaatatcccccagcccatcagcaatacatctagagccaacctgaataagctgctgaccgattacaccgaaatgaagaaggcgatcctgcatgtgtactgggaagagttccagaaggaccctgtgggcctgatgagccgggtggcccagcctgccagcaagaagatcgatcagaacaagctgaaacctgagatggacgagaagggcaacctgaccaccgccggctttgcctgctctcagtgtggccagcccctgttcgtgtacaagctggagcaggtgtctgagaagggcaaggcttacaccaactacttcggacggtgcaatgtggccgagcacgaaaagctgatcctgctggcccagctgaagcccgagaaggatagcgacgaagccgtgacatatagcctgggaaagtttgggcagagggccctggatttctacagcattcatgtgaccaaggagtccacccaccccgtgaagcccctggcccagatcgccggaaacagatacgcctccggacctgtgggaaaggccctgagcgacgcatgtatgggcacaatcgcctccttcctgtctaagtaccaggacatcatcatcgaacaccagaaggtggtgaagggcaaccagaagagactggagagcctgcgggagctggccggcaaggaaaacctggaataccctagcgtgaccctgccacctcagcctcacaccaaggagggcgttgatgcctacaacgaagtgatcgcccgggtgcgaatgtgggtgaacctgaacctgtggcagaagctgaagctaagcagagatgatgccaagcctctgctgagactgaagggattcccttcctttcctctggtcgagagacaggccaacgaagtggactggtgggacatggtgtgtaacgtgaagaagctgatcaacgagaaaaaggaggatggcaaggtgttttggcagaatctggctggctacaagagacaggaagccctgagaccatacctgagcagcgaggaagatcggaagaagggaaagaaattcgctcggtaccagctgggcgacctgctgctgcacctggaaaagaagcacggcgaggactggggaaaggtgtacgacgaggcctgggagcggattgacaagaaagtggaaggcctgagcaagcacatcaagctggaagaggaacggagaagcgaggacgcccagagcaaggccgccctgaccgactggctgcgggctaaggccagcttcgtgatcgagggcctgaaggaggccgacaaggacgagttctgcagatgcgagctgaagctgcagaagtggtacggggacctgcggggaaagcccttcgccatcgaagccgagaacagcatcctggacatcagcggcttcagcaagcagtacaactgtgccttcatctggcagaaggacggcgtgaagaagctgaacctgtacctgatcatcaactacttcaagggcggcaagctgcggttcaagaagatcaaacctgaagccttcgaagccaacagattctacaccgtgatcaacaaaaagagcggcgagatcgtgcccatggaggtgaacttcaacttcgacgaccccaacctgatcatcctgcctctggcctttggcaagagacagggcagagaattcatctggaacgacctgctgtccctggaaaccggcagcctgaagctggccaacggaagagtgatcgagaagacactgtacaacagaagaacccggcaggatgagcctgccctgttcgtggccctgaccttcgagcggcgggaggtcctggactcctccaatatcaaaccaatgaacctgatcggcgtggcaagaggcgaaaacatccccgccgtgatcgccctgaccgaccccgagggctgcccactgagccggtttaaggatagcctgggaaacccaacccacatcctgagaatcggcgagagctataaggagaagcagcggaccatccaggccaagaaggaggtggagcagcggagagccggcggctacagccggaagtacgccagcaaagccaagaatctggcagacgatatggtgagaaacaccgctagagatctgctgtactacgccgtgacccaggatgccatgctgatcttcgccaacctgagccggggcttcggccggcagggcaagcggaccttcatggccgagagacagtacacacggatggaggactggctgaccgccaagctggcctacgagggcctgagcaagacctacctgtccaagacactggcccagtacacctccaagacatgcagcaactgtgggtttaccatcaccagcgccgactacgacagggtgctggagaagctgaagaagacagcaacaggctggatgaccacaattaacggcaaggagctgaaggtggagggccagattacctactacaacagatacaagagacagaacgtagtcaaggacctgtccgtcgagctggatagactgagcgaagaatctgtgaacaacgacatctcctcctggacaaagggcagaagcggagaagctctgagcctcctgaagaaaagattctcccatagacccgtgcaggagaagttcgtgtgcctgaactgcggcttcgagacacacgcagccgagcaagccgccctgaacatcgccagatcctggctgttcctgcggagccaggagtacaagaaataccagacaaacaagacaaccggcaacaccgataagagagccttcgtcgagacctggcagtccttttaccggaagaagcttaaggaggtgtggaaacctgccgtgcggtctggcggatctggcggaggctccacaagcatggacaccgtggtgttcgaggacgtggtggtggacttcacccccgaggagtgggccctgctgaaccccgcccagaggaagctgtacagggacgtgatgctggagaccttcaagcacctggccagcgtggacaacgaggcccagctgaaggccagcggcagcatcagccagcaggacaccagcggcgagaagctgagcctgaagcagaagatcgagaagttcaccaggaagaacatctgggccaccagccccaagaaaaagagaaaagtctaagctgccttctgcggggcttgccttctggccatgcccttcttctctcccttgcacctgtacctcttggtctttgaataaagcctgagtaggaaggctagcaaaaaaaaaaaaaaaaaaaaaaaaaaaaaaaaaaaaaaaaaaaaaaaaaaaaaaaaaaaaaaaaaaaaaaaaaaaaaaaa

SEQ ID NO: 6342 - RNA, 5797 nt, synthetic construct
  source 1..5797: mol_type = other RNA
aggaaataagagagaaaagaagagtaagaagaaatataagagccaccatggcccctaagaagaagcgtaaagtgagccggatggaacgcctcgtctacgaggtgcggcagaagtgcagaaacatcgaggacatctgcatctcctgcggatctctgaacgtgaccctggagcacccactgttcatcggcggcatgtgccagaactgtaaaaactgttttctggagtgtgcctatcaatacgacgatgacggctaccagagctactgcaccatctgttgcggcggaagagaggtgctgatgtgtggaaataacaactgctgccggtgcttctgcgtggaatgcgtggacctgctggtgggccccggcgccgcccaggccgctattaaggaagatccttggaactgctacatgtgcggccacaagggcacatacggcctgctgagacggagagaggactggcctagcagactgcagatgttcttcgccaataaccacgaccaggagttcgacccccctaaggtgtaccctcccgtccccgccgagaagagaaagcccatccgggtcctgagcctgttcgatggcatcgccaccggtctgctggtgctgaaggacctgggcatccaggtggataggtacattgcctccgaggtgtgcgaggactccatcaccgtgggaatggtgcgtcatcagggcaagatcatgtacgtgggcgacgtgcggagcgtgacacagaagcatatccaggagtggggccctttcgacctggtgatcggcggcagcccttgcaatgacctgagcatcgtgaacccagcccggaagggcctgtacgagggaaccggcagactgttcttcgagttttacagactgctgcacgacgcccggcctaaggaaggcgacgaccggcccttcttttggctgttcgagaatgtggtggccatgggagtcagcgacaagcgggatattagccggttcctggagagcaaccccgtgatgatcgatgccaaggaagtgagcgccgcccaccgggccagatacttctggggcaatctgcctggcatgaacagacccctggccagcaccgtgaacgacaagctggagctgcaggagtgcctggagcacggccggatcgccaagttcagcaaggtgagaaccatcaccacccgaagcaacagcatcaaacaaggcaaggaccagcactttcctgtgttcatgaacgagaaggaggacatcctgtggtgtaccgagatggagagagtgttcgggttcccagtccactacacagatgtcagcaacatgtctagactggccagacagagactgctgggaagaagctggtccgtccctgtgatcagacacctgttcgcccctctgaaggagtacttcgcctgcgtgagcagcggcaacagcaacgccaacagccggggccccagcttctctagcggcctggtgccactgtccctgagagggagccacatgggccccatggagatctacaaaaccgtgagcgcctggaagcggcagcctgtgcgcgtgctgagcctgtttcggaatatcgataaagtcctgaaaagcctgggattcctggagagcggctctggctccggcggtggcaccctgaagtacgtggaggatgtgacaaacgtggtcagacgggatgtggagaagtggggccccttcgatctggtgtacggcagcacccaacccctgggcagctcttgtgaccggtgccctggctggtacatgtttcagttccaccggatcctgcagtacgccctgccgagacaggagtcccagcggccattcttttggattttcatggacaacttgctgctgaccgaggatgaccaggaaactaccactcggttcctgcagaccgaagccgtgaccctgcaggacgtgagaggccgggactaccagaacgccatgcgggtgtggtccaacatccctggactgaaaagcaagcacgcacctctgacccctaaagaagaggagtacctgcaggcccaggtgcggagcagaagcaagctggacgcccctaaggtggatctgctggtgaagaattgcctcctgcccctgagagagtacttcaagtatttcagccagaatagtctgcccctgggcggcccaagcagcggcgcccctcctcccagcggcggcagcccagccggctccccaacctctaccgaggagggcacctctgagtccgccacccccgagagcggccctggcacctccaccgagcccagcgagggcagcgcacccggcagccctgccggcagccccacctccacagaggagggaaccagcaccgagcccagcgaaggcagcgccccaggcaccagcaccgagcctagtgagggcggctctggcggcggcagcgcccaggagattaaacggatcaacaagatcagaagaagacttgtgaaagacagcaacaccaagaaggccggcaagacaggccccatgaaaaccctgctggttagagtgatgacacccgatctgagagagcggctggaaaacctgagaaagaagcctgaaaatatcccccagcccatcagcaatacatctagagccaacctgaataagctgctgaccgattacaccgaaatgaagaaggcgatcctgcatgtgtactgggaagagttccagaaggaccctgtgggcctgatgagccgggtggcccagcctgccagcaagaagatcgatcagaacaagctgaaacctgagatggacgagaagggcaacctgaccaccgccggctttgcctgctctcagtgtggccagcccctgttcgtgtacaagctggagcaggtgtctgagaagggcaaggcttacaccaactacttcggacggtgcaatgtggccgagcacgaaaagctgatcctgctggcccagctgaagcccgagaaggatagcgacgaagccgtgacatatagcctgggaaagtttgggcagagggccctggatttctacagcattcatgtgaccaaggagtccacccaccccgtgaagcccctggcccagatcgccggaaacagatacgcctccggacctgtgggaaaggccctgagcgacgcatgtatgggcacaatcgcctccttcctgtctaagtaccaggacatcatcatcgaacaccagaaggtggtgaagggcaaccagaagagactggagagcctgcgggagctggccggcaaggaaaacctggaataccctagcgtgaccctgccacctcagcctcacaccaaggagggcgttgatgcctacaacgaagtgatcgcccgggtgcgaatgtgggtgaacctgaacctgtggcagaagctgaagctaagcagagatgatgccaagcctctgctgagactgaagggattcccttcctttcctctggtcgagagacaggccaacgaagtggactggtgggacatggtgtgtaacgtgaagaagctgatcaacgagaaaaaggaggatggcaaggtgttttggcagaatctggctggctacaagagacaggaagccctgagaccatacctgagcagcgaggaagatcggaagaagggaaagaaattcgctcggtaccagctgggcgacctgctgctgcacctggaaaagaagcacggcgaggactggggaaaggtgtacgacgaggcctgggagcggattgacaagaaagtggaaggcctgagcaagcacatcaagctggaagaggaacggagaagcgaggacgcccagagcaaggccgccctgaccgactggctgcgggctaaggccagcttcgtgatcgagggcctgaaggaggccgacaaggacgagttctgcagatgcgagctgaagctgcagaagtggtacggggacctgcggggaaagcccttcgccatcgaagccgagaacagcatcctggacatcagcggcttcagcaagcagtacaactgtgccttcatctggcagaaggacggcgtgaagaagctgaacctgtacctgatcatcaactacttcaagggcggcaagctgcggttcaagaagatcaaacctgaagccttcgaagccaacagattctacaccgtgatcaacaaaaagagcggcgagatcgtgcccatggaggtgaacttcaacttcgacgaccccaacctgatcatcctgcctctggcctttggcaagagacagggcagagaattcatctggaacgacctgctgtccctggaaaccggcagcctgaagctggccaacggaagagtgatcgagaagacactgtacaacagaagaacccggcaggatgagcctgccctgttcgtggccctgaccttcgagcggcgggaggtcctggactcctccaatatcaaaccaatgaacctgatcggcgtggcaagaggcgaaaacatccccgccgtgatcgccctgaccgaccccgagggctgcccactgagccggtttaaggatagcctgggaaacccaacccacatcctgagaatcggcgagagctataaggagaagcagcggaccatccaggccaagaaggaggtggagcagcggagagccggcggctacagccggaagtacgccagcaaagccaagaatctggcagacgatatggtgagaaacaccgctagagatctgctgtactacgccgtgacccaggatgccatgctgatcttcgccaacctgagccggggcttcggccggcagggcaagcggaccttcatggccgagagacagtacacacggatggaggactggctgaccgccaagctggcctacgagggcctgagcaagacctacctgtccaagacactggcccagtacacctccaagacatgcagcaactgtgggtttaccatcaccagcgccgactacgacagggtgctggagaagctgaagaagacagcaacaggctggatgaccacaattaacggcaaggagctgaaggtggagggccagattacctactacaacagatacaagagacagaacgtagtcaaggacctgtccgtcgagctggatagactgagcgaagaatctgtgaacaacgacatctcctcctggacaaagggcagaagcggagaagctctgagcctcctgaagaaaagattctcccatagacccgtgcaggagaagttcgtgtgcctgaactgcggcttcgagacacacgcagccgagcaagccgccctgaacatcgccagatcctggctgttcctgcggagccaggagtacaagaaataccagacaaacaagacaaccggcaacaccgataagagagccttcgtcgagacctggcagtccttttaccggaagaagcttaaggaggtgtggaaacctgccgtgcggtctggcggatctggcggaggctccacaagcgagagcctgaccctggaggacgtggccgtggagttcacctgggaggagtggcagctgctgggccccgcccagaaggacctgtactgggacgtgatgctggagaactacaaccacctggtgagcctgggctaccaggccagcaagcccgacgccctgagcaagctggcccagggcgaggagccctgcgtgatcgagggcaagatccagaacaggaactgccccggcatcaggaaggccgacagcaccagccccaagaaaaagagaaaagtctaagctgccttctgcggggcttgccttctggccatgcccttcttctctcccttgcacctgtacctcttggtctttgaataaagcctgagtaggaaggctagcaaaaaaaaaaaaaaaaaaaaaaaaaaaaaaaaaaaaaaaaaaaaaaaaaaaaaaaaaaaaaaaaaaaaaaaaaaaaaaaa

SEQ ID NO: 6343 - RNA, 5797 nt, synthetic construct
  source 1..5797: mol_type = other RNA
aggaaataagagagaaaagaagagtaagaagaaatataagagccaccatggcccctaagaagaagcgtaaagtgagccggatggaacgcctcgtctacgaggtgcggcagaagtgcagaaacatcgaggacatctgcatctcctgcggatctctgaacgtgaccctggagcacccactgttcatcggcggcatgtgccagaactgtaaaaactgttttctggagtgtgcctatcaatacgacgatgacggctaccagagctactgcaccatctgttgcggcggaagagaggtgctgatgtgtggaaataacaactgctgccggtgcttctgcgtggaatgcgtggacctgctggtgggccccggcgccgcccaggccgctattaaggaagatccttggaactgctacatgtgcggccacaagggcacatacggcctgctgagacggagagaggactggcctagcagactgcagatgttcttcgccaataaccacgaccaggagttcgacccccctaaggtgtaccctcccgtccccgccgagaagagaaagcccatccgggtcctgagcctgttcgatggcatcgccaccggtctgctggtgctgaaggacctgggcatccaggtggataggtacattgcctccgaggtgtgcgaggactccatcaccgtgggaatggtgcgtcatcagggcaagatcatgtacgtgggcgacgtgcggagcgtgacacagaagcatatccaggagtggggccctttcgacctggtgatcggcggcagcccttgcaatgacctgagcatcgtgaacccagcccggaagggcctgtacgagggaaccggcagactgttcttcgagttttacagactgctgcacgacgcccggcctaaggaaggcgacgaccggcccttcttttggctgttcgagaatgtggtggccatgggagtcagcgacaagcgggatattagccggttcctggagagcaaccccgtgatgatcgatgccaaggaagtgagcgccgcccaccgggccagatacttctggggcaatctgcctggcatgaacagacccctggccagcaccgtgaacgacaagctggagctgcaggagtgcctggagcacggccggatcgccaagttcagcaaggtgagaaccatcaccacccgaagcaacagcatcaaacaaggcaaggaccagcactttcctgtgttcatgaacgagaaggaggacatcctgtggtgtaccgagatggagagagtgttcgggttcccagtccactacacagatgtcagcaacatgtctagactggccagacagagactgctgggaagaagctggtccgtccctgtgatcagacacctgttcgcccctctgaaggagtacttcgcctgcgtgagcagcggcaacagcaacgccaacagccggggccccagcttctctagcggcctggtgccactgtccctgagagggagccacatgggccccatggagatctacaaaaccgtgagcgcctggaagcggcagcctgtgcgcgtgctgagcctgtttcggaatatcgataaagtcctgaaaagcctgggattcctggagagcggctctggctccggcggtggcaccctgaagtacgtggaggatgtgacaaacgtggtcagacgggatgtggagaagtggggccccttcgatctggtgtacggcagcacccaacccctgggcagctcttgtgaccggtgccctggctggtacatgtttcagttccaccggatcctgcagtacgccctgccgagacaggagtcccagcggccattcttttggattttcatggacaacttgctgctgaccgaggatgaccaggaaactaccactcggttcctgcagaccgaagccgtgaccctgcaggacgtgagaggccgggactaccagaacgccatgcgggtgtggtccaacatccctggactgaaaagcaagcacgcacctctgacccctaaagaagaggagtacctgcaggcccaggtgcggagcagaagcaagctggacgcccctaaggtggatctgctggtgaagaattgcctcctgcccctgagagagtacttcaagtatttcagccagaatagtctgcccctgggcggcccaagcagcggcgcccctcctcccagcggcggcagcccagccggctccccaacctctaccgaggagggcacctctgagtccgccacccccgagagcggccctggcacctccaccgagcccagcgagggcagcgcacccggcagccctgccggcagccccacctccacagaggagggaaccagcaccgagcccagcgaaggcagcgccccaggcaccagcaccgagcctagtgagggcggctctggcggcggcagcgcccaggagattaaacggatcaacaagatcagaagaagacttgtgaaagacagcaacaccaagaaggccggcaagacaggccccatgaaaaccctgctggttagagtgatgacacccgatctgagagagcggctggaaaacctgagaaagaagcctgaaaatatcccccagcccatcagcaatacatctagagccaacctgaataagctgctgaccgattacaccgaaatgaagaaggcgatcctgcatgtgtactgggaagagttccagaaggaccctgtgggcctgatgagccgggtggcccagcctgccagcaagaagatcgatcagaacaagctgaaacctgagatggacgagaagggcaacctgaccaccgccggctttgcctgctctcagtgtggccagcccctgttcgtgtacaagctggagcaggtgtctgagaagggcaaggcttacaccaactacttcggacggtgcaatgtggccgagcacgaaaagctgatcctgctggcccagctgaagcccgagaaggatagcgacgaagccgtgacatatagcctgggaaagtttgggcagagggccctggatttctacagcattcatgtgaccaaggagtccacccaccccgtgaagcccctggcccagatcgccggaaacagatacgcctccggacctgtgggaaaggccctgagcgacgcatgtatgggcacaatcgcctccttcctgtctaagtaccaggacatcatcatcgaacaccagaaggtggtgaagggcaaccagaagagactggagagcctgcgggagctggccggcaaggaaaacctggaataccctagcgtgaccctgccacctcagcctcacaccaaggagggcgttgatgcctacaacgaagtgatcgcccgggtgcgaatgtgggtgaacctgaacctgtggcagaagctgaagctaagcagagatgatgccaagcctctgctgagactgaagggattcccttcctttcctctggtcgagagacaggccaacgaagtggactggtgggacatggtgtgtaacgtgaagaagctgatcaacgagaaaaaggaggatggcaaggtgttttggcagaatctggctggctacaagagacaggaagccctgagaccatacctgagcagcgaggaagatcggaagaagggaaagaaattcgctcggtaccagctgggcgacctgctgctgcacctggaaaagaagcacggcgaggactggggaaaggtgtacgacgaggcctgggagcggattgacaagaaagtggaaggcctgagcaagcacatcaagctggaagaggaacggagaagcgaggacgcccagagcaaggccgccctgaccgactggctgcgggctaaggccagcttcgtgatcgagggcctgaaggaggccgacaaggacgagttctgcagatgcgagctgaagctgcagaagtggtacggggacctgcggggaaagcccttcgccatcgaagccgagaacagcatcctggacatcagcggcttcagcaagcagtacaactgtgccttcatctggcagaaggacggcgtgaagaagctgaacctgtacctgatcatcaactacttcaagggcggcaagctgcggttcaagaagatcaaacctgaagccttcgaagccaacagattctacaccgtgatcaacaaaaagagcggcgagatcgtgcccatggaggtgaacttcaacttcgacgaccccaacctgatcatcctgcctctggcctttggcaagagacagggcagagaattcatctggaacgacctgctgtccctggaaaccggcagcctgaagctggccaacggaagagtgatcgagaagacactgtacaacagaagaacccggcaggatgagcctgccctgttcgtggccctgaccttcgagcggcgggaggtcctggactcctccaatatcaaaccaatgaacctgatcggcgtggcaagaggcgaaaacatccccgccgtgatcgccctgaccgaccccgagggctgcccactgagccggtttaaggatagcctgggaaacccaacccacatcctgagaatcggcgagagctataaggagaagcagcggaccatccaggccaagaaggaggtggagcagcggagagccggcggctacagccggaagtacgccagcaaagccaagaatctggcagacgatatggtgagaaacaccgctagagatctgctgtactacgccgtgacccaggatgccatgctgatcttcgccaacctgagccggggcttcggccggcagggcaagcggaccttcatggccgagagacagtacacacggatggaggactggctgaccgccaagctggcctacgagggcctgagcaagacctacctgtccaagacactggcccagtacacctccaagacatgcagcaactgtgggtttaccatcaccagcgccgactacgacagggtgctggagaagctgaagaagacagcaacaggctggatgaccacaattaacggcaaggagctgaaggtggagggccagattacctactacaacagatacaagagacagaacgtagtcaaggacctgtccgtcgagctggatagactgagcgaagaatctgtgaacaacgacatctcctcctggacaaagggcagaagcggagaagctctgagcctcctgaagaaaagattctcccatagacccgtgcaggagaagttcgtgtgcctgaactgcggcttcgagacacacgcagccgagcaagccgccctgaacatcgccagatcctggctgttcctgcggagccaggagtacaagaaataccagacaaacaagacaaccggcaacaccgataagagagccttcgtcgagacctggcagtccttttaccggaagaagcttaaggaggtgtggaaacctgccgtgcggtctggcggatctggcggaggctccacaagcatgaccctgctgaccttcagggacgtggccatcgagttcagcctggaggagtggaagtgcctggacctggcccagcagaacctgtacagggacgtgatgctggagaactacaggaacctgttcagcgtgggcctgaccgtgagcaagcccggcctgatcacctgcctggagcagaggaaggagccctggaacgtgaagaggcaggaggccgccgacggccaccccggctggagcgccgtggtgaccagccccaagaaaaagagaaaagtctaagctgccttctgcggggcttgccttctggccatgcccttcttctctcccttgcacctgtacctcttggtctttgaataaagcctgagtaggaaggctagcaaaaaaaaaaaaaaaaaaaaaaaaaaaaaaaaaaaaaaaaaaaaaaaaaaaaaaaaaaaaaaaaaaaaaaaaaaaaaaaa

SEQ ID NO: 6344 - RNA, 5797 nt, synthetic construct
  source 1..5797: mol_type = other RNA
aggaaataagagagaaaagaagagtaagaagaaatataagagccaccatggcccctaagaagaagcgtaaagtgagccggatggaacgcctcgtctacgaggtgcggcagaagtgcagaaacatcgaggacatctgcatctcctgcggatctctgaacgtgaccctggagcacccactgttcatcggcggcatgtgccagaactgtaaaaactgttttctggagtgtgcctatcaatacgacgatgacggctaccagagctactgcaccatctgttgcggcggaagagaggtgctgatgtgtggaaataacaactgctgccggtgcttctgcgtggaatgcgtggacctgctggtgggccccggcgccgcccaggccgctattaaggaagatccttggaactgctacatgtgcggccacaagggcacatacggcctgctgagacggagagaggactggcctagcagactgcagatgttcttcgccaataaccacgaccaggagttcgacccccctaaggtgtaccctcccgtccccgccgagaagagaaagcccatccgggtcctgagcctgttcgatggcatcgccaccggtctgctggtgctgaaggacctgggcatccaggtggataggtacattgcctccgaggtgtgcgaggactccatcaccgtgggaatggtgcgtcatcagggcaagatcatgtacgtgggcgacgtgcggagcgtgacacagaagcatatccaggagtggggccctttcgacctggtgatcggcggcagcccttgcaatgacctgagcatcgtgaacccagcccggaagggcctgtacgagggaaccggcagactgttcttcgagttttacagactgctgcacgacgcccggcctaaggaaggcgacgaccggcccttcttttggctgttcgagaatgtggtggccatgggagtcagcgacaagcgggatattagccggttcctggagagcaaccccgtgatgatcgatgccaaggaagtgagcgccgcccaccgggccagatacttctggggcaatctgcctggcatgaacagacccctggccagcaccgtgaacgacaagctggagctgcaggagtgcctggagcacggccggatcgccaagttcagcaaggtgagaaccatcaccacccgaagcaacagcatcaaacaaggcaaggaccagcactttcctgtgttcatgaacgagaaggaggacatcctgtggtgtaccgagatggagagagtgttcgggttcccagtccactacacagatgtcagcaacatgtctagactggccagacagagactgctgggaagaagctggtccgtccctgtgatcagacacctgttcgcccctctgaaggagtacttcgcctgcgtgagcagcggcaacagcaacgccaacagccggggccccagcttctctagcggcctggtgccactgtccctgagagggagccacatgggccccatggagatctacaaaaccgtgagcgcctggaagcggcagcctgtgcgcgtgctgagcctgtttcggaatatcgataaagtcctgaaaagcctgggattcctggagagcggctctggctccggcggtggcaccctgaagtacgtggaggatgtgacaaacgtggtcagacgggatgtggagaagtggggccccttcgatctggtgtacggcagcacccaacccctgggcagctcttgtgaccggtgccctggctggtacatgtttcagttccaccggatcctgcagtacgccctgccgagacaggagtcccagcggccattcttttggattttcatggacaacttgctgctgaccgaggatgaccaggaaactaccactcggttcctgcagaccgaagccgtgaccctgcaggacgtgagaggccgggactaccagaacgccatgcgggtgtggtccaacatccctggactgaaaagcaagcacgcacctctgacccctaaagaagaggagtacctgcaggcccaggtgcggagcagaagcaagctggacgcccctaaggtggatctgctggtgaagaattgcctcctgcccctgagagagtacttcaagtatttcagccagaatagtctgcccctgggcggcccaagcagcggcgcccctcctcccagcggcggcagcccagccggctccccaacctctaccgaggagggcacctctgagtccgccacccccgagagcggccctggcacctccaccgagcccagcgagggcagcgcacccggcagccctgccggcagccccacctccacagaggagggaaccagcaccgagcccagcgaaggcagcgccccaggcaccagcaccgagcctagtgagggcggctctggcggcggcagcgcccaggagattaaacggatcaacaagatcagaagaagacttgtgaaagacagcaacaccaagaaggccggcaagacaggccccatgaaaaccctgctggttagagtgatgacacccgatctgagagagcggctggaaaacctgagaaagaagcctgaaaatatcccccagcccatcagcaatacatctagagccaacctgaataagctgctgaccgattacaccgaaatgaagaaggcgatcctgcatgtgtactgggaagagttccagaaggaccctgtgggcctgatgagccgggtggcccagcctgccagcaagaagatcgatcagaacaagctgaaacctgagatggacgagaagggcaacctgaccaccgccggctttgcctgctctcagtgtggccagcccctgttcgtgtacaagctggagcaggtgtctgagaagggcaaggcttacaccaactacttcggacggtgcaatgtggccgagcacgaaaagctgatcctgctggcccagctgaagcccgagaaggatagcgacgaagccgtgacatatagcctgggaaagtttgggcagagggccctggatttctacagcattcatgtgaccaaggagtccacccaccccgtgaagcccctggcccagatcgccggaaacagatacgcctccggacctgtgggaaaggccctgagcgacgcatgtatgggcacaatcgcctccttcctgtctaagtaccaggacatcatcatcgaacaccagaaggtggtgaagggcaaccagaagagactggagagcctgcgggagctggccggcaaggaaaacctggaataccctagcgtgaccctgccacctcagcctcacaccaaggagggcgttgatgcctacaacgaagtgatcgcccgggtgcgaatgtgggtgaacctgaacctgtggcagaagctgaagctaagcagagatgatgccaagcctctgctgagactgaagggattcccttcctttcctctggtcgagagacaggccaacgaagtggactggtgggacatggtgtgtaacgtgaagaagctgatcaacgagaaaaaggaggatggcaaggtgttttggcagaatctggctggctacaagagacaggaagccctgagaccatacctgagcagcgaggaagatcggaagaagggaaagaaattcgctcggtaccagctgggcgacctgctgctgcacctggaaaagaagcacggcgaggactggggaaaggtgtacgacgaggcctgggagcggattgacaagaaagtggaaggcctgagcaagcacatcaagctggaagaggaacggagaagcgaggacgcccagagcaaggccgccctgaccgactggctgcgggctaaggccagcttcgtgatcgagggcctgaaggaggccgacaaggacgagttctgcagatgcgagctgaagctgcagaagtggtacggggacctgcggggaaagcccttcgccatcgaagccgagaacagcatcctggacatcagcggcttcagcaagcagtacaactgtgccttcatctggcagaaggacggcgtgaagaagctgaacctgtacctgatcatcaactacttcaagggcggcaagctgcggttcaagaagatcaaacctgaagccttcgaagccaacagattctacaccgtgatcaacaaaaagagcggcgagatcgtgcccatggaggtgaacttcaacttcgacgaccccaacctgatcatcctgcctctggcctttggcaagagacagggcagagaattcatctggaacgacctgctgtccctggaaaccggcagcctgaagctggccaacggaagagtgatcgagaagacactgtacaacagaagaacccggcaggatgagcctgccctgttcgtggccctgaccttcgagcggcgggaggtcctggactcctccaatatcaaaccaatgaacctgatcggcgtggcaagaggcgaaaacatccccgccgtgatcgccctgaccgaccccgagggctgcccactgagccggtttaaggatagcctgggaaacccaacccacatcctgagaatcggcgagagctataaggagaagcagcggaccatccaggccaagaaggaggtggagcagcggagagccggcggctacagccggaagtacgccagcaaagccaagaatctggcagacgatatggtgagaaacaccgctagagatctgctgtactacgccgtgacccaggatgccatgctgatcttcgccaacctgagccggggcttcggccggcagggcaagcggaccttcatggccgagagacagtacacacggatggaggactggctgaccgccaagctggcctacgagggcctgagcaagacctacctgtccaagacactggcccagtacacctccaagacatgcagcaactgtgggtttaccatcaccagcgccgactacgacagggtgctggagaagctgaagaagacagcaacaggctggatgaccacaattaacggcaaggagctgaaggtggagggccagattacctactacaacagatacaagagacagaacgtagtcaaggacctgtccgtcgagctggatagactgagcgaagaatctgtgaacaacgacatctcctcctggacaaagggcagaagcggagaagctctgagcctcctgaagaaaagattctcccatagacccgtgcaggagaagttcgtgtgcctgaactgcggcttcgagacacacgcagccgagcaagccgccctgaacatcgccagatcctggctgttcctgcggagccaggagtacaagaaataccagacaaacaagacaaccggcaacaccgataagagagccttcgtcgagacctggcagtccttttaccggaagaagcttaaggaggtgtggaaacctgccgtgcggtctggcggatctggcggaggctccacaagcagccaggagctgctgaccttcaaggacgtgagcgtggacttcacccaggaggagtggggccagctggcccccgcccacaggaacctgtacagggaggtgatgctggagaactacggcaacctggtgagcgtgggctgccagctgagcaagcccggcgtgatcagccagctggagaagggcgaggagccctggctgatggagagggacatcagcggcgtgcccagcagcgacctgaagagcaagaccagccccaagaaaaagagaaaagtctaagctgccttctgcggggcttgccttctggccatgcccttcttctctcccttgcacctgtacctcttggtctttgaataaagcctgagtaggaaggctagcaaaaaaaaaaaaaaaaaaaaaaaaaaaaaaaaaaaaaaaaaaaaaaaaaaaaaaaaaaaaaaaaaaaaaaaaaaaaaaaa

SEQ ID NO: 6345 - RNA, 5797 nt, synthetic construct
  source 1..5797: mol_type = other RNA
aggaaataagagagaaaagaagagtaagaagaaatataagagccaccatggcccctaagaagaagcgtaaagtgagccggatggaacgcctcgtctacgaggtgcggcagaagtgcagaaacatcgaggacatctgcatctcctgcggatctctgaacgtgaccctggagcacccactgttcatcggcggcatgtgccagaactgtaaaaactgttttctggagtgtgcctatcaatacgacgatgacggctaccagagctactgcaccatctgttgcggcggaagagaggtgctgatgtgtggaaataacaactgctgccggtgcttctgcgtggaatgcgtggacctgctggtgggccccggcgccgcccaggccgctattaaggaagatccttggaactgctacatgtgcggccacaagggcacatacggcctgctgagacggagagaggactggcctagcagactgcagatgttcttcgccaataaccacgaccaggagttcgacccccctaaggtgtaccctcccgtccccgccgagaagagaaagcccatccgggtcctgagcctgttcgatggcatcgccaccggtctgctggtgctgaaggacctgggcatccaggtggataggtacattgcctccgaggtgtgcgaggactccatcaccgtgggaatggtgcgtcatcagggcaagatcatgtacgtgggcgacgtgcggagcgtgacacagaagcatatccaggagtggggccctttcgacctggtgatcggcggcagcccttgcaatgacctgagcatcgtgaacccagcccggaagggcctgtacgagggaaccggcagactgttcttcgagttttacagactgctgcacgacgcccggcctaaggaaggcgacgaccggcccttcttttggctgttcgagaatgtggtggccatgggagtcagcgacaagcgggatattagccggttcctggagagcaaccccgtgatgatcgatgccaaggaagtgagcgccgcccaccgggccagatacttctggggcaatctgcctggcatgaacagacccctggccagcaccgtgaacgacaagctggagctgcaggagtgcctggagcacggccggatcgccaagttcagcaaggtgagaaccatcaccacccgaagcaacagcatcaaacaaggcaaggaccagcactttcctgtgttcatgaacgagaaggaggacatcctgtggtgtaccgagatggagagagtgttcgggttcccagtccactacacagatgtcagcaacatgtctagactggccagacagagactgctgggaagaagctggtccgtccctgtgatcagacacctgttcgcccctctgaaggagtacttcgcctgcgtgagcagcggcaacagcaacgccaacagccggggccccagcttctctagcggcctggtgccactgtccctgagagggagccacatgggccccatggagatctacaaaaccgtgagcgcctggaagcggcagcctgtgcgcgtgctgagcctgtttcggaatatcgataaagtcctgaaaagcctgggattcctggagagcggctctggctccggcggtggcaccctgaagtacgtggaggatgtgacaaacgtggtcagacgggatgtggagaagtggggccccttcgatctggtgtacggcagcacccaacccctgggcagctcttgtgaccggtgccctggctggtacatgtttcagttccaccggatcctgcagtacgccctgccgagacaggagtcccagcggccattcttttggattttcatggacaacttgctgctgaccgaggatgaccaggaaactaccactcggttcctgcagaccgaagccgtgaccctgcaggacgtgagaggccgggactaccagaacgccatgcgggtgtggtccaacatccctggactgaaaagcaagcacgcacctctgacccctaaagaagaggagtacctgcaggcccaggtgcggagcagaagcaagctggacgcccctaaggtggatctgctggtgaagaattgcctcctgcccctgagagagtacttcaagtatttcagccagaatagtctgcccctgggcggcccaagcagcggcgcccctcctcccagcggcggcagcccagccggctccccaacctctaccgaggagggcacctctgagtccgccacccccgagagcggccctggcacctccaccgagcccagcgagggcagcgcacccggcagccctgccggcagccccacctccacagaggagggaaccagcaccgagcccagcgaaggcagcgccccaggcaccagcaccgagcctagtgagggcggctctggcggcggcagcgcccaggagattaaacggatcaacaagatcagaagaagacttgtgaaagacagcaacaccaagaaggccggcaagacaggccccatgaaaaccctgctggttagagtgatgacacccgatctgagagagcggctggaaaacctgagaaagaagcctgaaaatatcccccagcccatcagcaatacatctagagccaacctgaataagctgctgaccgattacaccgaaatgaagaaggcgatcctgcatgtgtactgggaagagttccagaaggaccctgtgggcctgatgagccgggtggcccagcctgccagcaagaagatcgatcagaacaagctgaaacctgagatggacgagaagggcaacctgaccaccgccggctttgcctgctctcagtgtggccagcccctgttcgtgtacaagctggagcaggtgtctgagaagggcaaggcttacaccaactacttcggacggtgcaatgtggccgagcacgaaaagctgatcctgctggcccagctgaagcccgagaaggatagcgacgaagccgtgacatatagcctgggaaagtttgggcagagggccctggatttctacagcattcatgtgaccaaggagtccacccaccccgtgaagcccctggcccagatcgccggaaacagatacgcctccggacctgtgggaaaggccctgagcgacgcatgtatgggcacaatcgcctccttcctgtctaagtaccaggacatcatcatcgaacaccagaaggtggtgaagggcaaccagaagagactggagagcctgcgggagctggccggcaaggaaaacctggaataccctagcgtgaccctgccacctcagcctcacaccaaggagggcgttgatgcctacaacgaagtgatcgcccgggtgcgaatgtgggtgaacctgaacctgtggcagaagctgaagctaagcagagatgatgccaagcctctgctgagactgaagggattcccttcctttcctctggtcgagagacaggccaacgaagtggactggtgggacatggtgtgtaacgtgaagaagctgatcaacgagaaaaaggaggatggcaaggtgttttggcagaatctggctggctacaagagacaggaagccctgagaccatacctgagcagcgaggaagatcggaagaagggaaagaaattcgctcggtaccagctgggcgacctgctgctgcacctggaaaagaagcacggcgaggactggggaaaggtgtacgacgaggcctgggagcggattgacaagaaagtggaaggcctgagcaagcacatcaagctggaagaggaacggagaagcgaggacgcccagagcaaggccgccctgaccgactggctgcgggctaaggccagcttcgtgatcgagggcctgaaggaggccgacaaggacgagttctgcagatgcgagctgaagctgcagaagtggtacggggacctgcggggaaagcccttcgccatcgaagccgagaacagcatcctggacatcagcggcttcagcaagcagtacaactgtgccttcatctggcagaaggacggcgtgaagaagctgaacctgtacctgatcatcaactacttcaagggcggcaagctgcggttcaagaagatcaaacctgaagccttcgaagccaacagattctacaccgtgatcaacaaaaagagcggcgagatcgtgcccatggaggtgaacttcaacttcgacgaccccaacctgatcatcctgcctctggcctttggcaagagacagggcagagaattcatctggaacgacctgctgtccctggaaaccggcagcctgaagctggccaacggaagagtgatcgagaagacactgtacaacagaagaacccggcaggatgagcctgccctgttcgtggccctgaccttcgagcggcgggaggtcctggactcctccaatatcaaaccaatgaacctgatcggcgtggcaagaggcgaaaacatccccgccgtgatcgccctgaccgaccccgagggctgcccactgagccggtttaaggatagcctgggaaacccaacccacatcctgagaatcggcgagagctataaggagaagcagcggaccatccaggccaagaaggaggtggagcagcggagagccggcggctacagccggaagtacgccagcaaagccaagaatctggcagacgatatggtgagaaacaccgctagagatctgctgtactacgccgtgacccaggatgccatgctgatcttcgccaacctgagccggggcttcggccggcagggcaagcggaccttcatggccgagagacagtacacacggatggaggactggctgaccgccaagctggcctacgagggcctgagcaagacctacctgtccaagacactggcccagtacacctccaagacatgcagcaactgtgggtttaccatcaccagcgccgactacgacagggtgctggagaagctgaagaagacagcaacaggctggatgaccacaattaacggcaaggagctgaaggtggagggccagattacctactacaacagatacaagagacagaacgtagtcaaggacctgtccgtcgagctggatagactgagcgaagaatctgtgaacaacgacatctcctcctggacaaagggcagaagcggagaagctctgagcctcctgaagaaaagattctcccatagacccgtgcaggagaagttcgtgtgcctgaactgcggcttcgagacacacgcagccgagcaagccgccctgaacatcgccagatcctggctgttcctgcggagccaggagtacaagaaataccagacaaacaagacaaccggcaacaccgataagagagccttcgtcgagacctggcagtccttttaccggaagaagcttaaggaggtgtggaaacctgccgtgcggtctggcggatctggcggaggctccacaagcatggccaacgccaccggcagcggcgtggagcagaagttccagggcagcgtgagcttcaaggacgtgaccgtgggcttcacccaggaggagtggcagcacctggaccccagccagagggccctgtacagggacgtgatgctggagaactacagcaacctggtgagcgtgggctactgcgtgcacaagcccgaggtgatcttcaggctggagcagggcgaggagccctggaagctggaggaggagaccagccccaagaaaaagagaaaagtctaagctgccttctgcggggcttgccttctggccatgcccttcttctctcccttgcacctgtacctcttggtctttgaataaagcctgagtaggaaggctagcaaaaaaaaaaaaaaaaaaaaaaaaaaaaaaaaaaaaaaaaaaaaaaaaaaaaaaaaaaaaaaaaaaaaaaaaaaaaaaaa

SEQ ID NO: 6346 - RNA, 5797 nt, synthetic construct
  source 1..5797: mol_type = other RNA
aggaaataagagagaaaagaagagtaagaagaaatataagagccaccatggcccctaagaagaagcgtaaagtgagccggatggaacgcctcgtctacgaggtgcggcagaagtgcagaaacatcgaggacatctgcatctcctgcggatctctgaacgtgaccctggagcacccactgttcatcggcggcatgtgccagaactgtaaaaactgttttctggagtgtgcctatcaatacgacgatgacggctaccagagctactgcaccatctgttgcggcggaagagaggtgctgatgtgtggaaataacaactgctgccggtgcttctgcgtggaatgcgtggacctgctggtgggccccggcgccgcccaggccgctattaaggaagatccttggaactgctacatgtgcggccacaagggcacatacggcctgctgagacggagagaggactggcctagcagactgcagatgttcttcgccaataaccacgaccaggagttcgacccccctaaggtgtaccctcccgtccccgccgagaagagaaagcccatccgggtcctgagcctgttcgatggcatcgccaccggtctgctggtgctgaaggacctgggcatccaggtggataggtacattgcctccgaggtgtgcgaggactccatcaccgtgggaatggtgcgtcatcagggcaagatcatgtacgtgggcgacgtgcggagcgtgacacagaagcatatccaggagtggggccctttcgacctggtgatcggcggcagcccttgcaatgacctgagcatcgtgaacccagcccggaagggcctgtacgagggaaccggcagactgttcttcgagttttacagactgctgcacgacgcccggcctaaggaaggcgacgaccggcccttcttttggctgttcgagaatgtggtggccatgggagtcagcgacaagcgggatattagccggttcctggagagcaaccccgtgatgatcgatgccaaggaagtgagcgccgcccaccgggccagatacttctggggcaatctgcctggcatgaacagacccctggccagcaccgtgaacgacaagctggagctgcaggagtgcctggagcacggccggatcgccaagttcagcaaggtgagaaccatcaccacccgaagcaacagcatcaaacaaggcaaggaccagcactttcctgtgttcatgaacgagaaggaggacatcctgtggtgtaccgagatggagagagtgttcgggttcccagtccactacacagatgtcagcaacatgtctagactggccagacagagactgctgggaagaagctggtccgtccctgtgatcagacacctgttcgcccctctgaaggagtacttcgcctgcgtgagcagcggcaacagcaacgccaacagccggggccccagcttctctagcggcctggtgccactgtccctgagagggagccacatgggccccatggagatctacaaaaccgtgagcgcctggaagcggcagcctgtgcgcgtgctgagcctgtttcggaatatcgataaagtcctgaaaagcctgggattcctggagagcggctctggctccggcggtggcaccctgaagtacgtggaggatgtgacaaacgtggtcagacgggatgtggagaagtggggccccttcgatctggtgtacggcagcacccaacccctgggcagctcttgtgaccggtgccctggctggtacatgtttcagttccaccggatcctgcagtacgccctgccgagacaggagtcccagcggccattcttttggattttcatggacaacttgctgctgaccgaggatgaccaggaaactaccactcggttcctgcagaccgaagccgtgaccctgcaggacgtgagaggccgggactaccagaacgccatgcgggtgtggtccaacatccctggactgaaaagcaagcacgcacctctgacccctaaagaagaggagtacctgcaggcccaggtgcggagcagaagcaagctggacgcccctaaggtggatctgctggtgaagaattgcctcctgcccctgagagagtacttcaagtatttcagccagaatagtctgcccctgggcggcccaagcagcggcgcccctcctcccagcggcggcagcccagccggctccccaacctctaccgaggagggcacctctgagtccgccacccccgagagcggccctggcacctccaccgagcccagcgagggcagcgcacccggcagccctgccggcagccccacctccacagaggagggaaccagcaccgagcccagcgaaggcagcgccccaggcaccagcaccgagcctagtgagggcggctctggcggcggcagcgcccaggagattaaacggatcaacaagatcagaagaagacttgtgaaagacagcaacaccaagaaggccggcaagacaggccccatgaaaaccctgctggttagagtgatgacacccgatctgagagagcggctggaaaacctgagaaagaagcctgaaaatatcccccagcccatcagcaatacatctagagccaacctgaataagctgctgaccgattacaccgaaatgaagaaggcgatcctgcatgtgtactgggaagagttccagaaggaccctgtgggcctgatgagccgggtggcccagcctgccagcaagaagatcgatcagaacaagctgaaacctgagatggacgagaagggcaacctgaccaccgccggctttgcctgctctcagtgtggccagcccctgttcgtgtacaagctggagcaggtgtctgagaagggcaaggcttacaccaactacttcggacggtgcaatgtggccgagcacgaaaagctgatcctgctggcccagctgaagcccgagaaggatagcgacgaagccgtgacatatagcctgggaaagtttgggcagagggccctggatttctacagcattcatgtgaccaaggagtccacccaccccgtgaagcccctggcccagatcgccggaaacagatacgcctccggacctgtgggaaaggccctgagcgacgcatgtatgggcacaatcgcctccttcctgtctaagtaccaggacatcatcatcgaacaccagaaggtggtgaagggcaaccagaagagactggagagcctgcgggagctggccggcaaggaaaacctggaataccctagcgtgaccctgccacctcagcctcacaccaaggagggcgttgatgcctacaacgaagtgatcgcccgggtgcgaatgtgggtgaacctgaacctgtggcagaagctgaagctaagcagagatgatgccaagcctctgctgagactgaagggattcccttcctttcctctggtcgagagacaggccaacgaagtggactggtgggacatggtgtgtaacgtgaagaagctgatcaacgagaaaaaggaggatggcaaggtgttttggcagaatctggctggctacaagagacaggaagccctgagaccatacctgagcagcgaggaagatcggaagaagggaaagaaattcgctcggtaccagctgggcgacctgctgctgcacctggaaaagaagcacggcgaggactggggaaaggtgtacgacgaggcctgggagcggattgacaagaaagtggaaggcctgagcaagcacatcaagctggaagaggaacggagaagcgaggacgcccagagcaaggccgccctgaccgactggctgcgggctaaggccagcttcgtgatcgagggcctgaaggaggccgacaaggacgagttctgcagatgcgagctgaagctgcagaagtggtacggggacctgcggggaaagcccttcgccatcgaagccgagaacagcatcctggacatcagcggcttcagcaagcagtacaactgtgccttcatctggcagaaggacggcgtgaagaagctgaacctgtacctgatcatcaactacttcaagggcggcaagctgcggttcaagaagatcaaacctgaagccttcgaagccaacagattctacaccgtgatcaacaaaaagagcggcgagatcgtgcccatggaggtgaacttcaacttcgacgaccccaacctgatcatcctgcctctggcctttggcaagagacagggcagagaattcatctggaacgacctgctgtccctggaaaccggcagcctgaagctggccaacggaagagtgatcgagaagacactgtacaacagaagaacccggcaggatgagcctgccctgttcgtggccctgaccttcgagcggcgggaggtcctggactcctccaatatcaaaccaatgaacctgatcggcgtggcaagaggcgaaaacatccccgccgtgatcgccctgaccgaccccgagggctgcccactgagccggtttaaggatagcctgggaaacccaacccacatcctgagaatcggcgagagctataaggagaagcagcggaccatccaggccaagaaggaggtggagcagcggagagccggcggctacagccggaagtacgccagcaaagccaagaatctggcagacgatatggtgagaaacaccgctagagatctgctgtactacgccgtgacccaggatgccatgctgatcttcgccaacctgagccggggcttcggccggcagggcaagcggaccttcatggccgagagacagtacacacggatggaggactggctgaccgccaagctggcctacgagggcctgagcaagacctacctgtccaagacactggcccagtacacctccaagacatgcagcaactgtgggtttaccatcaccagcgccgactacgacagggtgctggagaagctgaagaagacagcaacaggctggatgaccacaattaacggcaaggagctgaaggtggagggccagattacctactacaacagatacaagagacagaacgtagtcaaggacctgtccgtcgagctggatagactgagcgaagaatctgtgaacaacgacatctcctcctggacaaagggcagaagcggagaagctctgagcctcctgaagaaaagattctcccatagacccgtgcaggagaagttcgtgtgcctgaactgcggcttcgagacacacgcagccgagcaagccgccctgaacatcgccagatcctggctgttcctgcggagccaggagtacaagaaataccagacaaacaagacaaccggcaacaccgataagagagccttcgtcgagacctggcagtccttttaccggaagaagcttaaggaggtgtggaaacctgccgtgcggtctggcggatctggcggaggctccacaagcgaggaggtgcccgtggtgttcgaggacgtggccgtgtacttcaccagggacgagtggggcaccctggacaagaggcagaaggagctgtacagggacgtgatgcagatgaactacgagctgctggccagcctgggccccgccgccgccaagcccgacctgatcagcaagctggagcagagggccgccccctggatcaaggacccccacggccccacctggggcaagggcaggccccccggcaagaccagccccaagaaaaagagaaaagtctaagctgccttctgcggggcttgccttctggccatgcccttcttctctcccttgcacctgtacctcttggtctttgaataaagcctgagtaggaaggctagcaaaaaaaaaaaaaaaaaaaaaaaaaaaaaaaaaaaaaaaaaaaaaaaaaaaaaaaaaaaaaaaaaaaaaaaaaaaaaaaa

SEQ ID NO: 6347 - RNA, 5797 nt, synthetic construct
  source 1..5797: mol_type = other RNA
aggaaataagagagaaaagaagagtaagaagaaatataagagccaccatggcccctaagaagaagcgtaaagtgagccggatggaacgcctcgtctacgaggtgcggcagaagtgcagaaacatcgaggacatctgcatctcctgcggatctctgaacgtgaccctggagcacccactgttcatcggcggcatgtgccagaactgtaaaaactgttttctggagtgtgcctatcaatacgacgatgacggctaccagagctactgcaccatctgttgcggcggaagagaggtgctgatgtgtggaaataacaactgctgccggtgcttctgcgtggaatgcgtggacctgctggtgggccccggcgccgcccaggccgctattaaggaagatccttggaactgctacatgtgcggccacaagggcacatacggcctgctgagacggagagaggactggcctagcagactgcagatgttcttcgccaataaccacgaccaggagttcgacccccctaaggtgtaccctcccgtccccgccgagaagagaaagcccatccgggtcctgagcctgttcgatggcatcgccaccggtctgctggtgctgaaggacctgggcatccaggtggataggtacattgcctccgaggtgtgcgaggactccatcaccgtgggaatggtgcgtcatcagggcaagatcatgtacgtgggcgacgtgcggagcgtgacacagaagcatatccaggagtggggccctttcgacctggtgatcggcggcagcccttgcaatgacctgagcatcgtgaacccagcccggaagggcctgtacgagggaaccggcagactgttcttcgagttttacagactgctgcacgacgcccggcctaaggaaggcgacgaccggcccttcttttggctgttcgagaatgtggtggccatgggagtcagcgacaagcgggatattagccggttcctggagagcaaccccgtgatgatcgatgccaaggaagtgagcgccgcccaccgggccagatacttctggggcaatctgcctggcatgaacagacccctggccagcaccgtgaacgacaagctggagctgcaggagtgcctggagcacggccggatcgccaagttcagcaaggtgagaaccatcaccacccgaagcaacagcatcaaacaaggcaaggaccagcactttcctgtgttcatgaacgagaaggaggacatcctgtggtgtaccgagatggagagagtgttcgggttcccagtccactacacagatgtcagcaacatgtctagactggccagacagagactgctgggaagaagctggtccgtccctgtgatcagacacctgttcgcccctctgaaggagtacttcgcctgcgtgagcagcggcaacagcaacgccaacagccggggccccagcttctctagcggcctggtgccactgtccctgagagggagccacatgggccccatggagatctacaaaaccgtgagcgcctggaagcggcagcctgtgcgcgtgctgagcctgtttcggaatatcgataaagtcctgaaaagcctgggattcctggagagcggctctggctccggcggtggcaccctgaagtacgtggaggatgtgacaaacgtggtcagacgggatgtggagaagtggggccccttcgatctggtgtacggcagcacccaacccctgggcagctcttgtgaccggtgccctggctggtacatgtttcagttccaccggatcctgcagtacgccctgccgagacaggagtcccagcggccattcttttggattttcatggacaacttgctgctgaccgaggatgaccaggaaactaccactcggttcctgcagaccgaagccgtgaccctgcaggacgtgagaggccgggactaccagaacgccatgcgggtgtggtccaacatccctggactgaaaagcaagcacgcacctctgacccctaaagaagaggagtacctgcaggcccaggtgcggagcagaagcaagctggacgcccctaaggtggatctgctggtgaagaattgcctcctgcccctgagagagtacttcaagtatttcagccagaatagtctgcccctgggcggcccaagcagcggcgcccctcctcccagcggcggcagcccagccggctccccaacctctaccgaggagggcacctctgagtccgccacccccgagagcggccctggcacctccaccgagcccagcgagggcagcgcacccggcagccctgccggcagccccacctccacagaggagggaaccagcaccgagcccagcgaaggcagcgccccaggcaccagcaccgagcctagtgagggcggctctggcggcggcagcgcccaggagattaaacggatcaacaagatcagaagaagacttgtgaaagacagcaacaccaagaaggccggcaagacaggccccatgaaaaccctgctggttagagtgatgacacccgatctgagagagcggctggaaaacctgagaaagaagcctgaaaatatcccccagcccatcagcaatacatctagagccaacctgaataagctgctgaccgattacaccgaaatgaagaaggcgatcctgcatgtgtactgggaagagttccagaaggaccctgtgggcctgatgagccgggtggcccagcctgccagcaagaagatcgatcagaacaagctgaaacctgagatggacgagaagggcaacctgaccaccgccggctttgcctgctctcagtgtggccagcccctgttcgtgtacaagctggagcaggtgtctgagaagggcaaggcttacaccaactacttcggacggtgcaatgtggccgagcacgaaaagctgatcctgctggcccagctgaagcccgagaaggatagcgacgaagccgtgacatatagcctgggaaagtttgggcagagggccctggatttctacagcattcatgtgaccaaggagtccacccaccccgtgaagcccctggcccagatcgccggaaacagatacgcctccggacctgtgggaaaggccctgagcgacgcatgtatgggcacaatcgcctccttcctgtctaagtaccaggacatcatcatcgaacaccagaaggtggtgaagggcaaccagaagagactggagagcctgcgggagctggccggcaaggaaaacctggaataccctagcgtgaccctgccacctcagcctcacaccaaggagggcgttgatgcctacaacgaagtgatcgcccgggtgcgaatgtgggtgaacctgaacctgtggcagaagctgaagctaagcagagatgatgccaagcctctgctgagactgaagggattcccttcctttcctctggtcgagagacaggccaacgaagtggactggtgggacatggtgtgtaacgtgaagaagctgatcaacgagaaaaaggaggatggcaaggtgttttggcagaatctggctggctacaagagacaggaagccctgagaccatacctgagcagcgaggaagatcggaagaagggaaagaaattcgctcggtaccagctgggcgacctgctgctgcacctggaaaagaagcacggcgaggactggggaaaggtgtacgacgaggcctgggagcggattgacaagaaagtggaaggcctgagcaagcacatcaagctggaagaggaacggagaagcgaggacgcccagagcaaggccgccctgaccgactggctgcgggctaaggccagcttcgtgatcgagggcctgaaggaggccgacaaggacgagttctgcagatgcgagctgaagctgcagaagtggtacggggacctgcggggaaagcccttcgccatcgaagccgagaacagcatcctggacatcagcggcttcagcaagcagtacaactgtgccttcatctggcagaaggacggcgtgaagaagctgaacctgtacctgatcatcaactacttcaagggcggcaagctgcggttcaagaagatcaaacctgaagccttcgaagccaacagattctacaccgtgatcaacaaaaagagcggcgagatcgtgcccatggaggtgaacttcaacttcgacgaccccaacctgatcatcctgcctctggcctttggcaagagacagggcagagaattcatctggaacgacctgctgtccctggaaaccggcagcctgaagctggccaacggaagagtgatcgagaagacactgtacaacagaagaacccggcaggatgagcctgccctgttcgtggccctgaccttcgagcggcgggaggtcctggactcctccaatatcaaaccaatgaacctgatcggcgtggcaagaggcgaaaacatccccgccgtgatcgccctgaccgaccccgagggctgcccactgagccggtttaaggatagcctgggaaacccaacccacatcctgagaatcggcgagagctataaggagaagcagcggaccatccaggccaagaaggaggtggagcagcggagagccggcggctacagccggaagtacgccagcaaagccaagaatctggcagacgatatggtgagaaacaccgctagagatctgctgtactacgccgtgacccaggatgccatgctgatcttcgccaacctgagccggggcttcggccggcagggcaagcggaccttcatggccgagagacagtacacacggatggaggactggctgaccgccaagctggcctacgagggcctgagcaagacctacctgtccaagacactggcccagtacacctccaagacatgcagcaactgtgggtttaccatcaccagcgccgactacgacagggtgctggagaagctgaagaagacagcaacaggctggatgaccacaattaacggcaaggagctgaaggtggagggccagattacctactacaacagatacaagagacagaacgtagtcaaggacctgtccgtcgagctggatagactgagcgaagaatctgtgaacaacgacatctcctcctggacaaagggcagaagcggagaagctctgagcctcctgaagaaaagattctcccatagacccgtgcaggagaagttcgtgtgcctgaactgcggcttcgagacacacgcagccgagcaagccgccctgaacatcgccagatcctggctgttcctgcggagccaggagtacaagaaataccagacaaacaagacaaccggcaacaccgataagagagccttcgtcgagacctggcagtccttttaccggaagaagcttaaggaggtgtggaaacctgccgtgcggtctggcggatctggcggaggctccacaagcttcgaggagagcgtgaccttcgaggacgtggccgtgtacttcagcgagaacgagtggaccggcctggcccccgcccagagggtgctgtacagggacgtgatgctggagaactacggcgccgtggccagcctggccttccccttccccaagcccgccctgatcagccagctggagaggggcgaggccccctggtgcaaggccccccagggcgccctggacggcggcggccccaggggcatcagcaccagccccaagaaaaagagaaaagtctaagctgccttctgcggggcttgccttctggccatgcccttcttctctcccttgcacctgtacctcttggtctttgaataaagcctgagtaggaaggctagcaaaaaaaaaaaaaaaaaaaaaaaaaaaaaaaaaaaaaaaaaaaaaaaaaaaaaaaaaaaaaaaaaaaaaaaaaaaaaaaa

SEQ ID NO: 6348 - RNA, 5797 nt, synthetic construct
  source 1..5797: mol_type = other RNA
aggaaataagagagaaaagaagagtaagaagaaatataagagccaccatggcccctaagaagaagcgtaaagtgagccggatggaacgcctcgtctacgaggtgcggcagaagtgcagaaacatcgaggacatctgcatctcctgcggatctctgaacgtgaccctggagcacccactgttcatcggcggcatgtgccagaactgtaaaaactgttttctggagtgtgcctatcaatacgacgatgacggctaccagagctactgcaccatctgttgcggcggaagagaggtgctgatgtgtggaaataacaactgctgccggtgcttctgcgtggaatgcgtggacctgctggtgggccccggcgccgcccaggccgctattaaggaagatccttggaactgctacatgtgcggccacaagggcacatacggcctgctgagacggagagaggactggcctagcagactgcagatgttcttcgccaataaccacgaccaggagttcgacccccctaaggtgtaccctcccgtccccgccgagaagagaaagcccatccgggtcctgagcctgttcgatggcatcgccaccggtctgctggtgctgaaggacctgggcatccaggtggataggtacattgcctccgaggtgtgcgaggactccatcaccgtgggaatggtgcgtcatcagggcaagatcatgtacgtgggcgacgtgcggagcgtgacacagaagcatatccaggagtggggccctttcgacctggtgatcggcggcagcccttgcaatgacctgagcatcgtgaacccagcccggaagggcctgtacgagggaaccggcagactgttcttcgagttttacagactgctgcacgacgcccggcctaaggaaggcgacgaccggcccttcttttggctgttcgagaatgtggtggccatgggagtcagcgacaagcgggatattagccggttcctggagagcaaccccgtgatgatcgatgccaaggaagtgagcgccgcccaccgggccagatacttctggggcaatctgcctggcatgaacagacccctggccagcaccgtgaacgacaagctggagctgcaggagtgcctggagcacggccggatcgccaagttcagcaaggtgagaaccatcaccacccgaagcaacagcatcaaacaaggcaaggaccagcactttcctgtgttcatgaacgagaaggaggacatcctgtggtgtaccgagatggagagagtgttcgggttcccagtccactacacagatgtcagcaacatgtctagactggccagacagagactgctgggaagaagctggtccgtccctgtgatcagacacctgttcgcccctctgaaggagtacttcgcctgcgtgagcagcggcaacagcaacgccaacagccggggccccagcttctctagcggcctggtgccactgtccctgagagggagccacatgggccccatggagatctacaaaaccgtgagcgcctggaagcggcagcctgtgcgcgtgctgagcctgtttcggaatatcgataaagtcctgaaaagcctgggattcctggagagcggctctggctccggcggtggcaccctgaagtacgtggaggatgtgacaaacgtggtcagacgggatgtggagaagtggggccccttcgatctggtgtacggcagcacccaacccctgggcagctcttgtgaccggtgccctggctggtacatgtttcagttccaccggatcctgcagtacgccctgccgagacaggagtcccagcggccattcttttggattttcatggacaacttgctgctgaccgaggatgaccaggaaactaccactcggttcctgcagaccgaagccgtgaccctgcaggacgtgagaggccgggactaccagaacgccatgcgggtgtggtccaacatccctggactgaaaagcaagcacgcacctctgacccctaaagaagaggagtacctgcaggcccaggtgcggagcagaagcaagctggacgcccctaaggtggatctgctggtgaagaattgcctcctgcccctgagagagtacttcaagtatttcagccagaatagtctgcccctgggcggcccaagcagcggcgcccctcctcccagcggcggcagcccagccggctccccaacctctaccgaggagggcacctctgagtccgccacccccgagagcggccctggcacctccaccgagcccagcgagggcagcgcacccggcagccctgccggcagccccacctccacagaggagggaaccagcaccgagcccagcgaaggcagcgccccaggcaccagcaccgagcctagtgagggcggctctggcggcggcagcgcccaggagattaaacggatcaacaagatcagaagaagacttgtgaaagacagcaacaccaagaaggccggcaagacaggccccatgaaaaccctgctggttagagtgatgacacccgatctgagagagcggctggaaaacctgagaaagaagcctgaaaatatcccccagcccatcagcaatacatctagagccaacctgaataagctgctgaccgattacaccgaaatgaagaaggcgatcctgcatgtgtactgggaagagttccagaaggaccctgtgggcctgatgagccgggtggcccagcctgccagcaagaagatcgatcagaacaagctgaaacctgagatggacgagaagggcaacctgaccaccgccggctttgcctgctctcagtgtggccagcccctgttcgtgtacaagctggagcaggtgtctgagaagggcaaggcttacaccaactacttcggacggtgcaatgtggccgagcacgaaaagctgatcctgctggcccagctgaagcccgagaaggatagcgacgaagccgtgacatatagcctgggaaagtttgggcagagggccctggatttctacagcattcatgtgaccaaggagtccacccaccccgtgaagcccctggcccagatcgccggaaacagatacgcctccggacctgtgggaaaggccctgagcgacgcatgtatgggcacaatcgcctccttcctgtctaagtaccaggacatcatcatcgaacaccagaaggtggtgaagggcaaccagaagagactggagagcctgcgggagctggccggcaaggaaaacctggaataccctagcgtgaccctgccacctcagcctcacaccaaggagggcgttgatgcctacaacgaagtgatcgcccgggtgcgaatgtgggtgaacctgaacctgtggcagaagctgaagctaagcagagatgatgccaagcctctgctgagactgaagggattcccttcctttcctctggtcgagagacaggccaacgaagtggactggtgggacatggtgtgtaacgtgaagaagctgatcaacgagaaaaaggaggatggcaaggtgttttggcagaatctggctggctacaagagacaggaagccctgagaccatacctgagcagcgaggaagatcggaagaagggaaagaaattcgctcggtaccagctgggcgacctgctgctgcacctggaaaagaagcacggcgaggactggggaaaggtgtacgacgaggcctgggagcggattgacaagaaagtggaaggcctgagcaagcacatcaagctggaagaggaacggagaagcgaggacgcccagagcaaggccgccctgaccgactggctgcgggctaaggccagcttcgtgatcgagggcctgaaggaggccgacaaggacgagttctgcagatgcgagctgaagctgcagaagtggtacggggacctgcggggaaagcccttcgccatcgaagccgagaacagcatcctggacatcagcggcttcagcaagcagtacaactgtgccttcatctggcagaaggacggcgtgaagaagctgaacctgtacctgatcatcaactacttcaagggcggcaagctgcggttcaagaagatcaaacctgaagccttcgaagccaacagattctacaccgtgatcaacaaaaagagcggcgagatcgtgcccatggaggtgaacttcaacttcgacgaccccaacctgatcatcctgcctctggcctttggcaagagacagggcagagaattcatctggaacgacctgctgtccctggaaaccggcagcctgaagctggccaacggaagagtgatcgagaagacactgtacaacagaagaacccggcaggatgagcctgccctgttcgtggccctgaccttcgagcggcgggaggtcctggactcctccaatatcaaaccaatgaacctgatcggcgtggcaagaggcgaaaacatccccgccgtgatcgccctgaccgaccccgagggctgcccactgagccggtttaaggatagcctgggaaacccaacccacatcctgagaatcggcgagagctataaggagaagcagcggaccatccaggccaagaaggaggtggagcagcggagagccggcggctacagccggaagtacgccagcaaagccaagaatctggcagacgatatggtgagaaacaccgctagagatctgctgtactacgccgtgacccaggatgccatgctgatcttcgccaacctgagccggggcttcggccggcagggcaagcggaccttcatggccgagagacagtacacacggatggaggactggctgaccgccaagctggcctacgagggcctgagcaagacctacctgtccaagacactggcccagtacacctccaagacatgcagcaactgtgggtttaccatcaccagcgccgactacgacagggtgctggagaagctgaagaagacagcaacaggctggatgaccacaattaacggcaaggagctgaaggtggagggccagattacctactacaacagatacaagagacagaacgtagtcaaggacctgtccgtcgagctggatagactgagcgaagaatctgtgaacaacgacatctcctcctggacaaagggcagaagcggagaagctctgagcctcctgaagaaaagattctcccatagacccgtgcaggagaagttcgtgtgcctgaactgcggcttcgagacacacgcagccgagcaagccgccctgaacatcgccagatcctggctgttcctgcggagccaggagtacaagaaataccagacaaacaagacaaccggcaacaccgataagagagccttcgtcgagacctggcagtccttttaccggaagaagcttaaggaggtgtggaaacctgccgtgcggtctggcggatctggcggaggctccacaagccaggccgaggtgaccttcgaggacgtggccgtgctgttcagcagggaggagtggggcaggctgggccccacccagaggggcctgtacagggacgtgatgctggagacctacaggaacctggtgagcctgggcgccggcagggccggccccaagcccggcgtgatcacccagctggagaggggcgacgagccctgggtgctggacgcccagggcgccaagggcaagggcaggcccagggtgagcaccagccccaagaaaaagagaaaagtctaagctgccttctgcggggcttgccttctggccatgcccttcttctctcccttgcacctgtacctcttggtctttgaataaagcctgagtaggaaggctagcaaaaaaaaaaaaaaaaaaaaaaaaaaaaaaaaaaaaaaaaaaaaaaaaaaaaaaaaaaaaaaaaaaaaaaaaaaaaaaaa

SEQ ID NO: 6349 - RNA, 5797 nt, synthetic construct
  source 1..5797: mol_type = other RNA
aggaaataagagagaaaagaagagtaagaagaaatataagagccaccatggcccctaagaagaagcgtaaagtgagccggatggaacgcctcgtctacgaggtgcggcagaagtgcagaaacatcgaggacatctgcatctcctgcggatctctgaacgtgaccctggagcacccactgttcatcggcggcatgtgccagaactgtaaaaactgttttctggagtgtgcctatcaatacgacgatgacggctaccagagctactgcaccatctgttgcggcggaagagaggtgctgatgtgtggaaataacaactgctgccggtgcttctgcgtggaatgcgtggacctgctggtgggccccggcgccgcccaggccgctattaaggaagatccttggaactgctacatgtgcggccacaagggcacatacggcctgctgagacggagagaggactggcctagcagactgcagatgttcttcgccaataaccacgaccaggagttcgacccccctaaggtgtaccctcccgtccccgccgagaagagaaagcccatccgggtcctgagcctgttcgatggcatcgccaccggtctgctggtgctgaaggacctgggcatccaggtggataggtacattgcctccgaggtgtgcgaggactccatcaccgtgggaatggtgcgtcatcagggcaagatcatgtacgtgggcgacgtgcggagcgtgacacagaagcatatccaggagtggggccctttcgacctggtgatcggcggcagcccttgcaatgacctgagcatcgtgaacccagcccggaagggcctgtacgagggaaccggcagactgttcttcgagttttacagactgctgcacgacgcccggcctaaggaaggcgacgaccggcccttcttttggctgttcgagaatgtggtggccatgggagtcagcgacaagcgggatattagccggttcctggagagcaaccccgtgatgatcgatgccaaggaagtgagcgccgcccaccgggccagatacttctggggcaatctgcctggcatgaacagacccctggccagcaccgtgaacgacaagctggagctgcaggagtgcctggagcacggccggatcgccaagttcagcaaggtgagaaccatcaccacccgaagcaacagcatcaaacaaggcaaggaccagcactttcctgtgttcatgaacgagaaggaggacatcctgtggtgtaccgagatggagagagtgttcgggttcccagtccactacacagatgtcagcaacatgtctagactggccagacagagactgctgggaagaagctggtccgtccctgtgatcagacacctgttcgcccctctgaaggagtacttcgcctgcgtgagcagcggcaacagcaacgccaacagccggggccccagcttctctagcggcctggtgccactgtccctgagagggagccacatgggccccatggagatctacaaaaccgtgagcgcctggaagcggcagcctgtgcgcgtgctgagcctgtttcggaatatcgataaagtcctgaaaagcctgggattcctggagagcggctctggctccggcggtggcaccctgaagtacgtggaggatgtgacaaacgtggtcagacgggatgtggagaagtggggccccttcgatctggtgtacggcagcacccaacccctgggcagctcttgtgaccggtgccctggctggtacatgtttcagttccaccggatcctgcagtacgccctgccgagacaggagtcccagcggccattcttttggattttcatggacaacttgctgctgaccgaggatgaccaggaaactaccactcggttcctgcagaccgaagccgtgaccctgcaggacgtgagaggccgggactaccagaacgccatgcgggtgtggtccaacatccctggactgaaaagcaagcacgcacctctgacccctaaagaagaggagtacctgcaggcccaggtgcggagcagaagcaagctggacgcccctaaggtggatctgctggtgaagaattgcctcctgcccctgagagagtacttcaagtatttcagccagaatagtctgcccctgggcggcccaagcagcggcgcccctcctcccagcggcggcagcccagccggctccccaacctctaccgaggagggcacctctgagtccgccacccccgagagcggccctggcacctccaccgagcccagcgagggcagcgcacccggcagccctgccggcagccccacctccacagaggagggaaccagcaccgagcccagcgaaggcagcgccccaggcaccagcaccgagcctagtgagggcggctctggcggcggcagcgcccaggagattaaacggatcaacaagatcagaagaagacttgtgaaagacagcaacaccaagaaggccggcaagacaggccccatgaaaaccctgctggttagagtgatgacacccgatctgagagagcggctggaaaacctgagaaagaagcctgaaaatatcccccagcccatcagcaatacatctagagccaacctgaataagctgctgaccgattacaccgaaatgaagaaggcgatcctgcatgtgtactgggaagagttccagaaggaccctgtgggcctgatgagccgggtggcccagcctgccagcaagaagatcgatcagaacaagctgaaacctgagatggacgagaagggcaacctgaccaccgccggctttgcctgctctcagtgtggccagcccctgttcgtgtacaagctggagcaggtgtctgagaagggcaaggcttacaccaactacttcggacggtgcaatgtggccgagcacgaaaagctgatcctgctggcccagctgaagcccgagaaggatagcgacgaagccgtgacatatagcctgggaaagtttgggcagagggccctggatttctacagcattcatgtgaccaaggagtccacccaccccgtgaagcccctggcccagatcgccggaaacagatacgcctccggacctgtgggaaaggccctgagcgacgcatgtatgggcacaatcgcctccttcctgtctaagtaccaggacatcatcatcgaacaccagaaggtggtgaagggcaaccagaagagactggagagcctgcgggagctggccggcaaggaaaacctggaataccctagcgtgaccctgccacctcagcctcacaccaaggagggcgttgatgcctacaacgaagtgatcgcccgggtgcgaatgtgggtgaacctgaacctgtggcagaagctgaagctaagcagagatgatgccaagcctctgctgagactgaagggattcccttcctttcctctggtcgagagacaggccaacgaagtggactggtgggacatggtgtgtaacgtgaagaagctgatcaacgagaaaaaggaggatggcaaggtgttttggcagaatctggctggctacaagagacaggaagccctgagaccatacctgagcagcgaggaagatcggaagaagggaaagaaattcgctcggtaccagctgggcgacctgctgctgcacctggaaaagaagcacggcgaggactggggaaaggtgtacgacgaggcctgggagcggattgacaagaaagtggaaggcctgagcaagcacatcaagctggaagaggaacggagaagcgaggacgcccagagcaaggccgccctgaccgactggctgcgggctaaggccagcttcgtgatcgagggcctgaaggaggccgacaaggacgagttctgcagatgcgagctgaagctgcagaagtggtacggggacctgcggggaaagcccttcgccatcgaagccgagaacagcatcctggacatcagcggcttcagcaagcagtacaactgtgccttcatctggcagaaggacggcgtgaagaagctgaacctgtacctgatcatcaactacttcaagggcggcaagctgcggttcaagaagatcaaacctgaagccttcgaagccaacagattctacaccgtgatcaacaaaaagagcggcgagatcgtgcccatggaggtgaacttcaacttcgacgaccccaacctgatcatcctgcctctggcctttggcaagagacagggcagagaattcatctggaacgacctgctgtccctggaaaccggcagcctgaagctggccaacggaagagtgatcgagaagacactgtacaacagaagaacccggcaggatgagcctgccctgttcgtggccctgaccttcgagcggcgggaggtcctggactcctccaatatcaaaccaatgaacctgatcggcgtggcaagaggcgaaaacatccccgccgtgatcgccctgaccgaccccgagggctgcccactgagccggtttaaggatagcctgggaaacccaacccacatcctgagaatcggcgagagctataaggagaagcagcggaccatccaggccaagaaggaggtggagcagcggagagccggcggctacagccggaagtacgccagcaaagccaagaatctggcagacgatatggtgagaaacaccgctagagatctgctgtactacgccgtgacccaggatgccatgctgatcttcgccaacctgagccggggcttcggccggcagggcaagcggaccttcatggccgagagacagtacacacggatggaggactggctgaccgccaagctggcctacgagggcctgagcaagacctacctgtccaagacactggcccagtacacctccaagacatgcagcaactgtgggtttaccatcaccagcgccgactacgacagggtgctggagaagctgaagaagacagcaacaggctggatgaccacaattaacggcaaggagctgaaggtggagggccagattacctactacaacagatacaagagacagaacgtagtcaaggacctgtccgtcgagctggatagactgagcgaagaatctgtgaacaacgacatctcctcctggacaaagggcagaagcggagaagctctgagcctcctgaagaaaagattctcccatagacccgtgcaggagaagttcgtgtgcctgaactgcggcttcgagacacacgcagccgagcaagccgccctgaacatcgccagatcctggctgttcctgcggagccaggagtacaagaaataccagacaaacaagacaaccggcaacaccgataagagagccttcgtcgagacctggcagtccttttaccggaagaagcttaaggaggtgtggaaacctgccgtgcggtctggcggatctggcggaggctccacaagcatggccgccggccagagggaggccaggccccaggtgagcctgaccttcgaggacgtggccgtgctgttcaccagggacgagtggaggaagctggcccccagccagaggaacctgtacagggacgtgatgctggagaactacaggaacctggtgagcctgggcctgcccttcaccaagcccaaggtgatcagcctgctgcagcagggcgaggacccctgggaggtggagaaggacggcagcggcaccagccccaagaaaaagagaaaagtctaagctgccttctgcggggcttgccttctggccatgcccttcttctctcccttgcacctgtacctcttggtctttgaataaagcctgagtaggaaggctagcaaaaaaaaaaaaaaaaaaaaaaaaaaaaaaaaaaaaaaaaaaaaaaaaaaaaaaaaaaaaaaaaaaaaaaaaaaaaaaaa

SEQ ID NO: 6350 - RNA, 5797 nt, synthetic construct
  source 1..5797: mol_type = other RNA
aggaaataagagagaaaagaagagtaagaagaaatataagagccaccatggcccctaagaagaagcgtaaagtgagccggatggaacgcctcgtctacgaggtgcggcagaagtgcagaaacatcgaggacatctgcatctcctgcggatctctgaacgtgaccctggagcacccactgttcatcggcggcatgtgccagaactgtaaaaactgttttctggagtgtgcctatcaatacgacgatgacggctaccagagctactgcaccatctgttgcggcggaagagaggtgctgatgtgtggaaataacaactgctgccggtgcttctgcgtggaatgcgtggacctgctggtgggccccggcgccgcccaggccgctattaaggaagatccttggaactgctacatgtgcggccacaagggcacatacggcctgctgagacggagagaggactggcctagcagactgcagatgttcttcgccaataaccacgaccaggagttcgacccccctaaggtgtaccctcccgtccccgccgagaagagaaagcccatccgggtcctgagcctgttcgatggcatcgccaccggtctgctggtgctgaaggacctgggcatccaggtggataggtacattgcctccgaggtgtgcgaggactccatcaccgtgggaatggtgcgtcatcagggcaagatcatgtacgtgggcgacgtgcggagcgtgacacagaagcatatccaggagtggggccctttcgacctggtgatcggcggcagcccttgcaatgacctgagcatcgtgaacccagcccggaagggcctgtacgagggaaccggcagactgttcttcgagttttacagactgctgcacgacgcccggcctaaggaaggcgacgaccggcccttcttttggctgttcgagaatgtggtggccatgggagtcagcgacaagcgggatattagccggttcctggagagcaaccccgtgatgatcgatgccaaggaagtgagcgccgcccaccgggccagatacttctggggcaatctgcctggcatgaacagacccctggccagcaccgtgaacgacaagctggagctgcaggagtgcctggagcacggccggatcgccaagttcagcaaggtgagaaccatcaccacccgaagcaacagcatcaaacaaggcaaggaccagcactttcctgtgttcatgaacgagaaggaggacatcctgtggtgtaccgagatggagagagtgttcgggttcccagtccactacacagatgtcagcaacatgtctagactggccagacagagactgctgggaagaagctggtccgtccctgtgatcagacacctgttcgcccctctgaaggagtacttcgcctgcgtgagcagcggcaacagcaacgccaacagccggggccccagcttctctagcggcctggtgccactgtccctgagagggagccacatgggccccatggagatctacaaaaccgtgagcgcctggaagcggcagcctgtgcgcgtgctgagcctgtttcggaatatcgataaagtcctgaaaagcctgggattcctggagagcggctctggctccggcggtggcaccctgaagtacgtggaggatgtgacaaacgtggtcagacgggatgtggagaagtggggccccttcgatctggtgtacggcagcacccaacccctgggcagctcttgtgaccggtgccctggctggtacatgtttcagttccaccggatcctgcagtacgccctgccgagacaggagtcccagcggccattcttttggattttcatggacaacttgctgctgaccgaggatgaccaggaaactaccactcggttcctgcagaccgaagccgtgaccctgcaggacgtgagaggccgggactaccagaacgccatgcgggtgtggtccaacatccctggactgaaaagcaagcacgcacctctgacccctaaagaagaggagtacctgcaggcccaggtgcggagcagaagcaagctggacgcccctaaggtggatctgctggtgaagaattgcctcctgcccctgagagagtacttcaagtatttcagccagaatagtctgcccctgggcggcccaagcagcggcgcccctcctcccagcggcggcagcccagccggctccccaacctctaccgaggagggcacctctgagtccgccacccccgagagcggccctggcacctccaccgagcccagcgagggcagcgcacccggcagccctgccggcagccccacctccacagaggagggaaccagcaccgagcccagcgaaggcagcgccccaggcaccagcaccgagcctagtgagggcggctctggcggcggcagcgcccaggagattaaacggatcaacaagatcagaagaagacttgtgaaagacagcaacaccaagaaggccggcaagacaggccccatgaaaaccctgctggttagagtgatgacacccgatctgagagagcggctggaaaacctgagaaagaagcctgaaaatatcccccagcccatcagcaatacatctagagccaacctgaataagctgctgaccgattacaccgaaatgaagaaggcgatcctgcatgtgtactgggaagagttccagaaggaccctgtgggcctgatgagccgggtggcccagcctgccagcaagaagatcgatcagaacaagctgaaacctgagatggacgagaagggcaacctgaccaccgccggctttgcctgctctcagtgtggccagcccctgttcgtgtacaagctggagcaggtgtctgagaagggcaaggcttacaccaactacttcggacggtgcaatgtggccgagcacgaaaagctgatcctgctggcccagctgaagcccgagaaggatagcgacgaagccgtgacatatagcctgggaaagtttgggcagagggccctggatttctacagcattcatgtgaccaaggagtccacccaccccgtgaagcccctggcccagatcgccggaaacagatacgcctccggacctgtgggaaaggccctgagcgacgcatgtatgggcacaatcgcctccttcctgtctaagtaccaggacatcatcatcgaacaccagaaggtggtgaagggcaaccagaagagactggagagcctgcgggagctggccggcaaggaaaacctggaataccctagcgtgaccctgccacctcagcctcacaccaaggagggcgttgatgcctacaacgaagtgatcgcccgggtgcgaatgtgggtgaacctgaacctgtggcagaagctgaagctaagcagagatgatgccaagcctctgctgagactgaagggattcccttcctttcctctggtcgagagacaggccaacgaagtggactggtgggacatggtgtgtaacgtgaagaagctgatcaacgagaaaaaggaggatggcaaggtgttttggcagaatctggctggctacaagagacaggaagccctgagaccatacctgagcagcgaggaagatcggaagaagggaaagaaattcgctcggtaccagctgggcgacctgctgctgcacctggaaaagaagcacggcgaggactggggaaaggtgtacgacgaggcctgggagcggattgacaagaaagtggaaggcctgagcaagcacatcaagctggaagaggaacggagaagcgaggacgcccagagcaaggccgccctgaccgactggctgcgggctaaggccagcttcgtgatcgagggcctgaaggaggccgacaaggacgagttctgcagatgcgagctgaagctgcagaagtggtacggggacctgcggggaaagcccttcgccatcgaagccgagaacagcatcctggacatcagcggcttcagcaagcagtacaactgtgccttcatctggcagaaggacggcgtgaagaagctgaacctgtacctgatcatcaactacttcaagggcggcaagctgcggttcaagaagatcaaacctgaagccttcgaagccaacagattctacaccgtgatcaacaaaaagagcggcgagatcgtgcccatggaggtgaacttcaacttcgacgaccccaacctgatcatcctgcctctggcctttggcaagagacagggcagagaattcatctggaacgacctgctgtccctggaaaccggcagcctgaagctggccaacggaagagtgatcgagaagacactgtacaacagaagaacccggcaggatgagcctgccctgttcgtggccctgaccttcgagcggcgggaggtcctggactcctccaatatcaaaccaatgaacctgatcggcgtggcaagaggcgaaaacatccccgccgtgatcgccctgaccgaccccgagggctgcccactgagccggtttaaggatagcctgggaaacccaacccacatcctgagaatcggcgagagctataaggagaagcagcggaccatccaggccaagaaggaggtggagcagcggagagccggcggctacagccggaagtacgccagcaaagccaagaatctggcagacgatatggtgagaaacaccgctagagatctgctgtactacgccgtgacccaggatgccatgctgatcttcgccaacctgagccggggcttcggccggcagggcaagcggaccttcatggccgagagacagtacacacggatggaggactggctgaccgccaagctggcctacgagggcctgagcaagacctacctgtccaagacactggcccagtacacctccaagacatgcagcaactgtgggtttaccatcaccagcgccgactacgacagggtgctggagaagctgaagaagacagcaacaggctggatgaccacaattaacggcaaggagctgaaggtggagggccagattacctactacaacagatacaagagacagaacgtagtcaaggacctgtccgtcgagctggatagactgagcgaagaatctgtgaacaacgacatctcctcctggacaaagggcagaagcggagaagctctgagcctcctgaagaaaagattctcccatagacccgtgcaggagaagttcgtgtgcctgaactgcggcttcgagacacacgcagccgagcaagccgccctgaacatcgccagatcctggctgttcctgcggagccaggagtacaagaaataccagacaaacaagacaaccggcaacaccgataagagagccttcgtcgagacctggcagtccttttaccggaagaagcttaaggaggtgtggaaacctgccgtgcggtctggcggatctggcggaggctccacaagcatccagaggctgctgaccttcggcgacgtggccgtggccttcaccaggatcgagtggaggcacctggacgccgcccagagggccctgtacagggacgtgatgctggagaactacggcaacctggtgagcgtgggcctgctgagcagcaagcccaagctgatcgcccagctggagcagggcgccgagccctggatggaggccagggagacccccagcggcaccagggccgtgcccgactactggaccagccccaagaaaaagagaaaagtctaagctgccttctgcggggcttgccttctggccatgcccttcttctctcccttgcacctgtacctcttggtctttgaataaagcctgagtaggaaggctagcaaaaaaaaaaaaaaaaaaaaaaaaaaaaaaaaaaaaaaaaaaaaaaaaaaaaaaaaaaaaaaaaaaaaaaaaaaaaaaaa

SEQ ID NO: 6351 - RNA, 5797 nt, synthetic construct
  source 1..5797: mol_type = other RNA
aggaaataagagagaaaagaagagtaagaagaaatataagagccaccatggcccctaagaagaagcgtaaagtgagccggatggaacgcctcgtctacgaggtgcggcagaagtgcagaaacatcgaggacatctgcatctcctgcggatctctgaacgtgaccctggagcacccactgttcatcggcggcatgtgccagaactgtaaaaactgttttctggagtgtgcctatcaatacgacgatgacggctaccagagctactgcaccatctgttgcggcggaagagaggtgctgatgtgtggaaataacaactgctgccggtgcttctgcgtggaatgcgtggacctgctggtgggccccggcgccgcccaggccgctattaaggaagatccttggaactgctacatgtgcggccacaagggcacatacggcctgctgagacggagagaggactggcctagcagactgcagatgttcttcgccaataaccacgaccaggagttcgacccccctaaggtgtaccctcccgtccccgccgagaagagaaagcccatccgggtcctgagcctgttcgatggcatcgccaccggtctgctggtgctgaaggacctgggcatccaggtggataggtacattgcctccgaggtgtgcgaggactccatcaccgtgggaatggtgcgtcatcagggcaagatcatgtacgtgggcgacgtgcggagcgtgacacagaagcatatccaggagtggggccctttcgacctggtgatcggcggcagcccttgcaatgacctgagcatcgtgaacccagcccggaagggcctgtacgagggaaccggcagactgttcttcgagttttacagactgctgcacgacgcccggcctaaggaaggcgacgaccggcccttcttttggctgttcgagaatgtggtggccatgggagtcagcgacaagcgggatattagccggttcctggagagcaaccccgtgatgatcgatgccaaggaagtgagcgccgcccaccgggccagatacttctggggcaatctgcctggcatgaacagacccctggccagcaccgtgaacgacaagctggagctgcaggagtgcctggagcacggccggatcgccaagttcagcaaggtgagaaccatcaccacccgaagcaacagcatcaaacaaggcaaggaccagcactttcctgtgttcatgaacgagaaggaggacatcctgtggtgtaccgagatggagagagtgttcgggttcccagtccactacacagatgtcagcaacatgtctagactggccagacagagactgctgggaagaagctggtccgtccctgtgatcagacacctgttcgcccctctgaaggagtacttcgcctgcgtgagcagcggcaacagcaacgccaacagccggggccccagcttctctagcggcctggtgccactgtccctgagagggagccacatgggccccatggagatctacaaaaccgtgagcgcctggaagcggcagcctgtgcgcgtgctgagcctgtttcggaatatcgataaagtcctgaaaagcctgggattcctggagagcggctctggctccggcggtggcaccctgaagtacgtggaggatgtgacaaacgtggtcagacgggatgtggagaagtggggccccttcgatctggtgtacggcagcacccaacccctgggcagctcttgtgaccggtgccctggctggtacatgtttcagttccaccggatcctgcagtacgccctgccgagacaggagtcccagcggccattcttttggattttcatggacaacttgctgctgaccgaggatgaccaggaaactaccactcggttcctgcagaccgaagccgtgaccctgcaggacgtgagaggccgggactaccagaacgccatgcgggtgtggtccaacatccctggactgaaaagcaagcacgcacctctgacccctaaagaagaggagtacctgcaggcccaggtgcggagcagaagcaagctggacgcccctaaggtggatctgctggtgaagaattgcctcctgcccctgagagagtacttcaagtatttcagccagaatagtctgcccctgggcggcccaagcagcggcgcccctcctcccagcggcggcagcccagccggctccccaacctctaccgaggagggcacctctgagtccgccacccccgagagcggccctggcacctccaccgagcccagcgagggcagcgcacccggcagccctgccggcagccccacctccacagaggagggaaccagcaccgagcccagcgaaggcagcgccccaggcaccagcaccgagcctagtgagggcggctctggcggcggcagcgcccaggagattaaacggatcaacaagatcagaagaagacttgtgaaagacagcaacaccaagaaggccggcaagacaggccccatgaaaaccctgctggttagagtgatgacacccgatctgagagagcggctggaaaacctgagaaagaagcctgaaaatatcccccagcccatcagcaatacatctagagccaacctgaataagctgctgaccgattacaccgaaatgaagaaggcgatcctgcatgtgtactgggaagagttccagaaggaccctgtgggcctgatgagccgggtggcccagcctgccagcaagaagatcgatcagaacaagctgaaacctgagatggacgagaagggcaacctgaccaccgccggctttgcctgctctcagtgtggccagcccctgttcgtgtacaagctggagcaggtgtctgagaagggcaaggcttacaccaactacttcggacggtgcaatgtggccgagcacgaaaagctgatcctgctggcccagctgaagcccgagaaggatagcgacgaagccgtgacatatagcctgggaaagtttgggcagagggccctggatttctacagcattcatgtgaccaaggagtccacccaccccgtgaagcccctggcccagatcgccggaaacagatacgcctccggacctgtgggaaaggccctgagcgacgcatgtatgggcacaatcgcctccttcctgtctaagtaccaggacatcatcatcgaacaccagaaggtggtgaagggcaaccagaagagactggagagcctgcgggagctggccggcaaggaaaacctggaataccctagcgtgaccctgccacctcagcctcacaccaaggagggcgttgatgcctacaacgaagtgatcgcccgggtgcgaatgtgggtgaacctgaacctgtggcagaagctgaagctaagcagagatgatgccaagcctctgctgagactgaagggattcccttcctttcctctggtcgagagacaggccaacgaagtggactggtgggacatggtgtgtaacgtgaagaagctgatcaacgagaaaaaggaggatggcaaggtgttttggcagaatctggctggctacaagagacaggaagccctgagaccatacctgagcagcgaggaagatcggaagaagggaaagaaattcgctcggtaccagctgggcgacctgctgctgcacctggaaaagaagcacggcgaggactggggaaaggtgtacgacgaggcctgggagcggattgacaagaaagtggaaggcctgagcaagcacatcaagctggaagaggaacggagaagcgaggacgcccagagcaaggccgccctgaccgactggctgcgggctaaggccagcttcgtgatcgagggcctgaaggaggccgacaaggacgagttctgcagatgcgagctgaagctgcagaagtggtacggggacctgcggggaaagcccttcgccatcgaagccgagaacagcatcctggacatcagcggcttcagcaagcagtacaactgtgccttcatctggcagaaggacggcgtgaagaagctgaacctgtacctgatcatcaactacttcaagggcggcaagctgcggttcaagaagatcaaacctgaagccttcgaagccaacagattctacaccgtgatcaacaaaaagagcggcgagatcgtgcccatggaggtgaacttcaacttcgacgaccccaacctgatcatcctgcctctggcctttggcaagagacagggcagagaattcatctggaacgacctgctgtccctggaaaccggcagcctgaagctggccaacggaagagtgatcgagaagacactgtacaacagaagaacccggcaggatgagcctgccctgttcgtggccctgaccttcgagcggcgggaggtcctggactcctccaatatcaaaccaatgaacctgatcggcgtggcaagaggcgaaaacatccccgccgtgatcgccctgaccgaccccgagggctgcccactgagccggtttaaggatagcctgggaaacccaacccacatcctgagaatcggcgagagctataaggagaagcagcggaccatccaggccaagaaggaggtggagcagcggagagccggcggctacagccggaagtacgccagcaaagccaagaatctggcagacgatatggtgagaaacaccgctagagatctgctgtactacgccgtgacccaggatgccatgctgatcttcgccaacctgagccggggcttcggccggcagggcaagcggaccttcatggccgagagacagtacacacggatggaggactggctgaccgccaagctggcctacgagggcctgagcaagacctacctgtccaagacactggcccagtacacctccaagacatgcagcaactgtgggtttaccatcaccagcgccgactacgacagggtgctggagaagctgaagaagacagcaacaggctggatgaccacaattaacggcaaggagctgaaggtggagggccagattacctactacaacagatacaagagacagaacgtagtcaaggacctgtccgtcgagctggatagactgagcgaagaatctgtgaacaacgacatctcctcctggacaaagggcagaagcggagaagctctgagcctcctgaagaaaagattctcccatagacccgtgcaggagaagttcgtgtgcctgaactgcggcttcgagacacacgcagccgagcaagccgccctgaacatcgccagatcctggctgttcctgcggagccaggagtacaagaaataccagacaaacaagacaaccggcaacaccgataagagagccttcgtcgagacctggcagtccttttaccggaagaagcttaaggaggtgtggaaacctgccgtgcggtctggcggatctggcggaggctccacaagccaggtgcccgtgaccttcgaggacatcgccatctacttctgccaggaggagtgggaggtgctggaggagtggcagaaggacctgtacaaggacgtgatgaaggagaactaccaggccctgatcagcctgggcaccggcagcctgatcgtgagccccgacatcatcagcaggatcgagaggggcgaggacccctacatcagggacgagaggggcagcaagaagagggagaccgagaacagcagcaccagccccaagaaaaagagaaaagtctaagctgccttctgcggggcttgccttctggccatgcccttcttctctcccttgcacctgtacctcttggtctttgaataaagcctgagtaggaaggctagcaaaaaaaaaaaaaaaaaaaaaaaaaaaaaaaaaaaaaaaaaaaaaaaaaaaaaaaaaaaaaaaaaaaaaaaaaaaaaaaa

SEQ ID NO: 6352 - RNA, 5797 nt, synthetic construct
  source 1..5797: mol_type = other RNA
aggaaataagagagaaaagaagagtaagaagaaatataagagccaccatggcccctaagaagaagcgtaaagtgagccggatggaacgcctcgtctacgaggtgcggcagaagtgcagaaacatcgaggacatctgcatctcctgcggatctctgaacgtgaccctggagcacccactgttcatcggcggcatgtgccagaactgtaaaaactgttttctggagtgtgcctatcaatacgacgatgacggctaccagagctactgcaccatctgttgcggcggaagagaggtgctgatgtgtggaaataacaactgctgccggtgcttctgcgtggaatgcgtggacctgctggtgggccccggcgccgcccaggccgctattaaggaagatccttggaactgctacatgtgcggccacaagggcacatacggcctgctgagacggagagaggactggcctagcagactgcagatgttcttcgccaataaccacgaccaggagttcgacccccctaaggtgtaccctcccgtccccgccgagaagagaaagcccatccgggtcctgagcctgttcgatggcatcgccaccggtctgctggtgctgaaggacctgggcatccaggtggataggtacattgcctccgaggtgtgcgaggactccatcaccgtgggaatggtgcgtcatcagggcaagatcatgtacgtgggcgacgtgcggagcgtgacacagaagcatatccaggagtggggccctttcgacctggtgatcggcggcagcccttgcaatgacctgagcatcgtgaacccagcccggaagggcctgtacgagggaaccggcagactgttcttcgagttttacagactgctgcacgacgcccggcctaaggaaggcgacgaccggcccttcttttggctgttcgagaatgtggtggccatgggagtcagcgacaagcgggatattagccggttcctggagagcaaccccgtgatgatcgatgccaaggaagtgagcgccgcccaccgggccagatacttctggggcaatctgcctggcatgaacagacccctggccagcaccgtgaacgacaagctggagctgcaggagtgcctggagcacggccggatcgccaagttcagcaaggtgagaaccatcaccacccgaagcaacagcatcaaacaaggcaaggaccagcactttcctgtgttcatgaacgagaaggaggacatcctgtggtgtaccgagatggagagagtgttcgggttcccagtccactacacagatgtcagcaacatgtctagactggccagacagagactgctgggaagaagctggtccgtccctgtgatcagacacctgttcgcccctctgaaggagtacttcgcctgcgtgagcagcggcaacagcaacgccaacagccggggccccagcttctctagcggcctggtgccactgtccctgagagggagccacatgggccccatggagatctacaaaaccgtgagcgcctggaagcggcagcctgtgcgcgtgctgagcctgtttcggaatatcgataaagtcctgaaaagcctgggattcctggagagcggctctggctccggcggtggcaccctgaagtacgtggaggatgtgacaaacgtggtcagacgggatgtggagaagtggggccccttcgatctggtgtacggcagcacccaacccctgggcagctcttgtgaccggtgccctggctggtacatgtttcagttccaccggatcctgcagtacgccctgccgagacaggagtcccagcggccattcttttggattttcatggacaacttgctgctgaccgaggatgaccaggaaactaccactcggttcctgcagaccgaagccgtgaccctgcaggacgtgagaggccgggactaccagaacgccatgcgggtgtggtccaacatccctggactgaaaagcaagcacgcacctctgacccctaaagaagaggagtacctgcaggcccaggtgcggagcagaagcaagctggacgcccctaaggtggatctgctggtgaagaattgcctcctgcccctgagagagtacttcaagtatttcagccagaatagtctgcccctgggcggcccaagcagcggcgcccctcctcccagcggcggcagcccagccggctccccaacctctaccgaggagggcacctctgagtccgccacccccgagagcggccctggcacctccaccgagcccagcgagggcagcgcacccggcagccctgccggcagccccacctccacagaggagggaaccagcaccgagcccagcgaaggcagcgccccaggcaccagcaccgagcctagtgagggcggctctggcggcggcagcgcccaggagattaaacggatcaacaagatcagaagaagacttgtgaaagacagcaacaccaagaaggccggcaagacaggccccatgaaaaccctgctggttagagtgatgacacccgatctgagagagcggctggaaaacctgagaaagaagcctgaaaatatcccccagcccatcagcaatacatctagagccaacctgaataagctgctgaccgattacaccgaaatgaagaaggcgatcctgcatgtgtactgggaagagttccagaaggaccctgtgggcctgatgagccgggtggcccagcctgccagcaagaagatcgatcagaacaagctgaaacctgagatggacgagaagggcaacctgaccaccgccggctttgcctgctctcagtgtggccagcccctgttcgtgtacaagctggagcaggtgtctgagaagggcaaggcttacaccaactacttcggacggtgcaatgtggccgagcacgaaaagctgatcctgctggcccagctgaagcccgagaaggatagcgacgaagccgtgacatatagcctgggaaagtttgggcagagggccctggatttctacagcattcatgtgaccaaggagtccacccaccccgtgaagcccctggcccagatcgccggaaacagatacgcctccggacctgtgggaaaggccctgagcgacgcatgtatgggcacaatcgcctccttcctgtctaagtaccaggacatcatcatcgaacaccagaaggtggtgaagggcaaccagaagagactggagagcctgcgggagctggccggcaaggaaaacctggaataccctagcgtgaccctgccacctcagcctcacaccaaggagggcgttgatgcctacaacgaagtgatcgcccgggtgcgaatgtgggtgaacctgaacctgtggcagaagctgaagctaagcagagatgatgccaagcctctgctgagactgaagggattcccttcctttcctctggtcgagagacaggccaacgaagtggactggtgggacatggtgtgtaacgtgaagaagctgatcaacgagaaaaaggaggatggcaaggtgttttggcagaatctggctggctacaagagacaggaagccctgagaccatacctgagcagcgaggaagatcggaagaagggaaagaaattcgctcggtaccagctgggcgacctgctgctgcacctggaaaagaagcacggcgaggactggggaaaggtgtacgacgaggcctgggagcggattgacaagaaagtggaaggcctgagcaagcacatcaagctggaagaggaacggagaagcgaggacgcccagagcaaggccgccctgaccgactggctgcgggctaaggccagcttcgtgatcgagggcctgaaggaggccgacaaggacgagttctgcagatgcgagctgaagctgcagaagtggtacggggacctgcggggaaagcccttcgccatcgaagccgagaacagcatcctggacatcagcggcttcagcaagcagtacaactgtgccttcatctggcagaaggacggcgtgaagaagctgaacctgtacctgatcatcaactacttcaagggcggcaagctgcggttcaagaagatcaaacctgaagccttcgaagccaacagattctacaccgtgatcaacaaaaagagcggcgagatcgtgcccatggaggtgaacttcaacttcgacgaccccaacctgatcatcctgcctctggcctttggcaagagacagggcagagaattcatctggaacgacctgctgtccctggaaaccggcagcctgaagctggccaacggaagagtgatcgagaagacactgtacaacagaagaacccggcaggatgagcctgccctgttcgtggccctgaccttcgagcggcgggaggtcctggactcctccaatatcaaaccaatgaacctgatcggcgtggcaagaggcgaaaacatccccgccgtgatcgccctgaccgaccccgagggctgcccactgagccggtttaaggatagcctgggaaacccaacccacatcctgagaatcggcgagagctataaggagaagcagcggaccatccaggccaagaaggaggtggagcagcggagagccggcggctacagccggaagtacgccagcaaagccaagaatctggcagacgatatggtgagaaacaccgctagagatctgctgtactacgccgtgacccaggatgccatgctgatcttcgccaacctgagccggggcttcggccggcagggcaagcggaccttcatggccgagagacagtacacacggatggaggactggctgaccgccaagctggcctacgagggcctgagcaagacctacctgtccaagacactggcccagtacacctccaagacatgcagcaactgtgggtttaccatcaccagcgccgactacgacagggtgctggagaagctgaagaagacagcaacaggctggatgaccacaattaacggcaaggagctgaaggtggagggccagattacctactacaacagatacaagagacagaacgtagtcaaggacctgtccgtcgagctggatagactgagcgaagaatctgtgaacaacgacatctcctcctggacaaagggcagaagcggagaagctctgagcctcctgaagaaaagattctcccatagacccgtgcaggagaagttcgtgtgcctgaactgcggcttcgagacacacgcagccgagcaagccgccctgaacatcgccagatcctggctgttcctgcggagccaggagtacaagaaataccagacaaacaagacaaccggcaacaccgataagagagccttcgtcgagacctggcagtccttttaccggaagaagcttaaggaggtgtggaaacctgccgtgcggtctggcggatctggcggaggctccacaagcatgatcaactaccagacccccgtgagcttcagggacgtggtggtgggcttcacccaggaggagtggcacaggctgaaccccacccagagggccctgtacagggacgtgatgctggagacctacagcaacctggtgagcgtgggctacgagggcaccaagcccgacgtgatcctgaggctggagcaggaggaggccccctggatcggcgaggccgcctgcctgggctgccactgctgggaggacaccagccccaagaaaaagagaaaagtctaagctgccttctgcggggcttgccttctggccatgcccttcttctctcccttgcacctgtacctcttggtctttgaataaagcctgagtaggaaggctagcaaaaaaaaaaaaaaaaaaaaaaaaaaaaaaaaaaaaaaaaaaaaaaaaaaaaaaaaaaaaaaaaaaaaaaaaaaaaaaaa

SEQ ID NO: 6353 - RNA, 5797 nt, synthetic construct
  source 1..5797: mol_type = other RNA
aggaaataagagagaaaagaagagtaagaagaaatataagagccaccatggcccctaagaagaagcgtaaagtgagccggatggaacgcctcgtctacgaggtgcggcagaagtgcagaaacatcgaggacatctgcatctcctgcggatctctgaacgtgaccctggagcacccactgttcatcggcggcatgtgccagaactgtaaaaactgttttctggagtgtgcctatcaatacgacgatgacggctaccagagctactgcaccatctgttgcggcggaagagaggtgctgatgtgtggaaataacaactgctgccggtgcttctgcgtggaatgcgtggacctgctggtgggccccggcgccgcccaggccgctattaaggaagatccttggaactgctacatgtgcggccacaagggcacatacggcctgctgagacggagagaggactggcctagcagactgcagatgttcttcgccaataaccacgaccaggagttcgacccccctaaggtgtaccctcccgtccccgccgagaagagaaagcccatccgggtcctgagcctgttcgatggcatcgccaccggtctgctggtgctgaaggacctgggcatccaggtggataggtacattgcctccgaggtgtgcgaggactccatcaccgtgggaatggtgcgtcatcagggcaagatcatgtacgtgggcgacgtgcggagcgtgacacagaagcatatccaggagtggggccctttcgacctggtgatcggcggcagcccttgcaatgacctgagcatcgtgaacccagcccggaagggcctgtacgagggaaccggcagactgttcttcgagttttacagactgctgcacgacgcccggcctaaggaaggcgacgaccggcccttcttttggctgttcgagaatgtggtggccatgggagtcagcgacaagcgggatattagccggttcctggagagcaaccccgtgatgatcgatgccaaggaagtgagcgccgcccaccgggccagatacttctggggcaatctgcctggcatgaacagacccctggccagcaccgtgaacgacaagctggagctgcaggagtgcctggagcacggccggatcgccaagttcagcaaggtgagaaccatcaccacccgaagcaacagcatcaaacaaggcaaggaccagcactttcctgtgttcatgaacgagaaggaggacatcctgtggtgtaccgagatggagagagtgttcgggttcccagtccactacacagatgtcagcaacatgtctagactggccagacagagactgctgggaagaagctggtccgtccctgtgatcagacacctgttcgcccctctgaaggagtacttcgcctgcgtgagcagcggcaacagcaacgccaacagccggggccccagcttctctagcggcctggtgccactgtccctgagagggagccacatgggccccatggagatctacaaaaccgtgagcgcctggaagcggcagcctgtgcgcgtgctgagcctgtttcggaatatcgataaagtcctgaaaagcctgggattcctggagagcggctctggctccggcggtggcaccctgaagtacgtggaggatgtgacaaacgtggtcagacgggatgtggagaagtggggccccttcgatctggtgtacggcagcacccaacccctgggcagctcttgtgaccggtgccctggctggtacatgtttcagttccaccggatcctgcagtacgccctgccgagacaggagtcccagcggccattcttttggattttcatggacaacttgctgctgaccgaggatgaccaggaaactaccactcggttcctgcagaccgaagccgtgaccctgcaggacgtgagaggccgggactaccagaacgccatgcgggtgtggtccaacatccctggactgaaaagcaagcacgcacctctgacccctaaagaagaggagtacctgcaggcccaggtgcggagcagaagcaagctggacgcccctaaggtggatctgctggtgaagaattgcctcctgcccctgagagagtacttcaagtatttcagccagaatagtctgcccctgggcggcccaagcagcggcgcccctcctcccagcggcggcagcccagccggctccccaacctctaccgaggagggcacctctgagtccgccacccccgagagcggccctggcacctccaccgagcccagcgagggcagcgcacccggcagccctgccggcagccccacctccacagaggagggaaccagcaccgagcccagcgaaggcagcgccccaggcaccagcaccgagcctagtgagggcggctctggcggcggcagcgcccaggagattaaacggatcaacaagatcagaagaagacttgtgaaagacagcaacaccaagaaggccggcaagacaggccccatgaaaaccctgctggttagagtgatgacacccgatctgagagagcggctggaaaacctgagaaagaagcctgaaaatatcccccagcccatcagcaatacatctagagccaacctgaataagctgctgaccgattacaccgaaatgaagaaggcgatcctgcatgtgtactgggaagagttccagaaggaccctgtgggcctgatgagccgggtggcccagcctgccagcaagaagatcgatcagaacaagctgaaacctgagatggacgagaagggcaacctgaccaccgccggctttgcctgctctcagtgtggccagcccctgttcgtgtacaagctggagcaggtgtctgagaagggcaaggcttacaccaactacttcggacggtgcaatgtggccgagcacgaaaagctgatcctgctggcccagctgaagcccgagaaggatagcgacgaagccgtgacatatagcctgggaaagtttgggcagagggccctggatttctacagcattcatgtgaccaaggagtccacccaccccgtgaagcccctggcccagatcgccggaaacagatacgcctccggacctgtgggaaaggccctgagcgacgcatgtatgggcacaatcgcctccttcctgtctaagtaccaggacatcatcatcgaacaccagaaggtggtgaagggcaaccagaagagactggagagcctgcgggagctggccggcaaggaaaacctggaataccctagcgtgaccctgccacctcagcctcacaccaaggagggcgttgatgcctacaacgaagtgatcgcccgggtgcgaatgtgggtgaacctgaacctgtggcagaagctgaagctaagcagagatgatgccaagcctctgctgagactgaagggattcccttcctttcctctggtcgagagacaggccaacgaagtggactggtgggacatggtgtgtaacgtgaagaagctgatcaacgagaaaaaggaggatggcaaggtgttttggcagaatctggctggctacaagagacaggaagccctgagaccatacctgagcagcgaggaagatcggaagaagggaaagaaattcgctcggtaccagctgggcgacctgctgctgcacctggaaaagaagcacggcgaggactggggaaaggtgtacgacgaggcctgggagcggattgacaagaaagtggaaggcctgagcaagcacatcaagctggaagaggaacggagaagcgaggacgcccagagcaaggccgccctgaccgactggctgcgggctaaggccagcttcgtgatcgagggcctgaaggaggccgacaaggacgagttctgcagatgcgagctgaagctgcagaagtggtacggggacctgcggggaaagcccttcgccatcgaagccgagaacagcatcctggacatcagcggcttcagcaagcagtacaactgtgccttcatctggcagaaggacggcgtgaagaagctgaacctgtacctgatcatcaactacttcaagggcggcaagctgcggttcaagaagatcaaacctgaagccttcgaagccaacagattctacaccgtgatcaacaaaaagagcggcgagatcgtgcccatggaggtgaacttcaacttcgacgaccccaacctgatcatcctgcctctggcctttggcaagagacagggcagagaattcatctggaacgacctgctgtccctggaaaccggcagcctgaagctggccaacggaagagtgatcgagaagacactgtacaacagaagaacccggcaggatgagcctgccctgttcgtggccctgaccttcgagcggcgggaggtcctggactcctccaatatcaaaccaatgaacctgatcggcgtggcaagaggcgaaaacatccccgccgtgatcgccctgaccgaccccgagggctgcccactgagccggtttaaggatagcctgggaaacccaacccacatcctgagaatcggcgagagctataaggagaagcagcggaccatccaggccaagaaggaggtggagcagcggagagccggcggctacagccggaagtacgccagcaaagccaagaatctggcagacgatatggtgagaaacaccgctagagatctgctgtactacgccgtgacccaggatgccatgctgatcttcgccaacctgagccggggcttcggccggcagggcaagcggaccttcatggccgagagacagtacacacggatggaggactggctgaccgccaagctggcctacgagggcctgagcaagacctacctgtccaagacactggcccagtacacctccaagacatgcagcaactgtgggtttaccatcaccagcgccgactacgacagggtgctggagaagctgaagaagacagcaacaggctggatgaccacaattaacggcaaggagctgaaggtggagggccagattacctactacaacagatacaagagacagaacgtagtcaaggacctgtccgtcgagctggatagactgagcgaagaatctgtgaacaacgacatctcctcctggacaaagggcagaagcggagaagctctgagcctcctgaagaaaagattctcccatagacccgtgcaggagaagttcgtgtgcctgaactgcggcttcgagacacacgcagccgagcaagccgccctgaacatcgccagatcctggctgttcctgcggagccaggagtacaagaaataccagacaaacaagacaaccggcaacaccgataagagagccttcgtcgagacctggcagtccttttaccggaagaagcttaaggaggtgtggaaacctgccgtgcggtctggcggatctggcggaggctccacaagcaagagcgccgccgtgagcttcagcgacgtggccgtgtacttcagcctggaggagtggggctgcctgaggcccgcccagagggccctgtacagggacgtgatgagggagacctacggccacctgggcgccctgggcttccccggccccaagcccgccctgatcagctggatggagcaggagagcgaggcctggagccccgccgcccaggaccccgaggagggcgagagcctgggcggcgccctgaccagccccaagaaaaagagaaaagtctaagctgccttctgcggggcttgccttctggccatgcccttcttctctcccttgcacctgtacctcttggtctttgaataaagcctgagtaggaaggctagcaaaaaaaaaaaaaaaaaaaaaaaaaaaaaaaaaaaaaaaaaaaaaaaaaaaaaaaaaaaaaaaaaaaaaaaaaaaaaaaa

SEQ ID NO: 6354 - RNA, 5797 nt, synthetic construct
  source 1..5797: mol_type = other RNA
aggaaataagagagaaaagaagagtaagaagaaatataagagccaccatggcccctaagaagaagcgtaaagtgagccggatggaacgcctcgtctacgaggtgcggcagaagtgcagaaacatcgaggacatctgcatctcctgcggatctctgaacgtgaccctggagcacccactgttcatcggcggcatgtgccagaactgtaaaaactgttttctggagtgtgcctatcaatacgacgatgacggctaccagagctactgcaccatctgttgcggcggaagagaggtgctgatgtgtggaaataacaactgctgccggtgcttctgcgtggaatgcgtggacctgctggtgggccccggcgccgcccaggccgctattaaggaagatccttggaactgctacatgtgcggccacaagggcacatacggcctgctgagacggagagaggactggcctagcagactgcagatgttcttcgccaataaccacgaccaggagttcgacccccctaaggtgtaccctcccgtccccgccgagaagagaaagcccatccgggtcctgagcctgttcgatggcatcgccaccggtctgctggtgctgaaggacctgggcatccaggtggataggtacattgcctccgaggtgtgcgaggactccatcaccgtgggaatggtgcgtcatcagggcaagatcatgtacgtgggcgacgtgcggagcgtgacacagaagcatatccaggagtggggccctttcgacctggtgatcggcggcagcccttgcaatgacctgagcatcgtgaacccagcccggaagggcctgtacgagggaaccggcagactgttcttcgagttttacagactgctgcacgacgcccggcctaaggaaggcgacgaccggcccttcttttggctgttcgagaatgtggtggccatgggagtcagcgacaagcgggatattagccggttcctggagagcaaccccgtgatgatcgatgccaaggaagtgagcgccgcccaccgggccagatacttctggggcaatctgcctggcatgaacagacccctggccagcaccgtgaacgacaagctggagctgcaggagtgcctggagcacggccggatcgccaagttcagcaaggtgagaaccatcaccacccgaagcaacagcatcaaacaaggcaaggaccagcactttcctgtgttcatgaacgagaaggaggacatcctgtggtgtaccgagatggagagagtgttcgggttcccagtccactacacagatgtcagcaacatgtctagactggccagacagagactgctgggaagaagctggtccgtccctgtgatcagacacctgttcgcccctctgaaggagtacttcgcctgcgtgagcagcggcaacagcaacgccaacagccggggccccagcttctctagcggcctggtgccactgtccctgagagggagccacatgggccccatggagatctacaaaaccgtgagcgcctggaagcggcagcctgtgcgcgtgctgagcctgtttcggaatatcgataaagtcctgaaaagcctgggattcctggagagcggctctggctccggcggtggcaccctgaagtacgtggaggatgtgacaaacgtggtcagacgggatgtggagaagtggggccccttcgatctggtgtacggcagcacccaacccctgggcagctcttgtgaccggtgccctggctggtacatgtttcagttccaccggatcctgcagtacgccctgccgagacaggagtcccagcggccattcttttggattttcatggacaacttgctgctgaccgaggatgaccaggaaactaccactcggttcctgcagaccgaagccgtgaccctgcaggacgtgagaggccgggactaccagaacgccatgcgggtgtggtccaacatccctggactgaaaagcaagcacgcacctctgacccctaaagaagaggagtacctgcaggcccaggtgcggagcagaagcaagctggacgcccctaaggtggatctgctggtgaagaattgcctcctgcccctgagagagtacttcaagtatttcagccagaatagtctgcccctgggcggcccaagcagcggcgcccctcctcccagcggcggcagcccagccggctccccaacctctaccgaggagggcacctctgagtccgccacccccgagagcggccctggcacctccaccgagcccagcgagggcagcgcacccggcagccctgccggcagccccacctccacagaggagggaaccagcaccgagcccagcgaaggcagcgccccaggcaccagcaccgagcctagtgagggcggctctggcggcggcagcgcccaggagattaaacggatcaacaagatcagaagaagacttgtgaaagacagcaacaccaagaaggccggcaagacaggccccatgaaaaccctgctggttagagtgatgacacccgatctgagagagcggctggaaaacctgagaaagaagcctgaaaatatcccccagcccatcagcaatacatctagagccaacctgaataagctgctgaccgattacaccgaaatgaagaaggcgatcctgcatgtgtactgggaagagttccagaaggaccctgtgggcctgatgagccgggtggcccagcctgccagcaagaagatcgatcagaacaagctgaaacctgagatggacgagaagggcaacctgaccaccgccggctttgcctgctctcagtgtggccagcccctgttcgtgtacaagctggagcaggtgtctgagaagggcaaggcttacaccaactacttcggacggtgcaatgtggccgagcacgaaaagctgatcctgctggcccagctgaagcccgagaaggatagcgacgaagccgtgacatatagcctgggaaagtttgggcagagggccctggatttctacagcattcatgtgaccaaggagtccacccaccccgtgaagcccctggcccagatcgccggaaacagatacgcctccggacctgtgggaaaggccctgagcgacgcatgtatgggcacaatcgcctccttcctgtctaagtaccaggacatcatcatcgaacaccagaaggtggtgaagggcaaccagaagagactggagagcctgcgggagctggccggcaaggaaaacctggaataccctagcgtgaccctgccacctcagcctcacaccaaggagggcgttgatgcctacaacgaagtgatcgcccgggtgcgaatgtgggtgaacctgaacctgtggcagaagctgaagctaagcagagatgatgccaagcctctgctgagactgaagggattcccttcctttcctctggtcgagagacaggccaacgaagtggactggtgggacatggtgtgtaacgtgaagaagctgatcaacgagaaaaaggaggatggcaaggtgttttggcagaatctggctggctacaagagacaggaagccctgagaccatacctgagcagcgaggaagatcggaagaagggaaagaaattcgctcggtaccagctgggcgacctgctgctgcacctggaaaagaagcacggcgaggactggggaaaggtgtacgacgaggcctgggagcggattgacaagaaagtggaaggcctgagcaagcacatcaagctggaagaggaacggagaagcgaggacgcccagagcaaggccgccctgaccgactggctgcgggctaaggccagcttcgtgatcgagggcctgaaggaggccgacaaggacgagttctgcagatgcgagctgaagctgcagaagtggtacggggacctgcggggaaagcccttcgccatcgaagccgagaacagcatcctggacatcagcggcttcagcaagcagtacaactgtgccttcatctggcagaaggacggcgtgaagaagctgaacctgtacctgatcatcaactacttcaagggcggcaagctgcggttcaagaagatcaaacctgaagccttcgaagccaacagattctacaccgtgatcaacaaaaagagcggcgagatcgtgcccatggaggtgaacttcaacttcgacgaccccaacctgatcatcctgcctctggcctttggcaagagacagggcagagaattcatctggaacgacctgctgtccctggaaaccggcagcctgaagctggccaacggaagagtgatcgagaagacactgtacaacagaagaacccggcaggatgagcctgccctgttcgtggccctgaccttcgagcggcgggaggtcctggactcctccaatatcaaaccaatgaacctgatcggcgtggcaagaggcgaaaacatccccgccgtgatcgccctgaccgaccccgagggctgcccactgagccggtttaaggatagcctgggaaacccaacccacatcctgagaatcggcgagagctataaggagaagcagcggaccatccaggccaagaaggaggtggagcagcggagagccggcggctacagccggaagtacgccagcaaagccaagaatctggcagacgatatggtgagaaacaccgctagagatctgctgtactacgccgtgacccaggatgccatgctgatcttcgccaacctgagccggggcttcggccggcagggcaagcggaccttcatggccgagagacagtacacacggatggaggactggctgaccgccaagctggcctacgagggcctgagcaagacctacctgtccaagacactggcccagtacacctccaagacatgcagcaactgtgggtttaccatcaccagcgccgactacgacagggtgctggagaagctgaagaagacagcaacaggctggatgaccacaattaacggcaaggagctgaaggtggagggccagattacctactacaacagatacaagagacagaacgtagtcaaggacctgtccgtcgagctggatagactgagcgaagaatctgtgaacaacgacatctcctcctggacaaagggcagaagcggagaagctctgagcctcctgaagaaaagattctcccatagacccgtgcaggagaagttcgtgtgcctgaactgcggcttcgagacacacgcagccgagcaagccgccctgaacatcgccagatcctggctgttcctgcggagccaggagtacaagaaataccagacaaacaagacaaccggcaacaccgataagagagccttcgtcgagacctggcagtccttttaccggaagaagcttaaggaggtgtggaaacctgccgtgcggtctggcggatctggcggaggctccacaagcccccaggagtgcgtgaccttcaaggacgtggccgtgaacttcacccaggaggagtggcagcagctgaaccccgcccagagggacctgtacagggaggtgatgctggagaactacaggaacctgatcagcctgggcctgcccgtgagcaagcccgacgtgatcttccagctggagcagggcgaggagccctggatgctggacctgcagaggatcgaggagggcgagatcagcaggaacatgtacaccagccccaagaaaaagagaaaagtctaagctgccttctgcggggcttgccttctggccatgcccttcttctctcccttgcacctgtacctcttggtctttgaataaagcctgagtaggaaggctagcaaaaaaaaaaaaaaaaaaaaaaaaaaaaaaaaaaaaaaaaaaaaaaaaaaaaaaaaaaaaaaaaaaaaaaaaaaaaaaaa

SEQ ID NO: 6355 - RNA, 5797 nt, synthetic construct
  source 1..5797: mol_type = other RNA
aggaaataagagagaaaagaagagtaagaagaaatataagagccaccatggcccctaagaagaagcgtaaagtgagccggatggaacgcctcgtctacgaggtgcggcagaagtgcagaaacatcgaggacatctgcatctcctgcggatctctgaacgtgaccctggagcacccactgttcatcggcggcatgtgccagaactgtaaaaactgttttctggagtgtgcctatcaatacgacgatgacggctaccagagctactgcaccatctgttgcggcggaagagaggtgctgatgtgtggaaataacaactgctgccggtgcttctgcgtggaatgcgtggacctgctggtgggccccggcgccgcccaggccgctattaaggaagatccttggaactgctacatgtgcggccacaagggcacatacggcctgctgagacggagagaggactggcctagcagactgcagatgttcttcgccaataaccacgaccaggagttcgacccccctaaggtgtaccctcccgtccccgccgagaagagaaagcccatccgggtcctgagcctgttcgatggcatcgccaccggtctgctggtgctgaaggacctgggcatccaggtggataggtacattgcctccgaggtgtgcgaggactccatcaccgtgggaatggtgcgtcatcagggcaagatcatgtacgtgggcgacgtgcggagcgtgacacagaagcatatccaggagtggggccctttcgacctggtgatcggcggcagcccttgcaatgacctgagcatcgtgaacccagcccggaagggcctgtacgagggaaccggcagactgttcttcgagttttacagactgctgcacgacgcccggcctaaggaaggcgacgaccggcccttcttttggctgttcgagaatgtggtggccatgggagtcagcgacaagcgggatattagccggttcctggagagcaaccccgtgatgatcgatgccaaggaagtgagcgccgcccaccgggccagatacttctggggcaatctgcctggcatgaacagacccctggccagcaccgtgaacgacaagctggagctgcaggagtgcctggagcacggccggatcgccaagttcagcaaggtgagaaccatcaccacccgaagcaacagcatcaaacaaggcaaggaccagcactttcctgtgttcatgaacgagaaggaggacatcctgtggtgtaccgagatggagagagtgttcgggttcccagtccactacacagatgtcagcaacatgtctagactggccagacagagactgctgggaagaagctggtccgtccctgtgatcagacacctgttcgcccctctgaaggagtacttcgcctgcgtgagcagcggcaacagcaacgccaacagccggggccccagcttctctagcggcctggtgccactgtccctgagagggagccacatgggccccatggagatctacaaaaccgtgagcgcctggaagcggcagcctgtgcgcgtgctgagcctgtttcggaatatcgataaagtcctgaaaagcctgggattcctggagagcggctctggctccggcggtggcaccctgaagtacgtggaggatgtgacaaacgtggtcagacgggatgtggagaagtggggccccttcgatctggtgtacggcagcacccaacccctgggcagctcttgtgaccggtgccctggctggtacatgtttcagttccaccggatcctgcagtacgccctgccgagacaggagtcccagcggccattcttttggattttcatggacaacttgctgctgaccgaggatgaccaggaaactaccactcggttcctgcagaccgaagccgtgaccctgcaggacgtgagaggccgggactaccagaacgccatgcgggtgtggtccaacatccctggactgaaaagcaagcacgcacctctgacccctaaagaagaggagtacctgcaggcccaggtgcggagcagaagcaagctggacgcccctaaggtggatctgctggtgaagaattgcctcctgcccctgagagagtacttcaagtatttcagccagaatagtctgcccctgggcggcccaagcagcggcgcccctcctcccagcggcggcagcccagccggctccccaacctctaccgaggagggcacctctgagtccgccacccccgagagcggccctggcacctccaccgagcccagcgagggcagcgcacccggcagccctgccggcagccccacctccacagaggagggaaccagcaccgagcccagcgaaggcagcgccccaggcaccagcaccgagcctagtgagggcggctctggcggcggcagcgcccaggagattaaacggatcaacaagatcagaagaagacttgtgaaagacagcaacaccaagaaggccggcaagacaggccccatgaaaaccctgctggttagagtgatgacacccgatctgagagagcggctggaaaacctgagaaagaagcctgaaaatatcccccagcccatcagcaatacatctagagccaacctgaataagctgctgaccgattacaccgaaatgaagaaggcgatcctgcatgtgtactgggaagagttccagaaggaccctgtgggcctgatgagccgggtggcccagcctgccagcaagaagatcgatcagaacaagctgaaacctgagatggacgagaagggcaacctgaccaccgccggctttgcctgctctcagtgtggccagcccctgttcgtgtacaagctggagcaggtgtctgagaagggcaaggcttacaccaactacttcggacggtgcaatgtggccgagcacgaaaagctgatcctgctggcccagctgaagcccgagaaggatagcgacgaagccgtgacatatagcctgggaaagtttgggcagagggccctggatttctacagcattcatgtgaccaaggagtccacccaccccgtgaagcccctggcccagatcgccggaaacagatacgcctccggacctgtgggaaaggccctgagcgacgcatgtatgggcacaatcgcctccttcctgtctaagtaccaggacatcatcatcgaacaccagaaggtggtgaagggcaaccagaagagactggagagcctgcgggagctggccggcaaggaaaacctggaataccctagcgtgaccctgccacctcagcctcacaccaaggagggcgttgatgcctacaacgaagtgatcgcccgggtgcgaatgtgggtgaacctgaacctgtggcagaagctgaagctaagcagagatgatgccaagcctctgctgagactgaagggattcccttcctttcctctggtcgagagacaggccaacgaagtggactggtgggacatggtgtgtaacgtgaagaagctgatcaacgagaaaaaggaggatggcaaggtgttttggcagaatctggctggctacaagagacaggaagccctgagaccatacctgagcagcgaggaagatcggaagaagggaaagaaattcgctcggtaccagctgggcgacctgctgctgcacctggaaaagaagcacggcgaggactggggaaaggtgtacgacgaggcctgggagcggattgacaagaaagtggaaggcctgagcaagcacatcaagctggaagaggaacggagaagcgaggacgcccagagcaaggccgccctgaccgactggctgcgggctaaggccagcttcgtgatcgagggcctgaaggaggccgacaaggacgagttctgcagatgcgagctgaagctgcagaagtggtacggggacctgcggggaaagcccttcgccatcgaagccgagaacagcatcctggacatcagcggcttcagcaagcagtacaactgtgccttcatctggcagaaggacggcgtgaagaagctgaacctgtacctgatcatcaactacttcaagggcggcaagctgcggttcaagaagatcaaacctgaagccttcgaagccaacagattctacaccgtgatcaacaaaaagagcggcgagatcgtgcccatggaggtgaacttcaacttcgacgaccccaacctgatcatcctgcctctggcctttggcaagagacagggcagagaattcatctggaacgacctgctgtccctggaaaccggcagcctgaagctggccaacggaagagtgatcgagaagacactgtacaacagaagaacccggcaggatgagcctgccctgttcgtggccctgaccttcgagcggcgggaggtcctggactcctccaatatcaaaccaatgaacctgatcggcgtggcaagaggcgaaaacatccccgccgtgatcgccctgaccgaccccgagggctgcccactgagccggtttaaggatagcctgggaaacccaacccacatcctgagaatcggcgagagctataaggagaagcagcggaccatccaggccaagaaggaggtggagcagcggagagccggcggctacagccggaagtacgccagcaaagccaagaatctggcagacgatatggtgagaaacaccgctagagatctgctgtactacgccgtgacccaggatgccatgctgatcttcgccaacctgagccggggcttcggccggcagggcaagcggaccttcatggccgagagacagtacacacggatggaggactggctgaccgccaagctggcctacgagggcctgagcaagacctacctgtccaagacactggcccagtacacctccaagacatgcagcaactgtgggtttaccatcaccagcgccgactacgacagggtgctggagaagctgaagaagacagcaacaggctggatgaccacaattaacggcaaggagctgaaggtggagggccagattacctactacaacagatacaagagacagaacgtagtcaaggacctgtccgtcgagctggatagactgagcgaagaatctgtgaacaacgacatctcctcctggacaaagggcagaagcggagaagctctgagcctcctgaagaaaagattctcccatagacccgtgcaggagaagttcgtgtgcctgaactgcggcttcgagacacacgcagccgagcaagccgccctgaacatcgccagatcctggctgttcctgcggagccaggagtacaagaaataccagacaaacaagacaaccggcaacaccgataagagagccttcgtcgagacctggcagtccttttaccggaagaagcttaaggaggtgtggaaacctgccgtgcggtctggcggatctggcggaggctccacaagcgagatgggcctgctgaccttcagggacatcgccatcgagttcagcctggaggagtggcagtgcctggactgcgcccagaggaacctgtacagggacgtgatgctggagaactacaggaacctggtgagcctgggcatcgccgtgagcaagcccgacctgatcacctgcctggagcagaacaaggagagccagaacatcaagaggaacaagatggtggccaagcaccccgtgatgcacagccacaccagccccaagaaaaagagaaaagtctaagctgccttctgcggggcttgccttctggccatgcccttcttctctcccttgcacctgtacctcttggtctttgaataaagcctgagtaggaaggctagcaaaaaaaaaaaaaaaaaaaaaaaaaaaaaaaaaaaaaaaaaaaaaaaaaaaaaaaaaaaaaaaaaaaaaaaaaaaaaaaa

SEQ ID NO: 6356 - RNA, 5797 nt, synthetic construct
  source 1..5797: mol_type = other RNA
aggaaataagagagaaaagaagagtaagaagaaatataagagccaccatggcccctaagaagaagcgtaaagtgagccggatggaacgcctcgtctacgaggtgcggcagaagtgcagaaacatcgaggacatctgcatctcctgcggatctctgaacgtgaccctggagcacccactgttcatcggcggcatgtgccagaactgtaaaaactgttttctggagtgtgcctatcaatacgacgatgacggctaccagagctactgcaccatctgttgcggcggaagagaggtgctgatgtgtggaaataacaactgctgccggtgcttctgcgtggaatgcgtggacctgctggtgggccccggcgccgcccaggccgctattaaggaagatccttggaactgctacatgtgcggccacaagggcacatacggcctgctgagacggagagaggactggcctagcagactgcagatgttcttcgccaataaccacgaccaggagttcgacccccctaaggtgtaccctcccgtccccgccgagaagagaaagcccatccgggtcctgagcctgttcgatggcatcgccaccggtctgctggtgctgaaggacctgggcatccaggtggataggtacattgcctccgaggtgtgcgaggactccatcaccgtgggaatggtgcgtcatcagggcaagatcatgtacgtgggcgacgtgcggagcgtgacacagaagcatatccaggagtggggccctttcgacctggtgatcggcggcagcccttgcaatgacctgagcatcgtgaacccagcccggaagggcctgtacgagggaaccggcagactgttcttcgagttttacagactgctgcacgacgcccggcctaaggaaggcgacgaccggcccttcttttggctgttcgagaatgtggtggccatgggagtcagcgacaagcgggatattagccggttcctggagagcaaccccgtgatgatcgatgccaaggaagtgagcgccgcccaccgggccagatacttctggggcaatctgcctggcatgaacagacccctggccagcaccgtgaacgacaagctggagctgcaggagtgcctggagcacggccggatcgccaagttcagcaaggtgagaaccatcaccacccgaagcaacagcatcaaacaaggcaaggaccagcactttcctgtgttcatgaacgagaaggaggacatcctgtggtgtaccgagatggagagagtgttcgggttcccagtccactacacagatgtcagcaacatgtctagactggccagacagagactgctgggaagaagctggtccgtccctgtgatcagacacctgttcgcccctctgaaggagtacttcgcctgcgtgagcagcggcaacagcaacgccaacagccggggccccagcttctctagcggcctggtgccactgtccctgagagggagccacatgggccccatggagatctacaaaaccgtgagcgcctggaagcggcagcctgtgcgcgtgctgagcctgtttcggaatatcgataaagtcctgaaaagcctgggattcctggagagcggctctggctccggcggtggcaccctgaagtacgtggaggatgtgacaaacgtggtcagacgggatgtggagaagtggggccccttcgatctggtgtacggcagcacccaacccctgggcagctcttgtgaccggtgccctggctggtacatgtttcagttccaccggatcctgcagtacgccctgccgagacaggagtcccagcggccattcttttggattttcatggacaacttgctgctgaccgaggatgaccaggaaactaccactcggttcctgcagaccgaagccgtgaccctgcaggacgtgagaggccgggactaccagaacgccatgcgggtgtggtccaacatccctggactgaaaagcaagcacgcacctctgacccctaaagaagaggagtacctgcaggcccaggtgcggagcagaagcaagctggacgcccctaaggtggatctgctggtgaagaattgcctcctgcccctgagagagtacttcaagtatttcagccagaatagtctgcccctgggcggcccaagcagcggcgcccctcctcccagcggcggcagcccagccggctccccaacctctaccgaggagggcacctctgagtccgccacccccgagagcggccctggcacctccaccgagcccagcgagggcagcgcacccggcagccctgccggcagccccacctccacagaggagggaaccagcaccgagcccagcgaaggcagcgccccaggcaccagcaccgagcctagtgagggcggctctggcggcggcagcgcccaggagattaaacggatcaacaagatcagaagaagacttgtgaaagacagcaacaccaagaaggccggcaagacaggccccatgaaaaccctgctggttagagtgatgacacccgatctgagagagcggctggaaaacctgagaaagaagcctgaaaatatcccccagcccatcagcaatacatctagagccaacctgaataagctgctgaccgattacaccgaaatgaagaaggcgatcctgcatgtgtactgggaagagttccagaaggaccctgtgggcctgatgagccgggtggcccagcctgccagcaagaagatcgatcagaacaagctgaaacctgagatggacgagaagggcaacctgaccaccgccggctttgcctgctctcagtgtggccagcccctgttcgtgtacaagctggagcaggtgtctgagaagggcaaggcttacaccaactacttcggacggtgcaatgtggccgagcacgaaaagctgatcctgctggcccagctgaagcccgagaaggatagcgacgaagccgtgacatatagcctgggaaagtttgggcagagggccctggatttctacagcattcatgtgaccaaggagtccacccaccccgtgaagcccctggcccagatcgccggaaacagatacgcctccggacctgtgggaaaggccctgagcgacgcatgtatgggcacaatcgcctccttcctgtctaagtaccaggacatcatcatcgaacaccagaaggtggtgaagggcaaccagaagagactggagagcctgcgggagctggccggcaaggaaaacctggaataccctagcgtgaccctgccacctcagcctcacaccaaggagggcgttgatgcctacaacgaagtgatcgcccgggtgcgaatgtgggtgaacctgaacctgtggcagaagctgaagctaagcagagatgatgccaagcctctgctgagactgaagggattcccttcctttcctctggtcgagagacaggccaacgaagtggactggtgggacatggtgtgtaacgtgaagaagctgatcaacgagaaaaaggaggatggcaaggtgttttggcagaatctggctggctacaagagacaggaagccctgagaccatacctgagcagcgaggaagatcggaagaagggaaagaaattcgctcggtaccagctgggcgacctgctgctgcacctggaaaagaagcacggcgaggactggggaaaggtgtacgacgaggcctgggagcggattgacaagaaagtggaaggcctgagcaagcacatcaagctggaagaggaacggagaagcgaggacgcccagagcaaggccgccctgaccgactggctgcgggctaaggccagcttcgtgatcgagggcctgaaggaggccgacaaggacgagttctgcagatgcgagctgaagctgcagaagtggtacggggacctgcggggaaagcccttcgccatcgaagccgagaacagcatcctggacatcagcggcttcagcaagcagtacaactgtgccttcatctggcagaaggacggcgtgaagaagctgaacctgtacctgatcatcaactacttcaagggcggcaagctgcggttcaagaagatcaaacctgaagccttcgaagccaacagattctacaccgtgatcaacaaaaagagcggcgagatcgtgcccatggaggtgaacttcaacttcgacgaccccaacctgatcatcctgcctctggcctttggcaagagacagggcagagaattcatctggaacgacctgctgtccctggaaaccggcagcctgaagctggccaacggaagagtgatcgagaagacactgtacaacagaagaacccggcaggatgagcctgccctgttcgtggccctgaccttcgagcggcgggaggtcctggactcctccaatatcaaaccaatgaacctgatcggcgtggcaagaggcgaaaacatccccgccgtgatcgccctgaccgaccccgagggctgcccactgagccggtttaaggatagcctgggaaacccaacccacatcctgagaatcggcgagagctataaggagaagcagcggaccatccaggccaagaaggaggtggagcagcggagagccggcggctacagccggaagtacgccagcaaagccaagaatctggcagacgatatggtgagaaacaccgctagagatctgctgtactacgccgtgacccaggatgccatgctgatcttcgccaacctgagccggggcttcggccggcagggcaagcggaccttcatggccgagagacagtacacacggatggaggactggctgaccgccaagctggcctacgagggcctgagcaagacctacctgtccaagacactggcccagtacacctccaagacatgcagcaactgtgggtttaccatcaccagcgccgactacgacagggtgctggagaagctgaagaagacagcaacaggctggatgaccacaattaacggcaaggagctgaaggtggagggccagattacctactacaacagatacaagagacagaacgtagtcaaggacctgtccgtcgagctggatagactgagcgaagaatctgtgaacaacgacatctcctcctggacaaagggcagaagcggagaagctctgagcctcctgaagaaaagattctcccatagacccgtgcaggagaagttcgtgtgcctgaactgcggcttcgagacacacgcagccgagcaagccgccctgaacatcgccagatcctggctgttcctgcggagccaggagtacaagaaataccagacaaacaagacaaccggcaacaccgataagagagccttcgtcgagacctggcagtccttttaccggaagaagcttaaggaggtgtggaaacctgccgtgcggtctggcggatctggcggaggctccacaagcttcgaggagctggtgaccttcgaggacgtgctggtggacttcagccccgaggagctgagcagcctgagcgccgcccagaggaacctgtacagggaggtgatgctggagaactacaggaacctggtgagcctgggccaccagttcagcaagcccgacgtgatcagcaggctggaggaggaggagagccacgccatggagaccgacagcaggcacaccgtgatctgccccggcgagagccacgacaccagccccaagaaaaagagaaaagtctaagctgccttctgcggggcttgccttctggccatgcccttcttctctcccttgcacctgtacctcttggtctttgaataaagcctgagtaggaaggctagcaaaaaaaaaaaaaaaaaaaaaaaaaaaaaaaaaaaaaaaaaaaaaaaaaaaaaaaaaaaaaaaaaaaaaaaaaaaaaaaa

SEQ ID NO: 6357 - RNA, 5797 nt, synthetic construct
  source 1..5797: mol_type = other RNA
aggaaataagagagaaaagaagagtaagaagaaatataagagccaccatggcccctaagaagaagcgtaaagtgagccggatggaacgcctcgtctacgaggtgcggcagaagtgcagaaacatcgaggacatctgcatctcctgcggatctctgaacgtgaccctggagcacccactgttcatcggcggcatgtgccagaactgtaaaaactgttttctggagtgtgcctatcaatacgacgatgacggctaccagagctactgcaccatctgttgcggcggaagagaggtgctgatgtgtggaaataacaactgctgccggtgcttctgcgtggaatgcgtggacctgctggtgggccccggcgccgcccaggccgctattaaggaagatccttggaactgctacatgtgcggccacaagggcacatacggcctgctgagacggagagaggactggcctagcagactgcagatgttcttcgccaataaccacgaccaggagttcgacccccctaaggtgtaccctcccgtccccgccgagaagagaaagcccatccgggtcctgagcctgttcgatggcatcgccaccggtctgctggtgctgaaggacctgggcatccaggtggataggtacattgcctccgaggtgtgcgaggactccatcaccgtgggaatggtgcgtcatcagggcaagatcatgtacgtgggcgacgtgcggagcgtgacacagaagcatatccaggagtggggccctttcgacctggtgatcggcggcagcccttgcaatgacctgagcatcgtgaacccagcccggaagggcctgtacgagggaaccggcagactgttcttcgagttttacagactgctgcacgacgcccggcctaaggaaggcgacgaccggcccttcttttggctgttcgagaatgtggtggccatgggagtcagcgacaagcgggatattagccggttcctggagagcaaccccgtgatgatcgatgccaaggaagtgagcgccgcccaccgggccagatacttctggggcaatctgcctggcatgaacagacccctggccagcaccgtgaacgacaagctggagctgcaggagtgcctggagcacggccggatcgccaagttcagcaaggtgagaaccatcaccacccgaagcaacagcatcaaacaaggcaaggaccagcactttcctgtgttcatgaacgagaaggaggacatcctgtggtgtaccgagatggagagagtgttcgggttcccagtccactacacagatgtcagcaacatgtctagactggccagacagagactgctgggaagaagctggtccgtccctgtgatcagacacctgttcgcccctctgaaggagtacttcgcctgcgtgagcagcggcaacagcaacgccaacagccggggccccagcttctctagcggcctggtgccactgtccctgagagggagccacatgggccccatggagatctacaaaaccgtgagcgcctggaagcggcagcctgtgcgcgtgctgagcctgtttcggaatatcgataaagtcctgaaaagcctgggattcctggagagcggctctggctccggcggtggcaccctgaagtacgtggaggatgtgacaaacgtggtcagacgggatgtggagaagtggggccccttcgatctggtgtacggcagcacccaacccctgggcagctcttgtgaccggtgccctggctggtacatgtttcagttccaccggatcctgcagtacgccctgccgagacaggagtcccagcggccattcttttggattttcatggacaacttgctgctgaccgaggatgaccaggaaactaccactcggttcctgcagaccgaagccgtgaccctgcaggacgtgagaggccgggactaccagaacgccatgcgggtgtggtccaacatccctggactgaaaagcaagcacgcacctctgacccctaaagaagaggagtacctgcaggcccaggtgcggagcagaagcaagctggacgcccctaaggtggatctgctggtgaagaattgcctcctgcccctgagagagtacttcaagtatttcagccagaatagtctgcccctgggcggcccaagcagcggcgcccctcctcccagcggcggcagcccagccggctccccaacctctaccgaggagggcacctctgagtccgccacccccgagagcggccctggcacctccaccgagcccagcgagggcagcgcacccggcagccctgccggcagccccacctccacagaggagggaaccagcaccgagcccagcgaaggcagcgccccaggcaccagcaccgagcctagtgagggcggctctggcggcggcagcgcccaggagattaaacggatcaacaagatcagaagaagacttgtgaaagacagcaacaccaagaaggccggcaagacaggccccatgaaaaccctgctggttagagtgatgacacccgatctgagagagcggctggaaaacctgagaaagaagcctgaaaatatcccccagcccatcagcaatacatctagagccaacctgaataagctgctgaccgattacaccgaaatgaagaaggcgatcctgcatgtgtactgggaagagttccagaaggaccctgtgggcctgatgagccgggtggcccagcctgccagcaagaagatcgatcagaacaagctgaaacctgagatggacgagaagggcaacctgaccaccgccggctttgcctgctctcagtgtggccagcccctgttcgtgtacaagctggagcaggtgtctgagaagggcaaggcttacaccaactacttcggacggtgcaatgtggccgagcacgaaaagctgatcctgctggcccagctgaagcccgagaaggatagcgacgaagccgtgacatatagcctgggaaagtttgggcagagggccctggatttctacagcattcatgtgaccaaggagtccacccaccccgtgaagcccctggcccagatcgccggaaacagatacgcctccggacctgtgggaaaggccctgagcgacgcatgtatgggcacaatcgcctccttcctgtctaagtaccaggacatcatcatcgaacaccagaaggtggtgaagggcaaccagaagagactggagagcctgcgggagctggccggcaaggaaaacctggaataccctagcgtgaccctgccacctcagcctcacaccaaggagggcgttgatgcctacaacgaagtgatcgcccgggtgcgaatgtgggtgaacctgaacctgtggcagaagctgaagctaagcagagatgatgccaagcctctgctgagactgaagggattcccttcctttcctctggtcgagagacaggccaacgaagtggactggtgggacatggtgtgtaacgtgaagaagctgatcaacgagaaaaaggaggatggcaaggtgttttggcagaatctggctggctacaagagacaggaagccctgagaccatacctgagcagcgaggaagatcggaagaagggaaagaaattcgctcggtaccagctgggcgacctgctgctgcacctggaaaagaagcacggcgaggactggggaaaggtgtacgacgaggcctgggagcggattgacaagaaagtggaaggcctgagcaagcacatcaagctggaagaggaacggagaagcgaggacgcccagagcaaggccgccctgaccgactggctgcgggctaaggccagcttcgtgatcgagggcctgaaggaggccgacaaggacgagttctgcagatgcgagctgaagctgcagaagtggtacggggacctgcggggaaagcccttcgccatcgaagccgagaacagcatcctggacatcagcggcttcagcaagcagtacaactgtgccttcatctggcagaaggacggcgtgaagaagctgaacctgtacctgatcatcaactacttcaagggcggcaagctgcggttcaagaagatcaaacctgaagccttcgaagccaacagattctacaccgtgatcaacaaaaagagcggcgagatcgtgcccatggaggtgaacttcaacttcgacgaccccaacctgatcatcctgcctctggcctttggcaagagacagggcagagaattcatctggaacgacctgctgtccctggaaaccggcagcctgaagctggccaacggaagagtgatcgagaagacactgtacaacagaagaacccggcaggatgagcctgccctgttcgtggccctgaccttcgagcggcgggaggtcctggactcctccaatatcaaaccaatgaacctgatcggcgtggcaagaggcgaaaacatccccgccgtgatcgccctgaccgaccccgagggctgcccactgagccggtttaaggatagcctgggaaacccaacccacatcctgagaatcggcgagagctataaggagaagcagcggaccatccaggccaagaaggaggtggagcagcggagagccggcggctacagccggaagtacgccagcaaagccaagaatctggcagacgatatggtgagaaacaccgctagagatctgctgtactacgccgtgacccaggatgccatgctgatcttcgccaacctgagccggggcttcggccggcagggcaagcggaccttcatggccgagagacagtacacacggatggaggactggctgaccgccaagctggcctacgagggcctgagcaagacctacctgtccaagacactggcccagtacacctccaagacatgcagcaactgtgggtttaccatcaccagcgccgactacgacagggtgctggagaagctgaagaagacagcaacaggctggatgaccacaattaacggcaaggagctgaaggtggagggccagattacctactacaacagatacaagagacagaacgtagtcaaggacctgtccgtcgagctggatagactgagcgaagaatctgtgaacaacgacatctcctcctggacaaagggcagaagcggagaagctctgagcctcctgaagaaaagattctcccatagacccgtgcaggagaagttcgtgtgcctgaactgcggcttcgagacacacgcagccgagcaagccgccctgaacatcgccagatcctggctgttcctgcggagccaggagtacaagaaataccagacaaacaagacaaccggcaacaccgataagagagccttcgtcgagacctggcagtccttttaccggaagaagcttaaggaggtgtggaaacctgccgtgcggtctggcggatctggcggaggctccacaagcatgatgaccgccgtgagcctgaccaccaggccccaggagagcgtggccttcgaggacgtggccgtgtacttcaccgccaaggagtgggacatcatggtgcccgccgagagggccctgtacagggacgtgatgctggagaactacgaggccgtggccttcgtggtgccccccaccagcaagcccgccctggtgagccacctggagcagggcaaggagagctgcttcaccaggccccagggcgtgaccagccccaagaaaaagagaaaagtctaagctgccttctgcggggcttgccttctggccatgcccttcttctctcccttgcacctgtacctcttggtctttgaataaagcctgagtaggaaggctagcaaaaaaaaaaaaaaaaaaaaaaaaaaaaaaaaaaaaaaaaaaaaaaaaaaaaaaaaaaaaaaaaaaaaaaaaaaaaaaaa

SEQ ID NO: 6358 - RNA, 5797 nt, synthetic construct
  source 1..5797: mol_type = other RNA
aggaaataagagagaaaagaagagtaagaagaaatataagagccaccatggcccctaagaagaagcgtaaagtgagccggatggaacgcctcgtctacgaggtgcggcagaagtgcagaaacatcgaggacatctgcatctcctgcggatctctgaacgtgaccctggagcacccactgttcatcggcggcatgtgccagaactgtaaaaactgttttctggagtgtgcctatcaatacgacgatgacggctaccagagctactgcaccatctgttgcggcggaagagaggtgctgatgtgtggaaataacaactgctgccggtgcttctgcgtggaatgcgtggacctgctggtgggccccggcgccgcccaggccgctattaaggaagatccttggaactgctacatgtgcggccacaagggcacatacggcctgctgagacggagagaggactggcctagcagactgcagatgttcttcgccaataaccacgaccaggagttcgacccccctaaggtgtaccctcccgtccccgccgagaagagaaagcccatccgggtcctgagcctgttcgatggcatcgccaccggtctgctggtgctgaaggacctgggcatccaggtggataggtacattgcctccgaggtgtgcgaggactccatcaccgtgggaatggtgcgtcatcagggcaagatcatgtacgtgggcgacgtgcggagcgtgacacagaagcatatccaggagtggggccctttcgacctggtgatcggcggcagcccttgcaatgacctgagcatcgtgaacccagcccggaagggcctgtacgagggaaccggcagactgttcttcgagttttacagactgctgcacgacgcccggcctaaggaaggcgacgaccggcccttcttttggctgttcgagaatgtggtggccatgggagtcagcgacaagcgggatattagccggttcctggagagcaaccccgtgatgatcgatgccaaggaagtgagcgccgcccaccgggccagatacttctggggcaatctgcctggcatgaacagacccctggccagcaccgtgaacgacaagctggagctgcaggagtgcctggagcacggccggatcgccaagttcagcaaggtgagaaccatcaccacccgaagcaacagcatcaaacaaggcaaggaccagcactttcctgtgttcatgaacgagaaggaggacatcctgtggtgtaccgagatggagagagtgttcgggttcccagtccactacacagatgtcagcaacatgtctagactggccagacagagactgctgggaagaagctggtccgtccctgtgatcagacacctgttcgcccctctgaaggagtacttcgcctgcgtgagcagcggcaacagcaacgccaacagccggggccccagcttctctagcggcctggtgccactgtccctgagagggagccacatgggccccatggagatctacaaaaccgtgagcgcctggaagcggcagcctgtgcgcgtgctgagcctgtttcggaatatcgataaagtcctgaaaagcctgggattcctggagagcggctctggctccggcggtggcaccctgaagtacgtggaggatgtgacaaacgtggtcagacgggatgtggagaagtggggccccttcgatctggtgtacggcagcacccaacccctgggcagctcttgtgaccggtgccctggctggtacatgtttcagttccaccggatcctgcagtacgccctgccgagacaggagtcccagcggccattcttttggattttcatggacaacttgctgctgaccgaggatgaccaggaaactaccactcggttcctgcagaccgaagccgtgaccctgcaggacgtgagaggccgggactaccagaacgccatgcgggtgtggtccaacatccctggactgaaaagcaagcacgcacctctgacccctaaagaagaggagtacctgcaggcccaggtgcggagcagaagcaagctggacgcccctaaggtggatctgctggtgaagaattgcctcctgcccctgagagagtacttcaagtatttcagccagaatagtctgcccctgggcggcccaagcagcggcgcccctcctcccagcggcggcagcccagccggctccccaacctctaccgaggagggcacctctgagtccgccacccccgagagcggccctggcacctccaccgagcccagcgagggcagcgcacccggcagccctgccggcagccccacctccacagaggagggaaccagcaccgagcccagcgaaggcagcgccccaggcaccagcaccgagcctagtgagggcggctctggcggcggcagcgcccaggagattaaacggatcaacaagatcagaagaagacttgtgaaagacagcaacaccaagaaggccggcaagacaggccccatgaaaaccctgctggttagagtgatgacacccgatctgagagagcggctggaaaacctgagaaagaagcctgaaaatatcccccagcccatcagcaatacatctagagccaacctgaataagctgctgaccgattacaccgaaatgaagaaggcgatcctgcatgtgtactgggaagagttccagaaggaccctgtgggcctgatgagccgggtggcccagcctgccagcaagaagatcgatcagaacaagctgaaacctgagatggacgagaagggcaacctgaccaccgccggctttgcctgctctcagtgtggccagcccctgttcgtgtacaagctggagcaggtgtctgagaagggcaaggcttacaccaactacttcggacggtgcaatgtggccgagcacgaaaagctgatcctgctggcccagctgaagcccgagaaggatagcgacgaagccgtgacatatagcctgggaaagtttgggcagagggccctggatttctacagcattcatgtgaccaaggagtccacccaccccgtgaagcccctggcccagatcgccggaaacagatacgcctccggacctgtgggaaaggccctgagcgacgcatgtatgggcacaatcgcctccttcctgtctaagtaccaggacatcatcatcgaacaccagaaggtggtgaagggcaaccagaagagactggagagcctgcgggagctggccggcaaggaaaacctggaataccctagcgtgaccctgccacctcagcctcacaccaaggagggcgttgatgcctacaacgaagtgatcgcccgggtgcgaatgtgggtgaacctgaacctgtggcagaagctgaagctaagcagagatgatgccaagcctctgctgagactgaagggattcccttcctttcctctggtcgagagacaggccaacgaagtggactggtgggacatggtgtgtaacgtgaagaagctgatcaacgagaaaaaggaggatggcaaggtgttttggcagaatctggctggctacaagagacaggaagccctgagaccatacctgagcagcgaggaagatcggaagaagggaaagaaattcgctcggtaccagctgggcgacctgctgctgcacctggaaaagaagcacggcgaggactggggaaaggtgtacgacgaggcctgggagcggattgacaagaaagtggaaggcctgagcaagcacatcaagctggaagaggaacggagaagcgaggacgcccagagcaaggccgccctgaccgactggctgcgggctaaggccagcttcgtgatcgagggcctgaaggaggccgacaaggacgagttctgcagatgcgagctgaagctgcagaagtggtacggggacctgcggggaaagcccttcgccatcgaagccgagaacagcatcctggacatcagcggcttcagcaagcagtacaactgtgccttcatctggcagaaggacggcgtgaagaagctgaacctgtacctgatcatcaactacttcaagggcggcaagctgcggttcaagaagatcaaacctgaagccttcgaagccaacagattctacaccgtgatcaacaaaaagagcggcgagatcgtgcccatggaggtgaacttcaacttcgacgaccccaacctgatcatcctgcctctggcctttggcaagagacagggcagagaattcatctggaacgacctgctgtccctggaaaccggcagcctgaagctggccaacggaagagtgatcgagaagacactgtacaacagaagaacccggcaggatgagcctgccctgttcgtggccctgaccttcgagcggcgggaggtcctggactcctccaatatcaaaccaatgaacctgatcggcgtggcaagaggcgaaaacatccccgccgtgatcgccctgaccgaccccgagggctgcccactgagccggtttaaggatagcctgggaaacccaacccacatcctgagaatcggcgagagctataaggagaagcagcggaccatccaggccaagaaggaggtggagcagcggagagccggcggctacagccggaagtacgccagcaaagccaagaatctggcagacgatatggtgagaaacaccgctagagatctgctgtactacgccgtgacccaggatgccatgctgatcttcgccaacctgagccggggcttcggccggcagggcaagcggaccttcatggccgagagacagtacacacggatggaggactggctgaccgccaagctggcctacgagggcctgagcaagacctacctgtccaagacactggcccagtacacctccaagacatgcagcaactgtgggtttaccatcaccagcgccgactacgacagggtgctggagaagctgaagaagacagcaacaggctggatgaccacaattaacggcaaggagctgaaggtggagggccagattacctactacaacagatacaagagacagaacgtagtcaaggacctgtccgtcgagctggatagactgagcgaagaatctgtgaacaacgacatctcctcctggacaaagggcagaagcggagaagctctgagcctcctgaagaaaagattctcccatagacccgtgcaggagaagttcgtgtgcctgaactgcggcttcgagacacacgcagccgagcaagccgccctgaacatcgccagatcctggctgttcctgcggagccaggagtacaagaaataccagacaaacaagacaaccggcaacaccgataagagagccttcgtcgagacctggcagtccttttaccggaagaagcttaaggaggtgtggaaacctgccgtgcggtctggcggatctggcggaggctccacaagcatggtgcacggcagcgtgaccttcagggacgtggccatcgacttcagccaggaggagtgggagtgcctgcagcccgaccagaggaccctgtacagggacgtgatgctggagaactacagccacctgatcagcctggccggcagcagcatcagcaagcccggcgtgatcaccctgctggagcaggagaaggagccctggatggtggtgaggaaggagaccagcaggtggtaccccgacctggagaccagccccaagaaaaagagaaaagtctaagctgccttctgcggggcttgccttctggccatgcccttcttctctcccttgcacctgtacctcttggtctttgaataaagcctgagtaggaaggctagcaaaaaaaaaaaaaaaaaaaaaaaaaaaaaaaaaaaaaaaaaaaaaaaaaaaaaaaaaaaaaaaaaaaaaaaaaaaaaaaa

SEQ ID NO: 6359 - RNA, 5797 nt, synthetic construct
  source 1..5797: mol_type = other RNA
aggaaataagagagaaaagaagagtaagaagaaatataagagccaccatggcccctaagaagaagcgtaaagtgagccggatggaacgcctcgtctacgaggtgcggcagaagtgcagaaacatcgaggacatctgcatctcctgcggatctctgaacgtgaccctggagcacccactgttcatcggcggcatgtgccagaactgtaaaaactgttttctggagtgtgcctatcaatacgacgatgacggctaccagagctactgcaccatctgttgcggcggaagagaggtgctgatgtgtggaaataacaactgctgccggtgcttctgcgtggaatgcgtggacctgctggtgggccccggcgccgcccaggccgctattaaggaagatccttggaactgctacatgtgcggccacaagggcacatacggcctgctgagacggagagaggactggcctagcagactgcagatgttcttcgccaataaccacgaccaggagttcgacccccctaaggtgtaccctcccgtccccgccgagaagagaaagcccatccgggtcctgagcctgttcgatggcatcgccaccggtctgctggtgctgaaggacctgggcatccaggtggataggtacattgcctccgaggtgtgcgaggactccatcaccgtgggaatggtgcgtcatcagggcaagatcatgtacgtgggcgacgtgcggagcgtgacacagaagcatatccaggagtggggccctttcgacctggtgatcggcggcagcccttgcaatgacctgagcatcgtgaacccagcccggaagggcctgtacgagggaaccggcagactgttcttcgagttttacagactgctgcacgacgcccggcctaaggaaggcgacgaccggcccttcttttggctgttcgagaatgtggtggccatgggagtcagcgacaagcgggatattagccggttcctggagagcaaccccgtgatgatcgatgccaaggaagtgagcgccgcccaccgggccagatacttctggggcaatctgcctggcatgaacagacccctggccagcaccgtgaacgacaagctggagctgcaggagtgcctggagcacggccggatcgccaagttcagcaaggtgagaaccatcaccacccgaagcaacagcatcaaacaaggcaaggaccagcactttcctgtgttcatgaacgagaaggaggacatcctgtggtgtaccgagatggagagagtgttcgggttcccagtccactacacagatgtcagcaacatgtctagactggccagacagagactgctgggaagaagctggtccgtccctgtgatcagacacctgttcgcccctctgaaggagtacttcgcctgcgtgagcagcggcaacagcaacgccaacagccggggccccagcttctctagcggcctggtgccactgtccctgagagggagccacatgggccccatggagatctacaaaaccgtgagcgcctggaagcggcagcctgtgcgcgtgctgagcctgtttcggaatatcgataaagtcctgaaaagcctgggattcctggagagcggctctggctccggcggtggcaccctgaagtacgtggaggatgtgacaaacgtggtcagacgggatgtggagaagtggggccccttcgatctggtgtacggcagcacccaacccctgggcagctcttgtgaccggtgccctggctggtacatgtttcagttccaccggatcctgcagtacgccctgccgagacaggagtcccagcggccattcttttggattttcatggacaacttgctgctgaccgaggatgaccaggaaactaccactcggttcctgcagaccgaagccgtgaccctgcaggacgtgagaggccgggactaccagaacgccatgcgggtgtggtccaacatccctggactgaaaagcaagcacgcacctctgacccctaaagaagaggagtacctgcaggcccaggtgcggagcagaagcaagctggacgcccctaaggtggatctgctggtgaagaattgcctcctgcccctgagagagtacttcaagtatttcagccagaatagtctgcccctgggcggcccaagcagcggcgcccctcctcccagcggcggcagcccagccggctccccaacctctaccgaggagggcacctctgagtccgccacccccgagagcggccctggcacctccaccgagcccagcgagggcagcgcacccggcagccctgccggcagccccacctccacagaggagggaaccagcaccgagcccagcgaaggcagcgccccaggcaccagcaccgagcctagtgagggcggctctggcggcggcagcgcccaggagattaaacggatcaacaagatcagaagaagacttgtgaaagacagcaacaccaagaaggccggcaagacaggccccatgaaaaccctgctggttagagtgatgacacccgatctgagagagcggctggaaaacctgagaaagaagcctgaaaatatcccccagcccatcagcaatacatctagagccaacctgaataagctgctgaccgattacaccgaaatgaagaaggcgatcctgcatgtgtactgggaagagttccagaaggaccctgtgggcctgatgagccgggtggcccagcctgccagcaagaagatcgatcagaacaagctgaaacctgagatggacgagaagggcaacctgaccaccgccggctttgcctgctctcagtgtggccagcccctgttcgtgtacaagctggagcaggtgtctgagaagggcaaggcttacaccaactacttcggacggtgcaatgtggccgagcacgaaaagctgatcctgctggcccagctgaagcccgagaaggatagcgacgaagccgtgacatatagcctgggaaagtttgggcagagggccctggatttctacagcattcatgtgaccaaggagtccacccaccccgtgaagcccctggcccagatcgccggaaacagatacgcctccggacctgtgggaaaggccctgagcgacgcatgtatgggcacaatcgcctccttcctgtctaagtaccaggacatcatcatcgaacaccagaaggtggtgaagggcaaccagaagagactggagagcctgcgggagctggccggcaaggaaaacctggaataccctagcgtgaccctgccacctcagcctcacaccaaggagggcgttgatgcctacaacgaagtgatcgcccgggtgcgaatgtgggtgaacctgaacctgtggcagaagctgaagctaagcagagatgatgccaagcctctgctgagactgaagggattcccttcctttcctctggtcgagagacaggccaacgaagtggactggtgggacatggtgtgtaacgtgaagaagctgatcaacgagaaaaaggaggatggcaaggtgttttggcagaatctggctggctacaagagacaggaagccctgagaccatacctgagcagcgaggaagatcggaagaagggaaagaaattcgctcggtaccagctgggcgacctgctgctgcacctggaaaagaagcacggcgaggactggggaaaggtgtacgacgaggcctgggagcggattgacaagaaagtggaaggcctgagcaagcacatcaagctggaagaggaacggagaagcgaggacgcccagagcaaggccgccctgaccgactggctgcgggctaaggccagcttcgtgatcgagggcctgaaggaggccgacaaggacgagttctgcagatgcgagctgaagctgcagaagtggtacggggacctgcggggaaagcccttcgccatcgaagccgagaacagcatcctggacatcagcggcttcagcaagcagtacaactgtgccttcatctggcagaaggacggcgtgaagaagctgaacctgtacctgatcatcaactacttcaagggcggcaagctgcggttcaagaagatcaaacctgaagccttcgaagccaacagattctacaccgtgatcaacaaaaagagcggcgagatcgtgcccatggaggtgaacttcaacttcgacgaccccaacctgatcatcctgcctctggcctttggcaagagacagggcagagaattcatctggaacgacctgctgtccctggaaaccggcagcctgaagctggccaacggaagagtgatcgagaagacactgtacaacagaagaacccggcaggatgagcctgccctgttcgtggccctgaccttcgagcggcgggaggtcctggactcctccaatatcaaaccaatgaacctgatcggcgtggcaagaggcgaaaacatccccgccgtgatcgccctgaccgaccccgagggctgcccactgagccggtttaaggatagcctgggaaacccaacccacatcctgagaatcggcgagagctataaggagaagcagcggaccatccaggccaagaaggaggtggagcagcggagagccggcggctacagccggaagtacgccagcaaagccaagaatctggcagacgatatggtgagaaacaccgctagagatctgctgtactacgccgtgacccaggatgccatgctgatcttcgccaacctgagccggggcttcggccggcagggcaagcggaccttcatggccgagagacagtacacacggatggaggactggctgaccgccaagctggcctacgagggcctgagcaagacctacctgtccaagacactggcccagtacacctccaagacatgcagcaactgtgggtttaccatcaccagcgccgactacgacagggtgctggagaagctgaagaagacagcaacaggctggatgaccacaattaacggcaaggagctgaaggtggagggccagattacctactacaacagatacaagagacagaacgtagtcaaggacctgtccgtcgagctggatagactgagcgaagaatctgtgaacaacgacatctcctcctggacaaagggcagaagcggagaagctctgagcctcctgaagaaaagattctcccatagacccgtgcaggagaagttcgtgtgcctgaactgcggcttcgagacacacgcagccgagcaagccgccctgaacatcgccagatcctggctgttcctgcggagccaggagtacaagaaataccagacaaacaagacaaccggcaacaccgataagagagccttcgtcgagacctggcagtccttttaccggaagaagcttaaggaggtgtggaaacctgccgtgcggtctggcggatctggcggaggctccacaagcccccaggagctggtgaccttcagggacgtggccgtggacttcacccccgaggagtggggccagctgggccccgcccagaaggagctgtaccaggaggtgatgctggagaactacaggaacctggtgtgcctgggcctgaccgtgagcaagcccgacgtgatcagccagctggagcagggcgaggccccctggaggctggagggcggcagcgccaggggcaggtgcctggactggggcatgaggaccagccccaagaaaaagagaaaagtctaagctgccttctgcggggcttgccttctggccatgcccttcttctctcccttgcacctgtacctcttggtctttgaataaagcctgagtaggaaggctagcaaaaaaaaaaaaaaaaaaaaaaaaaaaaaaaaaaaaaaaaaaaaaaaaaaaaaaaaaaaaaaaaaaaaaaaaaaaaaaaa

SEQ ID NO: 6360 - RNA, 5797 nt, synthetic construct
  source 1..5797: mol_type = other RNA
aggaaataagagagaaaagaagagtaagaagaaatataagagccaccatggcccctaagaagaagcgtaaagtgagccggatggaacgcctcgtctacgaggtgcggcagaagtgcagaaacatcgaggacatctgcatctcctgcggatctctgaacgtgaccctggagcacccactgttcatcggcggcatgtgccagaactgtaaaaactgttttctggagtgtgcctatcaatacgacgatgacggctaccagagctactgcaccatctgttgcggcggaagagaggtgctgatgtgtggaaataacaactgctgccggtgcttctgcgtggaatgcgtggacctgctggtgggccccggcgccgcccaggccgctattaaggaagatccttggaactgctacatgtgcggccacaagggcacatacggcctgctgagacggagagaggactggcctagcagactgcagatgttcttcgccaataaccacgaccaggagttcgacccccctaaggtgtaccctcccgtccccgccgagaagagaaagcccatccgggtcctgagcctgttcgatggcatcgccaccggtctgctggtgctgaaggacctgggcatccaggtggataggtacattgcctccgaggtgtgcgaggactccatcaccgtgggaatggtgcgtcatcagggcaagatcatgtacgtgggcgacgtgcggagcgtgacacagaagcatatccaggagtggggccctttcgacctggtgatcggcggcagcccttgcaatgacctgagcatcgtgaacccagcccggaagggcctgtacgagggaaccggcagactgttcttcgagttttacagactgctgcacgacgcccggcctaaggaaggcgacgaccggcccttcttttggctgttcgagaatgtggtggccatgggagtcagcgacaagcgggatattagccggttcctggagagcaaccccgtgatgatcgatgccaaggaagtgagcgccgcccaccgggccagatacttctggggcaatctgcctggcatgaacagacccctggccagcaccgtgaacgacaagctggagctgcaggagtgcctggagcacggccggatcgccaagttcagcaaggtgagaaccatcaccacccgaagcaacagcatcaaacaaggcaaggaccagcactttcctgtgttcatgaacgagaaggaggacatcctgtggtgtaccgagatggagagagtgttcgggttcccagtccactacacagatgtcagcaacatgtctagactggccagacagagactgctgggaagaagctggtccgtccctgtgatcagacacctgttcgcccctctgaaggagtacttcgcctgcgtgagcagcggcaacagcaacgccaacagccggggccccagcttctctagcggcctggtgccactgtccctgagagggagccacatgggccccatggagatctacaaaaccgtgagcgcctggaagcggcagcctgtgcgcgtgctgagcctgtttcggaatatcgataaagtcctgaaaagcctgggattcctggagagcggctctggctccggcggtggcaccctgaagtacgtggaggatgtgacaaacgtggtcagacgggatgtggagaagtggggccccttcgatctggtgtacggcagcacccaacccctgggcagctcttgtgaccggtgccctggctggtacatgtttcagttccaccggatcctgcagtacgccctgccgagacaggagtcccagcggccattcttttggattttcatggacaacttgctgctgaccgaggatgaccaggaaactaccactcggttcctgcagaccgaagccgtgaccctgcaggacgtgagaggccgggactaccagaacgccatgcgggtgtggtccaacatccctggactgaaaagcaagcacgcacctctgacccctaaagaagaggagtacctgcaggcccaggtgcggagcagaagcaagctggacgcccctaaggtggatctgctggtgaagaattgcctcctgcccctgagagagtacttcaagtatttcagccagaatagtctgcccctgggcggcccaagcagcggcgcccctcctcccagcggcggcagcccagccggctccccaacctctaccgaggagggcacctctgagtccgccacccccgagagcggccctggcacctccaccgagcccagcgagggcagcgcacccggcagccctgccggcagccccacctccacagaggagggaaccagcaccgagcccagcgaaggcagcgccccaggcaccagcaccgagcctagtgagggcggctctggcggcggcagcgcccaggagattaaacggatcaacaagatcagaagaagacttgtgaaagacagcaacaccaagaaggccggcaagacaggccccatgaaaaccctgctggttagagtgatgacacccgatctgagagagcggctggaaaacctgagaaagaagcctgaaaatatcccccagcccatcagcaatacatctagagccaacctgaataagctgctgaccgattacaccgaaatgaagaaggcgatcctgcatgtgtactgggaagagttccagaaggaccctgtgggcctgatgagccgggtggcccagcctgccagcaagaagatcgatcagaacaagctgaaacctgagatggacgagaagggcaacctgaccaccgccggctttgcctgctctcagtgtggccagcccctgttcgtgtacaagctggagcaggtgtctgagaagggcaaggcttacaccaactacttcggacggtgcaatgtggccgagcacgaaaagctgatcctgctggcccagctgaagcccgagaaggatagcgacgaagccgtgacatatagcctgggaaagtttgggcagagggccctggatttctacagcattcatgtgaccaaggagtccacccaccccgtgaagcccctggcccagatcgccggaaacagatacgcctccggacctgtgggaaaggccctgagcgacgcatgtatgggcacaatcgcctccttcctgtctaagtaccaggacatcatcatcgaacaccagaaggtggtgaagggcaaccagaagagactggagagcctgcgggagctggccggcaaggaaaacctggaataccctagcgtgaccctgccacctcagcctcacaccaaggagggcgttgatgcctacaacgaagtgatcgcccgggtgcgaatgtgggtgaacctgaacctgtggcagaagctgaagctaagcagagatgatgccaagcctctgctgagactgaagggattcccttcctttcctctggtcgagagacaggccaacgaagtggactggtgggacatggtgtgtaacgtgaagaagctgatcaacgagaaaaaggaggatggcaaggtgttttggcagaatctggctggctacaagagacaggaagccctgagaccatacctgagcagcgaggaagatcggaagaagggaaagaaattcgctcggtaccagctgggcgacctgctgctgcacctggaaaagaagcacggcgaggactggggaaaggtgtacgacgaggcctgggagcggattgacaagaaagtggaaggcctgagcaagcacatcaagctggaagaggaacggagaagcgaggacgcccagagcaaggccgccctgaccgactggctgcgggctaaggccagcttcgtgatcgagggcctgaaggaggccgacaaggacgagttctgcagatgcgagctgaagctgcagaagtggtacggggacctgcggggaaagcccttcgccatcgaagccgagaacagcatcctggacatcagcggcttcagcaagcagtacaactgtgccttcatctggcagaaggacggcgtgaagaagctgaacctgtacctgatcatcaactacttcaagggcggcaagctgcggttcaagaagatcaaacctgaagccttcgaagccaacagattctacaccgtgatcaacaaaaagagcggcgagatcgtgcccatggaggtgaacttcaacttcgacgaccccaacctgatcatcctgcctctggcctttggcaagagacagggcagagaattcatctggaacgacctgctgtccctggaaaccggcagcctgaagctggccaacggaagagtgatcgagaagacactgtacaacagaagaacccggcaggatgagcctgccctgttcgtggccctgaccttcgagcggcgggaggtcctggactcctccaatatcaaaccaatgaacctgatcggcgtggcaagaggcgaaaacatccccgccgtgatcgccctgaccgaccccgagggctgcccactgagccggtttaaggatagcctgggaaacccaacccacatcctgagaatcggcgagagctataaggagaagcagcggaccatccaggccaagaaggaggtggagcagcggagagccggcggctacagccggaagtacgccagcaaagccaagaatctggcagacgatatggtgagaaacaccgctagagatctgctgtactacgccgtgacccaggatgccatgctgatcttcgccaacctgagccggggcttcggccggcagggcaagcggaccttcatggccgagagacagtacacacggatggaggactggctgaccgccaagctggcctacgagggcctgagcaagacctacctgtccaagacactggcccagtacacctccaagacatgcagcaactgtgggtttaccatcaccagcgccgactacgacagggtgctggagaagctgaagaagacagcaacaggctggatgaccacaattaacggcaaggagctgaaggtggagggccagattacctactacaacagatacaagagacagaacgtagtcaaggacctgtccgtcgagctggatagactgagcgaagaatctgtgaacaacgacatctcctcctggacaaagggcagaagcggagaagctctgagcctcctgaagaaaagattctcccatagacccgtgcaggagaagttcgtgtgcctgaactgcggcttcgagacacacgcagccgagcaagccgccctgaacatcgccagatcctggctgttcctgcggagccaggagtacaagaaataccagacaaacaagacaaccggcaacaccgataagagagccttcgtcgagacctggcagtccttttaccggaagaagcttaaggaggtgtggaaacctgccgtgcggtctggcggatctggcggaggctccacaagcaggaagaggggcagcctgaccctggaggacgtggccgtggacttcacctgggaggagtggcagctgctggcccccgcccagaaggccctgtaccaggaggtgatgctggagaactacggcaacctggtgttcgtgggctaccaggccagcaagcccgccgccctgagcaggctggagaggggcgagccctggcccgtggaggacgaggtgcacagccagctgtgccccgagatgaggaaggacaccagccccaagaaaaagagaaaagtctaagctgccttctgcggggcttgccttctggccatgcccttcttctctcccttgcacctgtacctcttggtctttgaataaagcctgagtaggaaggctagcaaaaaaaaaaaaaaaaaaaaaaaaaaaaaaaaaaaaaaaaaaaaaaaaaaaaaaaaaaaaaaaaaaaaaaaaaaaaaaaa

SEQ ID NO: 6361 - RNA, 5797 nt, synthetic construct
  source 1..5797: mol_type = other RNA
aggaaataagagagaaaagaagagtaagaagaaatataagagccaccatggcccctaagaagaagcgtaaagtgagccggatggaacgcctcgtctacgaggtgcggcagaagtgcagaaacatcgaggacatctgcatctcctgcggatctctgaacgtgaccctggagcacccactgttcatcggcggcatgtgccagaactgtaaaaactgttttctggagtgtgcctatcaatacgacgatgacggctaccagagctactgcaccatctgttgcggcggaagagaggtgctgatgtgtggaaataacaactgctgccggtgcttctgcgtggaatgcgtggacctgctggtgggccccggcgccgcccaggccgctattaaggaagatccttggaactgctacatgtgcggccacaagggcacatacggcctgctgagacggagagaggactggcctagcagactgcagatgttcttcgccaataaccacgaccaggagttcgacccccctaaggtgtaccctcccgtccccgccgagaagagaaagcccatccgggtcctgagcctgttcgatggcatcgccaccggtctgctggtgctgaaggacctgggcatccaggtggataggtacattgcctccgaggtgtgcgaggactccatcaccgtgggaatggtgcgtcatcagggcaagatcatgtacgtgggcgacgtgcggagcgtgacacagaagcatatccaggagtggggccctttcgacctggtgatcggcggcagcccttgcaatgacctgagcatcgtgaacccagcccggaagggcctgtacgagggaaccggcagactgttcttcgagttttacagactgctgcacgacgcccggcctaaggaaggcgacgaccggcccttcttttggctgttcgagaatgtggtggccatgggagtcagcgacaagcgggatattagccggttcctggagagcaaccccgtgatgatcgatgccaaggaagtgagcgccgcccaccgggccagatacttctggggcaatctgcctggcatgaacagacccctggccagcaccgtgaacgacaagctggagctgcaggagtgcctggagcacggccggatcgccaagttcagcaaggtgagaaccatcaccacccgaagcaacagcatcaaacaaggcaaggaccagcactttcctgtgttcatgaacgagaaggaggacatcctgtggtgtaccgagatggagagagtgttcgggttcccagtccactacacagatgtcagcaacatgtctagactggccagacagagactgctgggaagaagctggtccgtccctgtgatcagacacctgttcgcccctctgaaggagtacttcgcctgcgtgagcagcggcaacagcaacgccaacagccggggccccagcttctctagcggcctggtgccactgtccctgagagggagccacatgggccccatggagatctacaaaaccgtgagcgcctggaagcggcagcctgtgcgcgtgctgagcctgtttcggaatatcgataaagtcctgaaaagcctgggattcctggagagcggctctggctccggcggtggcaccctgaagtacgtggaggatgtgacaaacgtggtcagacgggatgtggagaagtggggccccttcgatctggtgtacggcagcacccaacccctgggcagctcttgtgaccggtgccctggctggtacatgtttcagttccaccggatcctgcagtacgccctgccgagacaggagtcccagcggccattcttttggattttcatggacaacttgctgctgaccgaggatgaccaggaaactaccactcggttcctgcagaccgaagccgtgaccctgcaggacgtgagaggccgggactaccagaacgccatgcgggtgtggtccaacatccctggactgaaaagcaagcacgcacctctgacccctaaagaagaggagtacctgcaggcccaggtgcggagcagaagcaagctggacgcccctaaggtggatctgctggtgaagaattgcctcctgcccctgagagagtacttcaagtatttcagccagaatagtctgcccctgggcggcccaagcagcggcgcccctcctcccagcggcggcagcccagccggctccccaacctctaccgaggagggcacctctgagtccgccacccccgagagcggccctggcacctccaccgagcccagcgagggcagcgcacccggcagccctgccggcagccccacctccacagaggagggaaccagcaccgagcccagcgaaggcagcgccccaggcaccagcaccgagcctagtgagggcggctctggcggcggcagcgcccaggagattaaacggatcaacaagatcagaagaagacttgtgaaagacagcaacaccaagaaggccggcaagacaggccccatgaaaaccctgctggttagagtgatgacacccgatctgagagagcggctggaaaacctgagaaagaagcctgaaaatatcccccagcccatcagcaatacatctagagccaacctgaataagctgctgaccgattacaccgaaatgaagaaggcgatcctgcatgtgtactgggaagagttccagaaggaccctgtgggcctgatgagccgggtggcccagcctgccagcaagaagatcgatcagaacaagctgaaacctgagatggacgagaagggcaacctgaccaccgccggctttgcctgctctcagtgtggccagcccctgttcgtgtacaagctggagcaggtgtctgagaagggcaaggcttacaccaactacttcggacggtgcaatgtggccgagcacgaaaagctgatcctgctggcccagctgaagcccgagaaggatagcgacgaagccgtgacatatagcctgggaaagtttgggcagagggccctggatttctacagcattcatgtgaccaaggagtccacccaccccgtgaagcccctggcccagatcgccggaaacagatacgcctccggacctgtgggaaaggccctgagcgacgcatgtatgggcacaatcgcctccttcctgtctaagtaccaggacatcatcatcgaacaccagaaggtggtgaagggcaaccagaagagactggagagcctgcgggagctggccggcaaggaaaacctggaataccctagcgtgaccctgccacctcagcctcacaccaaggagggcgttgatgcctacaacgaagtgatcgcccgggtgcgaatgtgggtgaacctgaacctgtggcagaagctgaagctaagcagagatgatgccaagcctctgctgagactgaagggattcccttcctttcctctggtcgagagacaggccaacgaagtggactggtgggacatggtgtgtaacgtgaagaagctgatcaacgagaaaaaggaggatggcaaggtgttttggcagaatctggctggctacaagagacaggaagccctgagaccatacctgagcagcgaggaagatcggaagaagggaaagaaattcgctcggtaccagctgggcgacctgctgctgcacctggaaaagaagcacggcgaggactggggaaaggtgtacgacgaggcctgggagcggattgacaagaaagtggaaggcctgagcaagcacatcaagctggaagaggaacggagaagcgaggacgcccagagcaaggccgccctgaccgactggctgcgggctaaggccagcttcgtgatcgagggcctgaaggaggccgacaaggacgagttctgcagatgcgagctgaagctgcagaagtggtacggggacctgcggggaaagcccttcgccatcgaagccgagaacagcatcctggacatcagcggcttcagcaagcagtacaactgtgccttcatctggcagaaggacggcgtgaagaagctgaacctgtacctgatcatcaactacttcaagggcggcaagctgcggttcaagaagatcaaacctgaagccttcgaagccaacagattctacaccgtgatcaacaaaaagagcggcgagatcgtgcccatggaggtgaacttcaacttcgacgaccccaacctgatcatcctgcctctggcctttggcaagagacagggcagagaattcatctggaacgacctgctgtccctggaaaccggcagcctgaagctggccaacggaagagtgatcgagaagacactgtacaacagaagaacccggcaggatgagcctgccctgttcgtggccctgaccttcgagcggcgggaggtcctggactcctccaatatcaaaccaatgaacctgatcggcgtggcaagaggcgaaaacatccccgccgtgatcgccctgaccgaccccgagggctgcccactgagccggtttaaggatagcctgggaaacccaacccacatcctgagaatcggcgagagctataaggagaagcagcggaccatccaggccaagaaggaggtggagcagcggagagccggcggctacagccggaagtacgccagcaaagccaagaatctggcagacgatatggtgagaaacaccgctagagatctgctgtactacgccgtgacccaggatgccatgctgatcttcgccaacctgagccggggcttcggccggcagggcaagcggaccttcatggccgagagacagtacacacggatggaggactggctgaccgccaagctggcctacgagggcctgagcaagacctacctgtccaagacactggcccagtacacctccaagacatgcagcaactgtgggtttaccatcaccagcgccgactacgacagggtgctggagaagctgaagaagacagcaacaggctggatgaccacaattaacggcaaggagctgaaggtggagggccagattacctactacaacagatacaagagacagaacgtagtcaaggacctgtccgtcgagctggatagactgagcgaagaatctgtgaacaacgacatctcctcctggacaaagggcagaagcggagaagctctgagcctcctgaagaaaagattctcccatagacccgtgcaggagaagttcgtgtgcctgaactgcggcttcgagacacacgcagccgagcaagccgccctgaacatcgccagatcctggctgttcctgcggagccaggagtacaagaaataccagacaaacaagacaaccggcaacaccgataagagagccttcgtcgagacctggcagtccttttaccggaagaagcttaaggaggtgtggaaacctgccgtgcggtctggcggatctggcggaggctccacaagcccccaggagcaggtgaccttcagcgacgtggccgtggacttcaccgtggaggagtggggcaggctggcccccgcccagaaggagctgtacaggagcgtgatgctggagaactacaggaacctggtgtgcctgggcctggccgccagcagccccgacgtgatcggccagctggagaggggcgagggcccctggagggtggagggcaaggtgaggaagggcctgtgcgccgaccagaagaccagcaccagccccaagaaaaagagaaaagtctaagctgccttctgcggggcttgccttctggccatgcccttcttctctcccttgcacctgtacctcttggtctttgaataaagcctgagtaggaaggctagcaaaaaaaaaaaaaaaaaaaaaaaaaaaaaaaaaaaaaaaaaaaaaaaaaaaaaaaaaaaaaaaaaaaaaaaaaaaaaaaa

SEQ ID NO: 6362 - RNA, 5797 nt, synthetic construct
  source 1..5797: mol_type = other RNA
aggaaataagagagaaaagaagagtaagaagaaatataagagccaccatggcccctaagaagaagcgtaaagtgagccggatggaacgcctcgtctacgaggtgcggcagaagtgcagaaacatcgaggacatctgcatctcctgcggatctctgaacgtgaccctggagcacccactgttcatcggcggcatgtgccagaactgtaaaaactgttttctggagtgtgcctatcaatacgacgatgacggctaccagagctactgcaccatctgttgcggcggaagagaggtgctgatgtgtggaaataacaactgctgccggtgcttctgcgtggaatgcgtggacctgctggtgggccccggcgccgcccaggccgctattaaggaagatccttggaactgctacatgtgcggccacaagggcacatacggcctgctgagacggagagaggactggcctagcagactgcagatgttcttcgccaataaccacgaccaggagttcgacccccctaaggtgtaccctcccgtccccgccgagaagagaaagcccatccgggtcctgagcctgttcgatggcatcgccaccggtctgctggtgctgaaggacctgggcatccaggtggataggtacattgcctccgaggtgtgcgaggactccatcaccgtgggaatggtgcgtcatcagggcaagatcatgtacgtgggcgacgtgcggagcgtgacacagaagcatatccaggagtggggccctttcgacctggtgatcggcggcagcccttgcaatgacctgagcatcgtgaacccagcccggaagggcctgtacgagggaaccggcagactgttcttcgagttttacagactgctgcacgacgcccggcctaaggaaggcgacgaccggcccttcttttggctgttcgagaatgtggtggccatgggagtcagcgacaagcgggatattagccggttcctggagagcaaccccgtgatgatcgatgccaaggaagtgagcgccgcccaccgggccagatacttctggggcaatctgcctggcatgaacagacccctggccagcaccgtgaacgacaagctggagctgcaggagtgcctggagcacggccggatcgccaagttcagcaaggtgagaaccatcaccacccgaagcaacagcatcaaacaaggcaaggaccagcactttcctgtgttcatgaacgagaaggaggacatcctgtggtgtaccgagatggagagagtgttcgggttcccagtccactacacagatgtcagcaacatgtctagactggccagacagagactgctgggaagaagctggtccgtccctgtgatcagacacctgttcgcccctctgaaggagtacttcgcctgcgtgagcagcggcaacagcaacgccaacagccggggccccagcttctctagcggcctggtgccactgtccctgagagggagccacatgggccccatggagatctacaaaaccgtgagcgcctggaagcggcagcctgtgcgcgtgctgagcctgtttcggaatatcgataaagtcctgaaaagcctgggattcctggagagcggctctggctccggcggtggcaccctgaagtacgtggaggatgtgacaaacgtggtcagacgggatgtggagaagtggggccccttcgatctggtgtacggcagcacccaacccctgggcagctcttgtgaccggtgccctggctggtacatgtttcagttccaccggatcctgcagtacgccctgccgagacaggagtcccagcggccattcttttggattttcatggacaacttgctgctgaccgaggatgaccaggaaactaccactcggttcctgcagaccgaagccgtgaccctgcaggacgtgagaggccgggactaccagaacgccatgcgggtgtggtccaacatccctggactgaaaagcaagcacgcacctctgacccctaaagaagaggagtacctgcaggcccaggtgcggagcagaagcaagctggacgcccctaaggtggatctgctggtgaagaattgcctcctgcccctgagagagtacttcaagtatttcagccagaatagtctgcccctgggcggcccaagcagcggcgcccctcctcccagcggcggcagcccagccggctccccaacctctaccgaggagggcacctctgagtccgccacccccgagagcggccctggcacctccaccgagcccagcgagggcagcgcacccggcagccctgccggcagccccacctccacagaggagggaaccagcaccgagcccagcgaaggcagcgccccaggcaccagcaccgagcctagtgagggcggctctggcggcggcagcgcccaggagattaaacggatcaacaagatcagaagaagacttgtgaaagacagcaacaccaagaaggccggcaagacaggccccatgaaaaccctgctggttagagtgatgacacccgatctgagagagcggctggaaaacctgagaaagaagcctgaaaatatcccccagcccatcagcaatacatctagagccaacctgaataagctgctgaccgattacaccgaaatgaagaaggcgatcctgcatgtgtactgggaagagttccagaaggaccctgtgggcctgatgagccgggtggcccagcctgccagcaagaagatcgatcagaacaagctgaaacctgagatggacgagaagggcaacctgaccaccgccggctttgcctgctctcagtgtggccagcccctgttcgtgtacaagctggagcaggtgtctgagaagggcaaggcttacaccaactacttcggacggtgcaatgtggccgagcacgaaaagctgatcctgctggcccagctgaagcccgagaaggatagcgacgaagccgtgacatatagcctgggaaagtttgggcagagggccctggatttctacagcattcatgtgaccaaggagtccacccaccccgtgaagcccctggcccagatcgccggaaacagatacgcctccggacctgtgggaaaggccctgagcgacgcatgtatgggcacaatcgcctccttcctgtctaagtaccaggacatcatcatcgaacaccagaaggtggtgaagggcaaccagaagagactggagagcctgcgggagctggccggcaaggaaaacctggaataccctagcgtgaccctgccacctcagcctcacaccaaggagggcgttgatgcctacaacgaagtgatcgcccgggtgcgaatgtgggtgaacctgaacctgtggcagaagctgaagctaagcagagatgatgccaagcctctgctgagactgaagggattcccttcctttcctctggtcgagagacaggccaacgaagtggactggtgggacatggtgtgtaacgtgaagaagctgatcaacgagaaaaaggaggatggcaaggtgttttggcagaatctggctggctacaagagacaggaagccctgagaccatacctgagcagcgaggaagatcggaagaagggaaagaaattcgctcggtaccagctgggcgacctgctgctgcacctggaaaagaagcacggcgaggactggggaaaggtgtacgacgaggcctgggagcggattgacaagaaagtggaaggcctgagcaagcacatcaagctggaagaggaacggagaagcgaggacgcccagagcaaggccgccctgaccgactggctgcgggctaaggccagcttcgtgatcgagggcctgaaggaggccgacaaggacgagttctgcagatgcgagctgaagctgcagaagtggtacggggacctgcggggaaagcccttcgccatcgaagccgagaacagcatcctggacatcagcggcttcagcaagcagtacaactgtgccttcatctggcagaaggacggcgtgaagaagctgaacctgtacctgatcatcaactacttcaagggcggcaagctgcggttcaagaagatcaaacctgaagccttcgaagccaacagattctacaccgtgatcaacaaaaagagcggcgagatcgtgcccatggaggtgaacttcaacttcgacgaccccaacctgatcatcctgcctctggcctttggcaagagacagggcagagaattcatctggaacgacctgctgtccctggaaaccggcagcctgaagctggccaacggaagagtgatcgagaagacactgtacaacagaagaacccggcaggatgagcctgccctgttcgtggccctgaccttcgagcggcgggaggtcctggactcctccaatatcaaaccaatgaacctgatcggcgtggcaagaggcgaaaacatccccgccgtgatcgccctgaccgaccccgagggctgcccactgagccggtttaaggatagcctgggaaacccaacccacatcctgagaatcggcgagagctataaggagaagcagcggaccatccaggccaagaaggaggtggagcagcggagagccggcggctacagccggaagtacgccagcaaagccaagaatctggcagacgatatggtgagaaacaccgctagagatctgctgtactacgccgtgacccaggatgccatgctgatcttcgccaacctgagccggggcttcggccggcagggcaagcggaccttcatggccgagagacagtacacacggatggaggactggctgaccgccaagctggcctacgagggcctgagcaagacctacctgtccaagacactggcccagtacacctccaagacatgcagcaactgtgggtttaccatcaccagcgccgactacgacagggtgctggagaagctgaagaagacagcaacaggctggatgaccacaattaacggcaaggagctgaaggtggagggccagattacctactacaacagatacaagagacagaacgtagtcaaggacctgtccgtcgagctggatagactgagcgaagaatctgtgaacaacgacatctcctcctggacaaagggcagaagcggagaagctctgagcctcctgaagaaaagattctcccatagacccgtgcaggagaagttcgtgtgcctgaactgcggcttcgagacacacgcagccgagcaagccgccctgaacatcgccagatcctggctgttcctgcggagccaggagtacaagaaataccagacaaacaagacaaccggcaacaccgataagagagccttcgtcgagacctggcagtccttttaccggaagaagcttaaggaggtgtggaaacctgccgtgcggtctggcggatctggcggaggctccacaagcatggccgccggccagagggaggccaggccccaggtgagcctgaccttcgaggacgtggccgtgctgttcaccagggacgagtggaggaagctggcccccagccagaggaacctgtacagggacgtgatgctggagaactacaggaacctgctgagcctgggcctgcccttcaccaagccccaggtgatcagcctgctgcagcagggcgaggacccctgggaggtggagaaggagggcagcggcaccagccccaagaaaaagagaaaagtctaagctgccttctgcggggcttgccttctggccatgcccttcttctctcccttgcacctgtacctcttggtctttgaataaagcctgagtaggaaggctagcaaaaaaaaaaaaaaaaaaaaaaaaaaaaaaaaaaaaaaaaaaaaaaaaaaaaaaaaaaaaaaaaaaaaaaaaaaaaaaaa

SEQ ID NO: 6363 - RNA, 5797 nt, synthetic construct
  source 1..5797: mol_type = other RNA
aggaaataagagagaaaagaagagtaagaagaaatataagagccaccatggcccctaagaagaagcgtaaagtgagccggatggaacgcctcgtctacgaggtgcggcagaagtgcagaaacatcgaggacatctgcatctcctgcggatctctgaacgtgaccctggagcacccactgttcatcggcggcatgtgccagaactgtaaaaactgttttctggagtgtgcctatcaatacgacgatgacggctaccagagctactgcaccatctgttgcggcggaagagaggtgctgatgtgtggaaataacaactgctgccggtgcttctgcgtggaatgcgtggacctgctggtgggccccggcgccgcccaggccgctattaaggaagatccttggaactgctacatgtgcggccacaagggcacatacggcctgctgagacggagagaggactggcctagcagactgcagatgttcttcgccaataaccacgaccaggagttcgacccccctaaggtgtaccctcccgtccccgccgagaagagaaagcccatccgggtcctgagcctgttcgatggcatcgccaccggtctgctggtgctgaaggacctgggcatccaggtggataggtacattgcctccgaggtgtgcgaggactccatcaccgtgggaatggtgcgtcatcagggcaagatcatgtacgtgggcgacgtgcggagcgtgacacagaagcatatccaggagtggggccctttcgacctggtgatcggcggcagcccttgcaatgacctgagcatcgtgaacccagcccggaagggcctgtacgagggaaccggcagactgttcttcgagttttacagactgctgcacgacgcccggcctaaggaaggcgacgaccggcccttcttttggctgttcgagaatgtggtggccatgggagtcagcgacaagcgggatattagccggttcctggagagcaaccccgtgatgatcgatgccaaggaagtgagcgccgcccaccgggccagatacttctggggcaatctgcctggcatgaacagacccctggccagcaccgtgaacgacaagctggagctgcaggagtgcctggagcacggccggatcgccaagttcagcaaggtgagaaccatcaccacccgaagcaacagcatcaaacaaggcaaggaccagcactttcctgtgttcatgaacgagaaggaggacatcctgtggtgtaccgagatggagagagtgttcgggttcccagtccactacacagatgtcagcaacatgtctagactggccagacagagactgctgggaagaagctggtccgtccctgtgatcagacacctgttcgcccctctgaaggagtacttcgcctgcgtgagcagcggcaacagcaacgccaacagccggggccccagcttctctagcggcctggtgccactgtccctgagagggagccacatgggccccatggagatctacaaaaccgtgagcgcctggaagcggcagcctgtgcgcgtgctgagcctgtttcggaatatcgataaagtcctgaaaagcctgggattcctggagagcggctctggctccggcggtggcaccctgaagtacgtggaggatgtgacaaacgtggtcagacgggatgtggagaagtggggccccttcgatctggtgtacggcagcacccaacccctgggcagctcttgtgaccggtgccctggctggtacatgtttcagttccaccggatcctgcagtacgccctgccgagacaggagtcccagcggccattcttttggattttcatggacaacttgctgctgaccgaggatgaccaggaaactaccactcggttcctgcagaccgaagccgtgaccctgcaggacgtgagaggccgggactaccagaacgccatgcgggtgtggtccaacatccctggactgaaaagcaagcacgcacctctgacccctaaagaagaggagtacctgcaggcccaggtgcggagcagaagcaagctggacgcccctaaggtggatctgctggtgaagaattgcctcctgcccctgagagagtacttcaagtatttcagccagaatagtctgcccctgggcggcccaagcagcggcgcccctcctcccagcggcggcagcccagccggctccccaacctctaccgaggagggcacctctgagtccgccacccccgagagcggccctggcacctccaccgagcccagcgagggcagcgcacccggcagccctgccggcagccccacctccacagaggagggaaccagcaccgagcccagcgaaggcagcgccccaggcaccagcaccgagcctagtgagggcggctctggcggcggcagcgcccaggagattaaacggatcaacaagatcagaagaagacttgtgaaagacagcaacaccaagaaggccggcaagacaggccccatgaaaaccctgctggttagagtgatgacacccgatctgagagagcggctggaaaacctgagaaagaagcctgaaaatatcccccagcccatcagcaatacatctagagccaacctgaataagctgctgaccgattacaccgaaatgaagaaggcgatcctgcatgtgtactgggaagagttccagaaggaccctgtgggcctgatgagccgggtggcccagcctgccagcaagaagatcgatcagaacaagctgaaacctgagatggacgagaagggcaacctgaccaccgccggctttgcctgctctcagtgtggccagcccctgttcgtgtacaagctggagcaggtgtctgagaagggcaaggcttacaccaactacttcggacggtgcaatgtggccgagcacgaaaagctgatcctgctggcccagctgaagcccgagaaggatagcgacgaagccgtgacatatagcctgggaaagtttgggcagagggccctggatttctacagcattcatgtgaccaaggagtccacccaccccgtgaagcccctggcccagatcgccggaaacagatacgcctccggacctgtgggaaaggccctgagcgacgcatgtatgggcacaatcgcctccttcctgtctaagtaccaggacatcatcatcgaacaccagaaggtggtgaagggcaaccagaagagactggagagcctgcgggagctggccggcaaggaaaacctggaataccctagcgtgaccctgccacctcagcctcacaccaaggagggcgttgatgcctacaacgaagtgatcgcccgggtgcgaatgtgggtgaacctgaacctgtggcagaagctgaagctaagcagagatgatgccaagcctctgctgagactgaagggattcccttcctttcctctggtcgagagacaggccaacgaagtggactggtgggacatggtgtgtaacgtgaagaagctgatcaacgagaaaaaggaggatggcaaggtgttttggcagaatctggctggctacaagagacaggaagccctgagaccatacctgagcagcgaggaagatcggaagaagggaaagaaattcgctcggtaccagctgggcgacctgctgctgcacctggaaaagaagcacggcgaggactggggaaaggtgtacgacgaggcctgggagcggattgacaagaaagtggaaggcctgagcaagcacatcaagctggaagaggaacggagaagcgaggacgcccagagcaaggccgccctgaccgactggctgcgggctaaggccagcttcgtgatcgagggcctgaaggaggccgacaaggacgagttctgcagatgcgagctgaagctgcagaagtggtacggggacctgcggggaaagcccttcgccatcgaagccgagaacagcatcctggacatcagcggcttcagcaagcagtacaactgtgccttcatctggcagaaggacggcgtgaagaagctgaacctgtacctgatcatcaactacttcaagggcggcaagctgcggttcaagaagatcaaacctgaagccttcgaagccaacagattctacaccgtgatcaacaaaaagagcggcgagatcgtgcccatggaggtgaacttcaacttcgacgaccccaacctgatcatcctgcctctggcctttggcaagagacagggcagagaattcatctggaacgacctgctgtccctggaaaccggcagcctgaagctggccaacggaagagtgatcgagaagacactgtacaacagaagaacccggcaggatgagcctgccctgttcgtggccctgaccttcgagcggcgggaggtcctggactcctccaatatcaaaccaatgaacctgatcggcgtggcaagaggcgaaaacatccccgccgtgatcgccctgaccgaccccgagggctgcccactgagccggtttaaggatagcctgggaaacccaacccacatcctgagaatcggcgagagctataaggagaagcagcggaccatccaggccaagaaggaggtggagcagcggagagccggcggctacagccggaagtacgccagcaaagccaagaatctggcagacgatatggtgagaaacaccgctagagatctgctgtactacgccgtgacccaggatgccatgctgatcttcgccaacctgagccggggcttcggccggcagggcaagcggaccttcatggccgagagacagtacacacggatggaggactggctgaccgccaagctggcctacgagggcctgagcaagacctacctgtccaagacactggcccagtacacctccaagacatgcagcaactgtgggtttaccatcaccagcgccgactacgacagggtgctggagaagctgaagaagacagcaacaggctggatgaccacaattaacggcaaggagctgaaggtggagggccagattacctactacaacagatacaagagacagaacgtagtcaaggacctgtccgtcgagctggatagactgagcgaagaatctgtgaacaacgacatctcctcctggacaaagggcagaagcggagaagctctgagcctcctgaagaaaagattctcccatagacccgtgcaggagaagttcgtgtgcctgaactgcggcttcgagacacacgcagccgagcaagccgccctgaacatcgccagatcctggctgttcctgcggagccaggagtacaagaaataccagacaaacaagacaaccggcaacaccgataagagagccttcgtcgagacctggcagtccttttaccggaagaagcttaaggaggtgtggaaacctgccgtgcggtctggcggatctggcggaggctccacaagcatggacagcgtggccttcgaggacgtggccatcaacttcacctgcgaggagtgggccctgctgggccccagccagaagagcctgtacagggacgtgatgcaggagaccatcaggaacctggactgcatcggcatgacctggcagacccacgacatcgaggaggaccagtacaaggacctgaggaggaacctgaggtgccacatggtggagaggagctgcgagatcaaggacaacagccagtgcaccagccccaagaaaaagagaaaagtctaagctgccttctgcggggcttgccttctggccatgcccttcttctctcccttgcacctgtacctcttggtctttgaataaagcctgagtaggaaggctagcaaaaaaaaaaaaaaaaaaaaaaaaaaaaaaaaaaaaaaaaaaaaaaaaaaaaaaaaaaaaaaaaaaaaaaaaaaaaaaaa

SEQ ID NO: 6364 - RNA, 5797 nt, synthetic construct
  source 1..5797: mol_type = other RNA
aggaaataagagagaaaagaagagtaagaagaaatataagagccaccatggcccctaagaagaagcgtaaagtgagccggatggaacgcctcgtctacgaggtgcggcagaagtgcagaaacatcgaggacatctgcatctcctgcggatctctgaacgtgaccctggagcacccactgttcatcggcggcatgtgccagaactgtaaaaactgttttctggagtgtgcctatcaatacgacgatgacggctaccagagctactgcaccatctgttgcggcggaagagaggtgctgatgtgtggaaataacaactgctgccggtgcttctgcgtggaatgcgtggacctgctggtgggccccggcgccgcccaggccgctattaaggaagatccttggaactgctacatgtgcggccacaagggcacatacggcctgctgagacggagagaggactggcctagcagactgcagatgttcttcgccaataaccacgaccaggagttcgacccccctaaggtgtaccctcccgtccccgccgagaagagaaagcccatccgggtcctgagcctgttcgatggcatcgccaccggtctgctggtgctgaaggacctgggcatccaggtggataggtacattgcctccgaggtgtgcgaggactccatcaccgtgggaatggtgcgtcatcagggcaagatcatgtacgtgggcgacgtgcggagcgtgacacagaagcatatccaggagtggggccctttcgacctggtgatcggcggcagcccttgcaatgacctgagcatcgtgaacccagcccggaagggcctgtacgagggaaccggcagactgttcttcgagttttacagactgctgcacgacgcccggcctaaggaaggcgacgaccggcccttcttttggctgttcgagaatgtggtggccatgggagtcagcgacaagcgggatattagccggttcctggagagcaaccccgtgatgatcgatgccaaggaagtgagcgccgcccaccgggccagatacttctggggcaatctgcctggcatgaacagacccctggccagcaccgtgaacgacaagctggagctgcaggagtgcctggagcacggccggatcgccaagttcagcaaggtgagaaccatcaccacccgaagcaacagcatcaaacaaggcaaggaccagcactttcctgtgttcatgaacgagaaggaggacatcctgtggtgtaccgagatggagagagtgttcgggttcccagtccactacacagatgtcagcaacatgtctagactggccagacagagactgctgggaagaagctggtccgtccctgtgatcagacacctgttcgcccctctgaaggagtacttcgcctgcgtgagcagcggcaacagcaacgccaacagccggggccccagcttctctagcggcctggtgccactgtccctgagagggagccacatgggccccatggagatctacaaaaccgtgagcgcctggaagcggcagcctgtgcgcgtgctgagcctgtttcggaatatcgataaagtcctgaaaagcctgggattcctggagagcggctctggctccggcggtggcaccctgaagtacgtggaggatgtgacaaacgtggtcagacgggatgtggagaagtggggccccttcgatctggtgtacggcagcacccaacccctgggcagctcttgtgaccggtgccctggctggtacatgtttcagttccaccggatcctgcagtacgccctgccgagacaggagtcccagcggccattcttttggattttcatggacaacttgctgctgaccgaggatgaccaggaaactaccactcggttcctgcagaccgaagccgtgaccctgcaggacgtgagaggccgggactaccagaacgccatgcgggtgtggtccaacatccctggactgaaaagcaagcacgcacctctgacccctaaagaagaggagtacctgcaggcccaggtgcggagcagaagcaagctggacgcccctaaggtggatctgctggtgaagaattgcctcctgcccctgagagagtacttcaagtatttcagccagaatagtctgcccctgggcggcccaagcagcggcgcccctcctcccagcggcggcagcccagccggctccccaacctctaccgaggagggcacctctgagtccgccacccccgagagcggccctggcacctccaccgagcccagcgagggcagcgcacccggcagccctgccggcagccccacctccacagaggagggaaccagcaccgagcccagcgaaggcagcgccccaggcaccagcaccgagcctagtgagggcggctctggcggcggcagcgcccaggagattaaacggatcaacaagatcagaagaagacttgtgaaagacagcaacaccaagaaggccggcaagacaggccccatgaaaaccctgctggttagagtgatgacacccgatctgagagagcggctggaaaacctgagaaagaagcctgaaaatatcccccagcccatcagcaatacatctagagccaacctgaataagctgctgaccgattacaccgaaatgaagaaggcgatcctgcatgtgtactgggaagagttccagaaggaccctgtgggcctgatgagccgggtggcccagcctgccagcaagaagatcgatcagaacaagctgaaacctgagatggacgagaagggcaacctgaccaccgccggctttgcctgctctcagtgtggccagcccctgttcgtgtacaagctggagcaggtgtctgagaagggcaaggcttacaccaactacttcggacggtgcaatgtggccgagcacgaaaagctgatcctgctggcccagctgaagcccgagaaggatagcgacgaagccgtgacatatagcctgggaaagtttgggcagagggccctggatttctacagcattcatgtgaccaaggagtccacccaccccgtgaagcccctggcccagatcgccggaaacagatacgcctccggacctgtgggaaaggccctgagcgacgcatgtatgggcacaatcgcctccttcctgtctaagtaccaggacatcatcatcgaacaccagaaggtggtgaagggcaaccagaagagactggagagcctgcgggagctggccggcaaggaaaacctggaataccctagcgtgaccctgccacctcagcctcacaccaaggagggcgttgatgcctacaacgaagtgatcgcccgggtgcgaatgtgggtgaacctgaacctgtggcagaagctgaagctaagcagagatgatgccaagcctctgctgagactgaagggattcccttcctttcctctggtcgagagacaggccaacgaagtggactggtgggacatggtgtgtaacgtgaagaagctgatcaacgagaaaaaggaggatggcaaggtgttttggcagaatctggctggctacaagagacaggaagccctgagaccatacctgagcagcgaggaagatcggaagaagggaaagaaattcgctcggtaccagctgggcgacctgctgctgcacctggaaaagaagcacggcgaggactggggaaaggtgtacgacgaggcctgggagcggattgacaagaaagtggaaggcctgagcaagcacatcaagctggaagaggaacggagaagcgaggacgcccagagcaaggccgccctgaccgactggctgcgggctaaggccagcttcgtgatcgagggcctgaaggaggccgacaaggacgagttctgcagatgcgagctgaagctgcagaagtggtacggggacctgcggggaaagcccttcgccatcgaagccgagaacagcatcctggacatcagcggcttcagcaagcagtacaactgtgccttcatctggcagaaggacggcgtgaagaagctgaacctgtacctgatcatcaactacttcaagggcggcaagctgcggttcaagaagatcaaacctgaagccttcgaagccaacagattctacaccgtgatcaacaaaaagagcggcgagatcgtgcccatggaggtgaacttcaacttcgacgaccccaacctgatcatcctgcctctggcctttggcaagagacagggcagagaattcatctggaacgacctgctgtccctggaaaccggcagcctgaagctggccaacggaagagtgatcgagaagacactgtacaacagaagaacccggcaggatgagcctgccctgttcgtggccctgaccttcgagcggcgggaggtcctggactcctccaatatcaaaccaatgaacctgatcggcgtggcaagaggcgaaaacatccccgccgtgatcgccctgaccgaccccgagggctgcccactgagccggtttaaggatagcctgggaaacccaacccacatcctgagaatcggcgagagctataaggagaagcagcggaccatccaggccaagaaggaggtggagcagcggagagccggcggctacagccggaagtacgccagcaaagccaagaatctggcagacgatatggtgagaaacaccgctagagatctgctgtactacgccgtgacccaggatgccatgctgatcttcgccaacctgagccggggcttcggccggcagggcaagcggaccttcatggccgagagacagtacacacggatggaggactggctgaccgccaagctggcctacgagggcctgagcaagacctacctgtccaagacactggcccagtacacctccaagacatgcagcaactgtgggtttaccatcaccagcgccgactacgacagggtgctggagaagctgaagaagacagcaacaggctggatgaccacaattaacggcaaggagctgaaggtggagggccagattacctactacaacagatacaagagacagaacgtagtcaaggacctgtccgtcgagctggatagactgagcgaagaatctgtgaacaacgacatctcctcctggacaaagggcagaagcggagaagctctgagcctcctgaagaaaagattctcccatagacccgtgcaggagaagttcgtgtgcctgaactgcggcttcgagacacacgcagccgagcaagccgccctgaacatcgccagatcctggctgttcctgcggagccaggagtacaagaaataccagacaaacaagacaaccggcaacaccgataagagagccttcgtcgagacctggcagtccttttaccggaagaagcttaaggaggtgtggaaacctgccgtgcggtctggcggatctggcggaggctccacaagcccccagggcagcgtgaccttcgaggacgtggccgtggacttcagccaggaggagtgggagctgctggaccccgcccagaggaccctgtacagggaggtgatgctggagacctgcaggaacctggtgagcctgggctgcagcctgtgccagcccgtggcccccccccacctggagcagggcgaggccgtgtggatggtggacaggggcatcccccaggccttctgcagcgactgggagaccaggaccagccccaagaaaaagagaaaagtctaagctgccttctgcggggcttgccttctggccatgcccttcttctctcccttgcacctgtacctcttggtctttgaataaagcctgagtaggaaggctagcaaaaaaaaaaaaaaaaaaaaaaaaaaaaaaaaaaaaaaaaaaaaaaaaaaaaaaaaaaaaaaaaaaaaaaaaaaaaaaaa

SEQ ID NO: 6365 - RNA, 5797 nt, synthetic construct
  source 1..5797: mol_type = other RNA
aggaaataagagagaaaagaagagtaagaagaaatataagagccaccatggcccctaagaagaagcgtaaagtgagccggatggaacgcctcgtctacgaggtgcggcagaagtgcagaaacatcgaggacatctgcatctcctgcggatctctgaacgtgaccctggagcacccactgttcatcggcggcatgtgccagaactgtaaaaactgttttctggagtgtgcctatcaatacgacgatgacggctaccagagctactgcaccatctgttgcggcggaagagaggtgctgatgtgtggaaataacaactgctgccggtgcttctgcgtggaatgcgtggacctgctggtgggccccggcgccgcccaggccgctattaaggaagatccttggaactgctacatgtgcggccacaagggcacatacggcctgctgagacggagagaggactggcctagcagactgcagatgttcttcgccaataaccacgaccaggagttcgacccccctaaggtgtaccctcccgtccccgccgagaagagaaagcccatccgggtcctgagcctgttcgatggcatcgccaccggtctgctggtgctgaaggacctgggcatccaggtggataggtacattgcctccgaggtgtgcgaggactccatcaccgtgggaatggtgcgtcatcagggcaagatcatgtacgtgggcgacgtgcggagcgtgacacagaagcatatccaggagtggggccctttcgacctggtgatcggcggcagcccttgcaatgacctgagcatcgtgaacccagcccggaagggcctgtacgagggaaccggcagactgttcttcgagttttacagactgctgcacgacgcccggcctaaggaaggcgacgaccggcccttcttttggctgttcgagaatgtggtggccatgggagtcagcgacaagcgggatattagccggttcctggagagcaaccccgtgatgatcgatgccaaggaagtgagcgccgcccaccgggccagatacttctggggcaatctgcctggcatgaacagacccctggccagcaccgtgaacgacaagctggagctgcaggagtgcctggagcacggccggatcgccaagttcagcaaggtgagaaccatcaccacccgaagcaacagcatcaaacaaggcaaggaccagcactttcctgtgttcatgaacgagaaggaggacatcctgtggtgtaccgagatggagagagtgttcgggttcccagtccactacacagatgtcagcaacatgtctagactggccagacagagactgctgggaagaagctggtccgtccctgtgatcagacacctgttcgcccctctgaaggagtacttcgcctgcgtgagcagcggcaacagcaacgccaacagccggggccccagcttctctagcggcctggtgccactgtccctgagagggagccacatgggccccatggagatctacaaaaccgtgagcgcctggaagcggcagcctgtgcgcgtgctgagcctgtttcggaatatcgataaagtcctgaaaagcctgggattcctggagagcggctctggctccggcggtggcaccctgaagtacgtggaggatgtgacaaacgtggtcagacgggatgtggagaagtggggccccttcgatctggtgtacggcagcacccaacccctgggcagctcttgtgaccggtgccctggctggtacatgtttcagttccaccggatcctgcagtacgccctgccgagacaggagtcccagcggccattcttttggattttcatggacaacttgctgctgaccgaggatgaccaggaaactaccactcggttcctgcagaccgaagccgtgaccctgcaggacgtgagaggccgggactaccagaacgccatgcgggtgtggtccaacatccctggactgaaaagcaagcacgcacctctgacccctaaagaagaggagtacctgcaggcccaggtgcggagcagaagcaagctggacgcccctaaggtggatctgctggtgaagaattgcctcctgcccctgagagagtacttcaagtatttcagccagaatagtctgcccctgggcggcccaagcagcggcgcccctcctcccagcggcggcagcccagccggctccccaacctctaccgaggagggcacctctgagtccgccacccccgagagcggccctggcacctccaccgagcccagcgagggcagcgcacccggcagccctgccggcagccccacctccacagaggagggaaccagcaccgagcccagcgaaggcagcgccccaggcaccagcaccgagcctagtgagggcggctctggcggcggcagcgcccaggagattaaacggatcaacaagatcagaagaagacttgtgaaagacagcaacaccaagaaggccggcaagacaggccccatgaaaaccctgctggttagagtgatgacacccgatctgagagagcggctggaaaacctgagaaagaagcctgaaaatatcccccagcccatcagcaatacatctagagccaacctgaataagctgctgaccgattacaccgaaatgaagaaggcgatcctgcatgtgtactgggaagagttccagaaggaccctgtgggcctgatgagccgggtggcccagcctgccagcaagaagatcgatcagaacaagctgaaacctgagatggacgagaagggcaacctgaccaccgccggctttgcctgctctcagtgtggccagcccctgttcgtgtacaagctggagcaggtgtctgagaagggcaaggcttacaccaactacttcggacggtgcaatgtggccgagcacgaaaagctgatcctgctggcccagctgaagcccgagaaggatagcgacgaagccgtgacatatagcctgggaaagtttgggcagagggccctggatttctacagcattcatgtgaccaaggagtccacccaccccgtgaagcccctggcccagatcgccggaaacagatacgcctccggacctgtgggaaaggccctgagcgacgcatgtatgggcacaatcgcctccttcctgtctaagtaccaggacatcatcatcgaacaccagaaggtggtgaagggcaaccagaagagactggagagcctgcgggagctggccggcaaggaaaacctggaataccctagcgtgaccctgccacctcagcctcacaccaaggagggcgttgatgcctacaacgaagtgatcgcccgggtgcgaatgtgggtgaacctgaacctgtggcagaagctgaagctaagcagagatgatgccaagcctctgctgagactgaagggattcccttcctttcctctggtcgagagacaggccaacgaagtggactggtgggacatggtgtgtaacgtgaagaagctgatcaacgagaaaaaggaggatggcaaggtgttttggcagaatctggctggctacaagagacaggaagccctgagaccatacctgagcagcgaggaagatcggaagaagggaaagaaattcgctcggtaccagctgggcgacctgctgctgcacctggaaaagaagcacggcgaggactggggaaaggtgtacgacgaggcctgggagcggattgacaagaaagtggaaggcctgagcaagcacatcaagctggaagaggaacggagaagcgaggacgcccagagcaaggccgccctgaccgactggctgcgggctaaggccagcttcgtgatcgagggcctgaaggaggccgacaaggacgagttctgcagatgcgagctgaagctgcagaagtggtacggggacctgcggggaaagcccttcgccatcgaagccgagaacagcatcctggacatcagcggcttcagcaagcagtacaactgtgccttcatctggcagaaggacggcgtgaagaagctgaacctgtacctgatcatcaactacttcaagggcggcaagctgcggttcaagaagatcaaacctgaagccttcgaagccaacagattctacaccgtgatcaacaaaaagagcggcgagatcgtgcccatggaggtgaacttcaacttcgacgaccccaacctgatcatcctgcctctggcctttggcaagagacagggcagagaattcatctggaacgacctgctgtccctggaaaccggcagcctgaagctggccaacggaagagtgatcgagaagacactgtacaacagaagaacccggcaggatgagcctgccctgttcgtggccctgaccttcgagcggcgggaggtcctggactcctccaatatcaaaccaatgaacctgatcggcgtggcaagaggcgaaaacatccccgccgtgatcgccctgaccgaccccgagggctgcccactgagccggtttaaggatagcctgggaaacccaacccacatcctgagaatcggcgagagctataaggagaagcagcggaccatccaggccaagaaggaggtggagcagcggagagccggcggctacagccggaagtacgccagcaaagccaagaatctggcagacgatatggtgagaaacaccgctagagatctgctgtactacgccgtgacccaggatgccatgctgatcttcgccaacctgagccggggcttcggccggcagggcaagcggaccttcatggccgagagacagtacacacggatggaggactggctgaccgccaagctggcctacgagggcctgagcaagacctacctgtccaagacactggcccagtacacctccaagacatgcagcaactgtgggtttaccatcaccagcgccgactacgacagggtgctggagaagctgaagaagacagcaacaggctggatgaccacaattaacggcaaggagctgaaggtggagggccagattacctactacaacagatacaagagacagaacgtagtcaaggacctgtccgtcgagctggatagactgagcgaagaatctgtgaacaacgacatctcctcctggacaaagggcagaagcggagaagctctgagcctcctgaagaaaagattctcccatagacccgtgcaggagaagttcgtgtgcctgaactgcggcttcgagacacacgcagccgagcaagccgccctgaacatcgccagatcctggctgttcctgcggagccaggagtacaagaaataccagacaaacaagacaaccggcaacaccgataagagagccttcgtcgagacctggcagtccttttaccggaagaagcttaaggaggtgtggaaacctgccgtgcggtctggcggatctggcggaggctccacaagcatgagcctgggcagcgagctgttcagggacgtggccatcgtgttcagccaggaggagtggcagtggctggcccccgcccagagggacctgtacagggacgtgatgctggagacctacagcaacctggtgagcctgggcctggccgtgagcaagcccgacgtgatcagcttcctggagcagggcaaggagccctggatggtggagagggtggtgagcggcggcctgtgccccggcgccaagggcaccagccccaagaaaaagagaaaagtctaagctgccttctgcggggcttgccttctggccatgcccttcttctctcccttgcacctgtacctcttggtctttgaataaagcctgagtaggaaggctagcaaaaaaaaaaaaaaaaaaaaaaaaaaaaaaaaaaaaaaaaaaaaaaaaaaaaaaaaaaaaaaaaaaaaaaaaaaaaaaaa

SEQ ID NO: 6366 - RNA, 5797 nt, synthetic construct
  source 1..5797: mol_type = other RNA
aggaaataagagagaaaagaagagtaagaagaaatataagagccaccatggcccctaagaagaagcgtaaagtgagccggatggaacgcctcgtctacgaggtgcggcagaagtgcagaaacatcgaggacatctgcatctcctgcggatctctgaacgtgaccctggagcacccactgttcatcggcggcatgtgccagaactgtaaaaactgttttctggagtgtgcctatcaatacgacgatgacggctaccagagctactgcaccatctgttgcggcggaagagaggtgctgatgtgtggaaataacaactgctgccggtgcttctgcgtggaatgcgtggacctgctggtgggccccggcgccgcccaggccgctattaaggaagatccttggaactgctacatgtgcggccacaagggcacatacggcctgctgagacggagagaggactggcctagcagactgcagatgttcttcgccaataaccacgaccaggagttcgacccccctaaggtgtaccctcccgtccccgccgagaagagaaagcccatccgggtcctgagcctgttcgatggcatcgccaccggtctgctggtgctgaaggacctgggcatccaggtggataggtacattgcctccgaggtgtgcgaggactccatcaccgtgggaatggtgcgtcatcagggcaagatcatgtacgtgggcgacgtgcggagcgtgacacagaagcatatccaggagtggggccctttcgacctggtgatcggcggcagcccttgcaatgacctgagcatcgtgaacccagcccggaagggcctgtacgagggaaccggcagactgttcttcgagttttacagactgctgcacgacgcccggcctaaggaaggcgacgaccggcccttcttttggctgttcgagaatgtggtggccatgggagtcagcgacaagcgggatattagccggttcctggagagcaaccccgtgatgatcgatgccaaggaagtgagcgccgcccaccgggccagatacttctggggcaatctgcctggcatgaacagacccctggccagcaccgtgaacgacaagctggagctgcaggagtgcctggagcacggccggatcgccaagttcagcaaggtgagaaccatcaccacccgaagcaacagcatcaaacaaggcaaggaccagcactttcctgtgttcatgaacgagaaggaggacatcctgtggtgtaccgagatggagagagtgttcgggttcccagtccactacacagatgtcagcaacatgtctagactggccagacagagactgctgggaagaagctggtccgtccctgtgatcagacacctgttcgcccctctgaaggagtacttcgcctgcgtgagcagcggcaacagcaacgccaacagccggggccccagcttctctagcggcctggtgccactgtccctgagagggagccacatgggccccatggagatctacaaaaccgtgagcgcctggaagcggcagcctgtgcgcgtgctgagcctgtttcggaatatcgataaagtcctgaaaagcctgggattcctggagagcggctctggctccggcggtggcaccctgaagtacgtggaggatgtgacaaacgtggtcagacgggatgtggagaagtggggccccttcgatctggtgtacggcagcacccaacccctgggcagctcttgtgaccggtgccctggctggtacatgtttcagttccaccggatcctgcagtacgccctgccgagacaggagtcccagcggccattcttttggattttcatggacaacttgctgctgaccgaggatgaccaggaaactaccactcggttcctgcagaccgaagccgtgaccctgcaggacgtgagaggccgggactaccagaacgccatgcgggtgtggtccaacatccctggactgaaaagcaagcacgcacctctgacccctaaagaagaggagtacctgcaggcccaggtgcggagcagaagcaagctggacgcccctaaggtggatctgctggtgaagaattgcctcctgcccctgagagagtacttcaagtatttcagccagaatagtctgcccctgggcggcccaagcagcggcgcccctcctcccagcggcggcagcccagccggctccccaacctctaccgaggagggcacctctgagtccgccacccccgagagcggccctggcacctccaccgagcccagcgagggcagcgcacccggcagccctgccggcagccccacctccacagaggagggaaccagcaccgagcccagcgaaggcagcgccccaggcaccagcaccgagcctagtgagggcggctctggcggcggcagcgcccaggagattaaacggatcaacaagatcagaagaagacttgtgaaagacagcaacaccaagaaggccggcaagacaggccccatgaaaaccctgctggttagagtgatgacacccgatctgagagagcggctggaaaacctgagaaagaagcctgaaaatatcccccagcccatcagcaatacatctagagccaacctgaataagctgctgaccgattacaccgaaatgaagaaggcgatcctgcatgtgtactgggaagagttccagaaggaccctgtgggcctgatgagccgggtggcccagcctgccagcaagaagatcgatcagaacaagctgaaacctgagatggacgagaagggcaacctgaccaccgccggctttgcctgctctcagtgtggccagcccctgttcgtgtacaagctggagcaggtgtctgagaagggcaaggcttacaccaactacttcggacggtgcaatgtggccgagcacgaaaagctgatcctgctggcccagctgaagcccgagaaggatagcgacgaagccgtgacatatagcctgggaaagtttgggcagagggccctggatttctacagcattcatgtgaccaaggagtccacccaccccgtgaagcccctggcccagatcgccggaaacagatacgcctccggacctgtgggaaaggccctgagcgacgcatgtatgggcacaatcgcctccttcctgtctaagtaccaggacatcatcatcgaacaccagaaggtggtgaagggcaaccagaagagactggagagcctgcgggagctggccggcaaggaaaacctggaataccctagcgtgaccctgccacctcagcctcacaccaaggagggcgttgatgcctacaacgaagtgatcgcccgggtgcgaatgtgggtgaacctgaacctgtggcagaagctgaagctaagcagagatgatgccaagcctctgctgagactgaagggattcccttcctttcctctggtcgagagacaggccaacgaagtggactggtgggacatggtgtgtaacgtgaagaagctgatcaacgagaaaaaggaggatggcaaggtgttttggcagaatctggctggctacaagagacaggaagccctgagaccatacctgagcagcgaggaagatcggaagaagggaaagaaattcgctcggtaccagctgggcgacctgctgctgcacctggaaaagaagcacggcgaggactggggaaaggtgtacgacgaggcctgggagcggattgacaagaaagtggaaggcctgagcaagcacatcaagctggaagaggaacggagaagcgaggacgcccagagcaaggccgccctgaccgactggctgcgggctaaggccagcttcgtgatcgagggcctgaaggaggccgacaaggacgagttctgcagatgcgagctgaagctgcagaagtggtacggggacctgcggggaaagcccttcgccatcgaagccgagaacagcatcctggacatcagcggcttcagcaagcagtacaactgtgccttcatctggcagaaggacggcgtgaagaagctgaacctgtacctgatcatcaactacttcaagggcggcaagctgcggttcaagaagatcaaacctgaagccttcgaagccaacagattctacaccgtgatcaacaaaaagagcggcgagatcgtgcccatggaggtgaacttcaacttcgacgaccccaacctgatcatcctgcctctggcctttggcaagagacagggcagagaattcatctggaacgacctgctgtccctggaaaccggcagcctgaagctggccaacggaagagtgatcgagaagacactgtacaacagaagaacccggcaggatgagcctgccctgttcgtggccctgaccttcgagcggcgggaggtcctggactcctccaatatcaaaccaatgaacctgatcggcgtggcaagaggcgaaaacatccccgccgtgatcgccctgaccgaccccgagggctgcccactgagccggtttaaggatagcctgggaaacccaacccacatcctgagaatcggcgagagctataaggagaagcagcggaccatccaggccaagaaggaggtggagcagcggagagccggcggctacagccggaagtacgccagcaaagccaagaatctggcagacgatatggtgagaaacaccgctagagatctgctgtactacgccgtgacccaggatgccatgctgatcttcgccaacctgagccggggcttcggccggcagggcaagcggaccttcatggccgagagacagtacacacggatggaggactggctgaccgccaagctggcctacgagggcctgagcaagacctacctgtccaagacactggcccagtacacctccaagacatgcagcaactgtgggtttaccatcaccagcgccgactacgacagggtgctggagaagctgaagaagacagcaacaggctggatgaccacaattaacggcaaggagctgaaggtggagggccagattacctactacaacagatacaagagacagaacgtagtcaaggacctgtccgtcgagctggatagactgagcgaagaatctgtgaacaacgacatctcctcctggacaaagggcagaagcggagaagctctgagcctcctgaagaaaagattctcccatagacccgtgcaggagaagttcgtgtgcctgaactgcggcttcgagacacacgcagccgagcaagccgccctgaacatcgccagatcctggctgttcctgcggagccaggagtacaagaaataccagacaaacaagacaaccggcaacaccgataagagagccttcgtcgagacctggcagtccttttaccggaagaagcttaaggaggtgtggaaacctgccgtgcggtctggcggatctggcggaggctccacaagcagccaggagcccgtgaccttcgaggacgtggccgtgtacttcacccagaaccagtgggccagcctggaccccacccagagggccctgtacagggaggtgatgctggagaactacgccaacatcaccagcctggccttccccttccccaagcccgacctgatcctgcagctggagaggggcgaggccaggtggggcctggacccctggatcgccatcgagggcgaggccctgggcggcgtgcacaccagccccaagaaaaagagaaaagtctaagctgccttctgcggggcttgccttctggccatgcccttcttctctcccttgcacctgtacctcttggtctttgaataaagcctgagtaggaaggctagcaaaaaaaaaaaaaaaaaaaaaaaaaaaaaaaaaaaaaaaaaaaaaaaaaaaaaaaaaaaaaaaaaaaaaaaaaaaaaaaa

SEQ ID NO: 6367 - RNA, 5797 nt, synthetic construct
  source 1..5797: mol_type = other RNA
aggaaataagagagaaaagaagagtaagaagaaatataagagccaccatggcccctaagaagaagcgtaaagtgagccggatggaacgcctcgtctacgaggtgcggcagaagtgcagaaacatcgaggacatctgcatctcctgcggatctctgaacgtgaccctggagcacccactgttcatcggcggcatgtgccagaactgtaaaaactgttttctggagtgtgcctatcaatacgacgatgacggctaccagagctactgcaccatctgttgcggcggaagagaggtgctgatgtgtggaaataacaactgctgccggtgcttctgcgtggaatgcgtggacctgctggtgggccccggcgccgcccaggccgctattaaggaagatccttggaactgctacatgtgcggccacaagggcacatacggcctgctgagacggagagaggactggcctagcagactgcagatgttcttcgccaataaccacgaccaggagttcgacccccctaaggtgtaccctcccgtccccgccgagaagagaaagcccatccgggtcctgagcctgttcgatggcatcgccaccggtctgctggtgctgaaggacctgggcatccaggtggataggtacattgcctccgaggtgtgcgaggactccatcaccgtgggaatggtgcgtcatcagggcaagatcatgtacgtgggcgacgtgcggagcgtgacacagaagcatatccaggagtggggccctttcgacctggtgatcggcggcagcccttgcaatgacctgagcatcgtgaacccagcccggaagggcctgtacgagggaaccggcagactgttcttcgagttttacagactgctgcacgacgcccggcctaaggaaggcgacgaccggcccttcttttggctgttcgagaatgtggtggccatgggagtcagcgacaagcgggatattagccggttcctggagagcaaccccgtgatgatcgatgccaaggaagtgagcgccgcccaccgggccagatacttctggggcaatctgcctggcatgaacagacccctggccagcaccgtgaacgacaagctggagctgcaggagtgcctggagcacggccggatcgccaagttcagcaaggtgagaaccatcaccacccgaagcaacagcatcaaacaaggcaaggaccagcactttcctgtgttcatgaacgagaaggaggacatcctgtggtgtaccgagatggagagagtgttcgggttcccagtccactacacagatgtcagcaacatgtctagactggccagacagagactgctgggaagaagctggtccgtccctgtgatcagacacctgttcgcccctctgaaggagtacttcgcctgcgtgagcagcggcaacagcaacgccaacagccggggccccagcttctctagcggcctggtgccactgtccctgagagggagccacatgggccccatggagatctacaaaaccgtgagcgcctggaagcggcagcctgtgcgcgtgctgagcctgtttcggaatatcgataaagtcctgaaaagcctgggattcctggagagcggctctggctccggcggtggcaccctgaagtacgtggaggatgtgacaaacgtggtcagacgggatgtggagaagtggggccccttcgatctggtgtacggcagcacccaacccctgggcagctcttgtgaccggtgccctggctggtacatgtttcagttccaccggatcctgcagtacgccctgccgagacaggagtcccagcggccattcttttggattttcatggacaacttgctgctgaccgaggatgaccaggaaactaccactcggttcctgcagaccgaagccgtgaccctgcaggacgtgagaggccgggactaccagaacgccatgcgggtgtggtccaacatccctggactgaaaagcaagcacgcacctctgacccctaaagaagaggagtacctgcaggcccaggtgcggagcagaagcaagctggacgcccctaaggtggatctgctggtgaagaattgcctcctgcccctgagagagtacttcaagtatttcagccagaatagtctgcccctgggcggcccaagcagcggcgcccctcctcccagcggcggcagcccagccggctccccaacctctaccgaggagggcacctctgagtccgccacccccgagagcggccctggcacctccaccgagcccagcgagggcagcgcacccggcagccctgccggcagccccacctccacagaggagggaaccagcaccgagcccagcgaaggcagcgccccaggcaccagcaccgagcctagtgagggcggctctggcggcggcagcgcccaggagattaaacggatcaacaagatcagaagaagacttgtgaaagacagcaacaccaagaaggccggcaagacaggccccatgaaaaccctgctggttagagtgatgacacccgatctgagagagcggctggaaaacctgagaaagaagcctgaaaatatcccccagcccatcagcaatacatctagagccaacctgaataagctgctgaccgattacaccgaaatgaagaaggcgatcctgcatgtgtactgggaagagttccagaaggaccctgtgggcctgatgagccgggtggcccagcctgccagcaagaagatcgatcagaacaagctgaaacctgagatggacgagaagggcaacctgaccaccgccggctttgcctgctctcagtgtggccagcccctgttcgtgtacaagctggagcaggtgtctgagaagggcaaggcttacaccaactacttcggacggtgcaatgtggccgagcacgaaaagctgatcctgctggcccagctgaagcccgagaaggatagcgacgaagccgtgacatatagcctgggaaagtttgggcagagggccctggatttctacagcattcatgtgaccaaggagtccacccaccccgtgaagcccctggcccagatcgccggaaacagatacgcctccggacctgtgggaaaggccctgagcgacgcatgtatgggcacaatcgcctccttcctgtctaagtaccaggacatcatcatcgaacaccagaaggtggtgaagggcaaccagaagagactggagagcctgcgggagctggccggcaaggaaaacctggaataccctagcgtgaccctgccacctcagcctcacaccaaggagggcgttgatgcctacaacgaagtgatcgcccgggtgcgaatgtgggtgaacctgaacctgtggcagaagctgaagctaagcagagatgatgccaagcctctgctgagactgaagggattcccttcctttcctctggtcgagagacaggccaacgaagtggactggtgggacatggtgtgtaacgtgaagaagctgatcaacgagaaaaaggaggatggcaaggtgttttggcagaatctggctggctacaagagacaggaagccctgagaccatacctgagcagcgaggaagatcggaagaagggaaagaaattcgctcggtaccagctgggcgacctgctgctgcacctggaaaagaagcacggcgaggactggggaaaggtgtacgacgaggcctgggagcggattgacaagaaagtggaaggcctgagcaagcacatcaagctggaagaggaacggagaagcgaggacgcccagagcaaggccgccctgaccgactggctgcgggctaaggccagcttcgtgatcgagggcctgaaggaggccgacaaggacgagttctgcagatgcgagctgaagctgcagaagtggtacggggacctgcggggaaagcccttcgccatcgaagccgagaacagcatcctggacatcagcggcttcagcaagcagtacaactgtgccttcatctggcagaaggacggcgtgaagaagctgaacctgtacctgatcatcaactacttcaagggcggcaagctgcggttcaagaagatcaaacctgaagccttcgaagccaacagattctacaccgtgatcaacaaaaagagcggcgagatcgtgcccatggaggtgaacttcaacttcgacgaccccaacctgatcatcctgcctctggcctttggcaagagacagggcagagaattcatctggaacgacctgctgtccctggaaaccggcagcctgaagctggccaacggaagagtgatcgagaagacactgtacaacagaagaacccggcaggatgagcctgccctgttcgtggccctgaccttcgagcggcgggaggtcctggactcctccaatatcaaaccaatgaacctgatcggcgtggcaagaggcgaaaacatccccgccgtgatcgccctgaccgaccccgagggctgcccactgagccggtttaaggatagcctgggaaacccaacccacatcctgagaatcggcgagagctataaggagaagcagcggaccatccaggccaagaaggaggtggagcagcggagagccggcggctacagccggaagtacgccagcaaagccaagaatctggcagacgatatggtgagaaacaccgctagagatctgctgtactacgccgtgacccaggatgccatgctgatcttcgccaacctgagccggggcttcggccggcagggcaagcggaccttcatggccgagagacagtacacacggatggaggactggctgaccgccaagctggcctacgagggcctgagcaagacctacctgtccaagacactggcccagtacacctccaagacatgcagcaactgtgggtttaccatcaccagcgccgactacgacagggtgctggagaagctgaagaagacagcaacaggctggatgaccacaattaacggcaaggagctgaaggtggagggccagattacctactacaacagatacaagagacagaacgtagtcaaggacctgtccgtcgagctggatagactgagcgaagaatctgtgaacaacgacatctcctcctggacaaagggcagaagcggagaagctctgagcctcctgaagaaaagattctcccatagacccgtgcaggagaagttcgtgtgcctgaactgcggcttcgagacacacgcagccgagcaagccgccctgaacatcgccagatcctggctgttcctgcggagccaggagtacaagaaataccagacaaacaagacaaccggcaacaccgataagagagccttcgtcgagacctggcagtccttttaccggaagaagcttaaggaggtgtggaaacctgccgtgcggtctggcggatctggcggaggctccacaagcgtgaagttcgccgacgtggccgtgtacttcagccccgaggagtggggctgcctgaggcccgcccagagggccctgtacagggacgtgatgagggagaactacggccacctgggcgccctgggctgcgccggccccaagcccgccctgatcagctggctggagaggaacaccgaggactgggagcccgccgccctggacccccaggactgccccaggggcctgatggtgcagaggaagtggcccaccagccccaagaaaaagagaaaagtctaagctgccttctgcggggcttgccttctggccatgcccttcttctctcccttgcacctgtacctcttggtctttgaataaagcctgagtaggaaggctagcaaaaaaaaaaaaaaaaaaaaaaaaaaaaaaaaaaaaaaaaaaaaaaaaaaaaaaaaaaaaaaaaaaaaaaaaaaaaaaaa

SEQ ID NO: 6368 - RNA, 5797 nt, synthetic construct
  source 1..5797: mol_type = other RNA
aggaaataagagagaaaagaagagtaagaagaaatataagagccaccatggcccctaagaagaagcgtaaagtgagccggatggaacgcctcgtctacgaggtgcggcagaagtgcagaaacatcgaggacatctgcatctcctgcggatctctgaacgtgaccctggagcacccactgttcatcggcggcatgtgccagaactgtaaaaactgttttctggagtgtgcctatcaatacgacgatgacggctaccagagctactgcaccatctgttgcggcggaagagaggtgctgatgtgtggaaataacaactgctgccggtgcttctgcgtggaatgcgtggacctgctggtgggccccggcgccgcccaggccgctattaaggaagatccttggaactgctacatgtgcggccacaagggcacatacggcctgctgagacggagagaggactggcctagcagactgcagatgttcttcgccaataaccacgaccaggagttcgacccccctaaggtgtaccctcccgtccccgccgagaagagaaagcccatccgggtcctgagcctgttcgatggcatcgccaccggtctgctggtgctgaaggacctgggcatccaggtggataggtacattgcctccgaggtgtgcgaggactccatcaccgtgggaatggtgcgtcatcagggcaagatcatgtacgtgggcgacgtgcggagcgtgacacagaagcatatccaggagtggggccctttcgacctggtgatcggcggcagcccttgcaatgacctgagcatcgtgaacccagcccggaagggcctgtacgagggaaccggcagactgttcttcgagttttacagactgctgcacgacgcccggcctaaggaaggcgacgaccggcccttcttttggctgttcgagaatgtggtggccatgggagtcagcgacaagcgggatattagccggttcctggagagcaaccccgtgatgatcgatgccaaggaagtgagcgccgcccaccgggccagatacttctggggcaatctgcctggcatgaacagacccctggccagcaccgtgaacgacaagctggagctgcaggagtgcctggagcacggccggatcgccaagttcagcaaggtgagaaccatcaccacccgaagcaacagcatcaaacaaggcaaggaccagcactttcctgtgttcatgaacgagaaggaggacatcctgtggtgtaccgagatggagagagtgttcgggttcccagtccactacacagatgtcagcaacatgtctagactggccagacagagactgctgggaagaagctggtccgtccctgtgatcagacacctgttcgcccctctgaaggagtacttcgcctgcgtgagcagcggcaacagcaacgccaacagccggggccccagcttctctagcggcctggtgccactgtccctgagagggagccacatgggccccatggagatctacaaaaccgtgagcgcctggaagcggcagcctgtgcgcgtgctgagcctgtttcggaatatcgataaagtcctgaaaagcctgggattcctggagagcggctctggctccggcggtggcaccctgaagtacgtggaggatgtgacaaacgtggtcagacgggatgtggagaagtggggccccttcgatctggtgtacggcagcacccaacccctgggcagctcttgtgaccggtgccctggctggtacatgtttcagttccaccggatcctgcagtacgccctgccgagacaggagtcccagcggccattcttttggattttcatggacaacttgctgctgaccgaggatgaccaggaaactaccactcggttcctgcagaccgaagccgtgaccctgcaggacgtgagaggccgggactaccagaacgccatgcgggtgtggtccaacatccctggactgaaaagcaagcacgcacctctgacccctaaagaagaggagtacctgcaggcccaggtgcggagcagaagcaagctggacgcccctaaggtggatctgctggtgaagaattgcctcctgcccctgagagagtacttcaagtatttcagccagaatagtctgcccctgggcggcccaagcagcggcgcccctcctcccagcggcggcagcccagccggctccccaacctctaccgaggagggcacctctgagtccgccacccccgagagcggccctggcacctccaccgagcccagcgagggcagcgcacccggcagccctgccggcagccccacctccacagaggagggaaccagcaccgagcccagcgaaggcagcgccccaggcaccagcaccgagcctagtgagggcggctctggcggcggcagcgcccaggagattaaacggatcaacaagatcagaagaagacttgtgaaagacagcaacaccaagaaggccggcaagacaggccccatgaaaaccctgctggttagagtgatgacacccgatctgagagagcggctggaaaacctgagaaagaagcctgaaaatatcccccagcccatcagcaatacatctagagccaacctgaataagctgctgaccgattacaccgaaatgaagaaggcgatcctgcatgtgtactgggaagagttccagaaggaccctgtgggcctgatgagccgggtggcccagcctgccagcaagaagatcgatcagaacaagctgaaacctgagatggacgagaagggcaacctgaccaccgccggctttgcctgctctcagtgtggccagcccctgttcgtgtacaagctggagcaggtgtctgagaagggcaaggcttacaccaactacttcggacggtgcaatgtggccgagcacgaaaagctgatcctgctggcccagctgaagcccgagaaggatagcgacgaagccgtgacatatagcctgggaaagtttgggcagagggccctggatttctacagcattcatgtgaccaaggagtccacccaccccgtgaagcccctggcccagatcgccggaaacagatacgcctccggacctgtgggaaaggccctgagcgacgcatgtatgggcacaatcgcctccttcctgtctaagtaccaggacatcatcatcgaacaccagaaggtggtgaagggcaaccagaagagactggagagcctgcgggagctggccggcaaggaaaacctggaataccctagcgtgaccctgccacctcagcctcacaccaaggagggcgttgatgcctacaacgaagtgatcgcccgggtgcgaatgtgggtgaacctgaacctgtggcagaagctgaagctaagcagagatgatgccaagcctctgctgagactgaagggattcccttcctttcctctggtcgagagacaggccaacgaagtggactggtgggacatggtgtgtaacgtgaagaagctgatcaacgagaaaaaggaggatggcaaggtgttttggcagaatctggctggctacaagagacaggaagccctgagaccatacctgagcagcgaggaagatcggaagaagggaaagaaattcgctcggtaccagctgggcgacctgctgctgcacctggaaaagaagcacggcgaggactggggaaaggtgtacgacgaggcctgggagcggattgacaagaaagtggaaggcctgagcaagcacatcaagctggaagaggaacggagaagcgaggacgcccagagcaaggccgccctgaccgactggctgcgggctaaggccagcttcgtgatcgagggcctgaaggaggccgacaaggacgagttctgcagatgcgagctgaagctgcagaagtggtacggggacctgcggggaaagcccttcgccatcgaagccgagaacagcatcctggacatcagcggcttcagcaagcagtacaactgtgccttcatctggcagaaggacggcgtgaagaagctgaacctgtacctgatcatcaactacttcaagggcggcaagctgcggttcaagaagatcaaacctgaagccttcgaagccaacagattctacaccgtgatcaacaaaaagagcggcgagatcgtgcccatggaggtgaacttcaacttcgacgaccccaacctgatcatcctgcctctggcctttggcaagagacagggcagagaattcatctggaacgacctgctgtccctggaaaccggcagcctgaagctggccaacggaagagtgatcgagaagacactgtacaacagaagaacccggcaggatgagcctgccctgttcgtggccctgaccttcgagcggcgggaggtcctggactcctccaatatcaaaccaatgaacctgatcggcgtggcaagaggcgaaaacatccccgccgtgatcgccctgaccgaccccgagggctgcccactgagccggtttaaggatagcctgggaaacccaacccacatcctgagaatcggcgagagctataaggagaagcagcggaccatccaggccaagaaggaggtggagcagcggagagccggcggctacagccggaagtacgccagcaaagccaagaatctggcagacgatatggtgagaaacaccgctagagatctgctgtactacgccgtgacccaggatgccatgctgatcttcgccaacctgagccggggcttcggccggcagggcaagcggaccttcatggccgagagacagtacacacggatggaggactggctgaccgccaagctggcctacgagggcctgagcaagacctacctgtccaagacactggcccagtacacctccaagacatgcagcaactgtgggtttaccatcaccagcgccgactacgacagggtgctggagaagctgaagaagacagcaacaggctggatgaccacaattaacggcaaggagctgaaggtggagggccagattacctactacaacagatacaagagacagaacgtagtcaaggacctgtccgtcgagctggatagactgagcgaagaatctgtgaacaacgacatctcctcctggacaaagggcagaagcggagaagctctgagcctcctgaagaaaagattctcccatagacccgtgcaggagaagttcgtgtgcctgaactgcggcttcgagacacacgcagccgagcaagccgccctgaacatcgccagatcctggctgttcctgcggagccaggagtacaagaaataccagacaaacaagacaaccggcaacaccgataagagagccttcgtcgagacctggcagtccttttaccggaagaagcttaaggaggtgtggaaacctgccgtgcggtctggcggatctggcggaggctccacaagcgaccccgcccaggtgcccgtggccgccgacctgctgaccgaccacgaggagcagggctacgtgaccttcgaggacgtggccgtgtacttcagccaggaggagtggaggctgctggacgacgcccagaggctgctgtacaggaacgtgatgctggagaacttcaccctgctggccagcctgggcctggccagcagcaagacccacgagatcacccagctggagagctgggaggagcccttcatgaccagccccaagaaaaagagaaaagtctaagctgccttctgcggggcttgccttctggccatgcccttcttctctcccttgcacctgtacctcttggtctttgaataaagcctgagtaggaaggctagcaaaaaaaaaaaaaaaaaaaaaaaaaaaaaaaaaaaaaaaaaaaaaaaaaaaaaaaaaaaaaaaaaaaaaaaaaaaaaaaa

SEQ ID NO: 6369 - RNA, 5797 nt, synthetic construct
  source 1..5797: mol_type = other RNA
aggaaataagagagaaaagaagagtaagaagaaatataagagccaccatggcccctaagaagaagcgtaaagtgagccggatggaacgcctcgtctacgaggtgcggcagaagtgcagaaacatcgaggacatctgcatctcctgcggatctctgaacgtgaccctggagcacccactgttcatcggcggcatgtgccagaactgtaaaaactgttttctggagtgtgcctatcaatacgacgatgacggctaccagagctactgcaccatctgttgcggcggaagagaggtgctgatgtgtggaaataacaactgctgccggtgcttctgcgtggaatgcgtggacctgctggtgggccccggcgccgcccaggccgctattaaggaagatccttggaactgctacatgtgcggccacaagggcacatacggcctgctgagacggagagaggactggcctagcagactgcagatgttcttcgccaataaccacgaccaggagttcgacccccctaaggtgtaccctcccgtccccgccgagaagagaaagcccatccgggtcctgagcctgttcgatggcatcgccaccggtctgctggtgctgaaggacctgggcatccaggtggataggtacattgcctccgaggtgtgcgaggactccatcaccgtgggaatggtgcgtcatcagggcaagatcatgtacgtgggcgacgtgcggagcgtgacacagaagcatatccaggagtggggccctttcgacctggtgatcggcggcagcccttgcaatgacctgagcatcgtgaacccagcccggaagggcctgtacgagggaaccggcagactgttcttcgagttttacagactgctgcacgacgcccggcctaaggaaggcgacgaccggcccttcttttggctgttcgagaatgtggtggccatgggagtcagcgacaagcgggatattagccggttcctggagagcaaccccgtgatgatcgatgccaaggaagtgagcgccgcccaccgggccagatacttctggggcaatctgcctggcatgaacagacccctggccagcaccgtgaacgacaagctggagctgcaggagtgcctggagcacggccggatcgccaagttcagcaaggtgagaaccatcaccacccgaagcaacagcatcaaacaaggcaaggaccagcactttcctgtgttcatgaacgagaaggaggacatcctgtggtgtaccgagatggagagagtgttcgggttcccagtccactacacagatgtcagcaacatgtctagactggccagacagagactgctgggaagaagctggtccgtccctgtgatcagacacctgttcgcccctctgaaggagtacttcgcctgcgtgagcagcggcaacagcaacgccaacagccggggccccagcttctctagcggcctggtgccactgtccctgagagggagccacatgggccccatggagatctacaaaaccgtgagcgcctggaagcggcagcctgtgcgcgtgctgagcctgtttcggaatatcgataaagtcctgaaaagcctgggattcctggagagcggctctggctccggcggtggcaccctgaagtacgtggaggatgtgacaaacgtggtcagacgggatgtggagaagtggggccccttcgatctggtgtacggcagcacccaacccctgggcagctcttgtgaccggtgccctggctggtacatgtttcagttccaccggatcctgcagtacgccctgccgagacaggagtcccagcggccattcttttggattttcatggacaacttgctgctgaccgaggatgaccaggaaactaccactcggttcctgcagaccgaagccgtgaccctgcaggacgtgagaggccgggactaccagaacgccatgcgggtgtggtccaacatccctggactgaaaagcaagcacgcacctctgacccctaaagaagaggagtacctgcaggcccaggtgcggagcagaagcaagctggacgcccctaaggtggatctgctggtgaagaattgcctcctgcccctgagagagtacttcaagtatttcagccagaatagtctgcccctgggcggcccaagcagcggcgcccctcctcccagcggcggcagcccagccggctccccaacctctaccgaggagggcacctctgagtccgccacccccgagagcggccctggcacctccaccgagcccagcgagggcagcgcacccggcagccctgccggcagccccacctccacagaggagggaaccagcaccgagcccagcgaaggcagcgccccaggcaccagcaccgagcctagtgagggcggctctggcggcggcagcgcccaggagattaaacggatcaacaagatcagaagaagacttgtgaaagacagcaacaccaagaaggccggcaagacaggccccatgaaaaccctgctggttagagtgatgacacccgatctgagagagcggctggaaaacctgagaaagaagcctgaaaatatcccccagcccatcagcaatacatctagagccaacctgaataagctgctgaccgattacaccgaaatgaagaaggcgatcctgcatgtgtactgggaagagttccagaaggaccctgtgggcctgatgagccgggtggcccagcctgccagcaagaagatcgatcagaacaagctgaaacctgagatggacgagaagggcaacctgaccaccgccggctttgcctgctctcagtgtggccagcccctgttcgtgtacaagctggagcaggtgtctgagaagggcaaggcttacaccaactacttcggacggtgcaatgtggccgagcacgaaaagctgatcctgctggcccagctgaagcccgagaaggatagcgacgaagccgtgacatatagcctgggaaagtttgggcagagggccctggatttctacagcattcatgtgaccaaggagtccacccaccccgtgaagcccctggcccagatcgccggaaacagatacgcctccggacctgtgggaaaggccctgagcgacgcatgtatgggcacaatcgcctccttcctgtctaagtaccaggacatcatcatcgaacaccagaaggtggtgaagggcaaccagaagagactggagagcctgcgggagctggccggcaaggaaaacctggaataccctagcgtgaccctgccacctcagcctcacaccaaggagggcgttgatgcctacaacgaagtgatcgcccgggtgcgaatgtgggtgaacctgaacctgtggcagaagctgaagctaagcagagatgatgccaagcctctgctgagactgaagggattcccttcctttcctctggtcgagagacaggccaacgaagtggactggtgggacatggtgtgtaacgtgaagaagctgatcaacgagaaaaaggaggatggcaaggtgttttggcagaatctggctggctacaagagacaggaagccctgagaccatacctgagcagcgaggaagatcggaagaagggaaagaaattcgctcggtaccagctgggcgacctgctgctgcacctggaaaagaagcacggcgaggactggggaaaggtgtacgacgaggcctgggagcggattgacaagaaagtggaaggcctgagcaagcacatcaagctggaagaggaacggagaagcgaggacgcccagagcaaggccgccctgaccgactggctgcgggctaaggccagcttcgtgatcgagggcctgaaggaggccgacaaggacgagttctgcagatgcgagctgaagctgcagaagtggtacggggacctgcggggaaagcccttcgccatcgaagccgagaacagcatcctggacatcagcggcttcagcaagcagtacaactgtgccttcatctggcagaaggacggcgtgaagaagctgaacctgtacctgatcatcaactacttcaagggcggcaagctgcggttcaagaagatcaaacctgaagccttcgaagccaacagattctacaccgtgatcaacaaaaagagcggcgagatcgtgcccatggaggtgaacttcaacttcgacgaccccaacctgatcatcctgcctctggcctttggcaagagacagggcagagaattcatctggaacgacctgctgtccctggaaaccggcagcctgaagctggccaacggaagagtgatcgagaagacactgtacaacagaagaacccggcaggatgagcctgccctgttcgtggccctgaccttcgagcggcgggaggtcctggactcctccaatatcaaaccaatgaacctgatcggcgtggcaagaggcgaaaacatccccgccgtgatcgccctgaccgaccccgagggctgcccactgagccggtttaaggatagcctgggaaacccaacccacatcctgagaatcggcgagagctataaggagaagcagcggaccatccaggccaagaaggaggtggagcagcggagagccggcggctacagccggaagtacgccagcaaagccaagaatctggcagacgatatggtgagaaacaccgctagagatctgctgtactacgccgtgacccaggatgccatgctgatcttcgccaacctgagccggggcttcggccggcagggcaagcggaccttcatggccgagagacagtacacacggatggaggactggctgaccgccaagctggcctacgagggcctgagcaagacctacctgtccaagacactggcccagtacacctccaagacatgcagcaactgtgggtttaccatcaccagcgccgactacgacagggtgctggagaagctgaagaagacagcaacaggctggatgaccacaattaacggcaaggagctgaaggtggagggccagattacctactacaacagatacaagagacagaacgtagtcaaggacctgtccgtcgagctggatagactgagcgaagaatctgtgaacaacgacatctcctcctggacaaagggcagaagcggagaagctctgagcctcctgaagaaaagattctcccatagacccgtgcaggagaagttcgtgtgcctgaactgcggcttcgagacacacgcagccgagcaagccgccctgaacatcgccagatcctggctgttcctgcggagccaggagtacaagaaataccagacaaacaagacaaccggcaacaccgataagagagccttcgtcgagacctggcagtccttttaccggaagaagcttaaggaggtgtggaaacctgccgtgcggtctggcggatctggcggaggctccacaagccacagggtgggcctgatcaggagctacaacagcaagaccatgacctgcttccaggagctggtgaccttcagggacgtggccatcgacttcagcaggcaggagtgggagtacctggaccccaaccagagggacctgtacagggacgtgatgctggagaactacaggaacctggtgagcctgggcggccacagcatcagcaagcccgtggtggtggacctgctggagaggggcaaggagccctggaccagccccaagaaaaagagaaaagtctaagctgccttctgcggggcttgccttctggccatgcccttcttctctcccttgcacctgtacctcttggtctttgaataaagcctgagtaggaaggctagcaaaaaaaaaaaaaaaaaaaaaaaaaaaaaaaaaaaaaaaaaaaaaaaaaaaaaaaaaaaaaaaaaaaaaaaaaaaaaaaa

SEQ ID NO: 6370 - RNA, 5797 nt, synthetic construct
  source 1..5797: mol_type = other RNA
aggaaataagagagaaaagaagagtaagaagaaatataagagccaccatggcccctaagaagaagcgtaaagtgagccggatggaacgcctcgtctacgaggtgcggcagaagtgcagaaacatcgaggacatctgcatctcctgcggatctctgaacgtgaccctggagcacccactgttcatcggcggcatgtgccagaactgtaaaaactgttttctggagtgtgcctatcaatacgacgatgacggctaccagagctactgcaccatctgttgcggcggaagagaggtgctgatgtgtggaaataacaactgctgccggtgcttctgcgtggaatgcgtggacctgctggtgggccccggcgccgcccaggccgctattaaggaagatccttggaactgctacatgtgcggccacaagggcacatacggcctgctgagacggagagaggactggcctagcagactgcagatgttcttcgccaataaccacgaccaggagttcgacccccctaaggtgtaccctcccgtccccgccgagaagagaaagcccatccgggtcctgagcctgttcgatggcatcgccaccggtctgctggtgctgaaggacctgggcatccaggtggataggtacattgcctccgaggtgtgcgaggactccatcaccgtgggaatggtgcgtcatcagggcaagatcatgtacgtgggcgacgtgcggagcgtgacacagaagcatatccaggagtggggccctttcgacctggtgatcggcggcagcccttgcaatgacctgagcatcgtgaacccagcccggaagggcctgtacgagggaaccggcagactgttcttcgagttttacagactgctgcacgacgcccggcctaaggaaggcgacgaccggcccttcttttggctgttcgagaatgtggtggccatgggagtcagcgacaagcgggatattagccggttcctggagagcaaccccgtgatgatcgatgccaaggaagtgagcgccgcccaccgggccagatacttctggggcaatctgcctggcatgaacagacccctggccagcaccgtgaacgacaagctggagctgcaggagtgcctggagcacggccggatcgccaagttcagcaaggtgagaaccatcaccacccgaagcaacagcatcaaacaaggcaaggaccagcactttcctgtgttcatgaacgagaaggaggacatcctgtggtgtaccgagatggagagagtgttcgggttcccagtccactacacagatgtcagcaacatgtctagactggccagacagagactgctgggaagaagctggtccgtccctgtgatcagacacctgttcgcccctctgaaggagtacttcgcctgcgtgagcagcggcaacagcaacgccaacagccggggccccagcttctctagcggcctggtgccactgtccctgagagggagccacatgggccccatggagatctacaaaaccgtgagcgcctggaagcggcagcctgtgcgcgtgctgagcctgtttcggaatatcgataaagtcctgaaaagcctgggattcctggagagcggctctggctccggcggtggcaccctgaagtacgtggaggatgtgacaaacgtggtcagacgggatgtggagaagtggggccccttcgatctggtgtacggcagcacccaacccctgggcagctcttgtgaccggtgccctggctggtacatgtttcagttccaccggatcctgcagtacgccctgccgagacaggagtcccagcggccattcttttggattttcatggacaacttgctgctgaccgaggatgaccaggaaactaccactcggttcctgcagaccgaagccgtgaccctgcaggacgtgagaggccgggactaccagaacgccatgcgggtgtggtccaacatccctggactgaaaagcaagcacgcacctctgacccctaaagaagaggagtacctgcaggcccaggtgcggagcagaagcaagctggacgcccctaaggtggatctgctggtgaagaattgcctcctgcccctgagagagtacttcaagtatttcagccagaatagtctgcccctgggcggcccaagcagcggcgcccctcctcccagcggcggcagcccagccggctccccaacctctaccgaggagggcacctctgagtccgccacccccgagagcggccctggcacctccaccgagcccagcgagggcagcgcacccggcagccctgccggcagccccacctccacagaggagggaaccagcaccgagcccagcgaaggcagcgccccaggcaccagcaccgagcctagtgagggcggctctggcggcggcagcgcccaggagattaaacggatcaacaagatcagaagaagacttgtgaaagacagcaacaccaagaaggccggcaagacaggccccatgaaaaccctgctggttagagtgatgacacccgatctgagagagcggctggaaaacctgagaaagaagcctgaaaatatcccccagcccatcagcaatacatctagagccaacctgaataagctgctgaccgattacaccgaaatgaagaaggcgatcctgcatgtgtactgggaagagttccagaaggaccctgtgggcctgatgagccgggtggcccagcctgccagcaagaagatcgatcagaacaagctgaaacctgagatggacgagaagggcaacctgaccaccgccggctttgcctgctctcagtgtggccagcccctgttcgtgtacaagctggagcaggtgtctgagaagggcaaggcttacaccaactacttcggacggtgcaatgtggccgagcacgaaaagctgatcctgctggcccagctgaagcccgagaaggatagcgacgaagccgtgacatatagcctgggaaagtttgggcagagggccctggatttctacagcattcatgtgaccaaggagtccacccaccccgtgaagcccctggcccagatcgccggaaacagatacgcctccggacctgtgggaaaggccctgagcgacgcatgtatgggcacaatcgcctccttcctgtctaagtaccaggacatcatcatcgaacaccagaaggtggtgaagggcaaccagaagagactggagagcctgcgggagctggccggcaaggaaaacctggaataccctagcgtgaccctgccacctcagcctcacaccaaggagggcgttgatgcctacaacgaagtgatcgcccgggtgcgaatgtgggtgaacctgaacctgtggcagaagctgaagctaagcagagatgatgccaagcctctgctgagactgaagggattcccttcctttcctctggtcgagagacaggccaacgaagtggactggtgggacatggtgtgtaacgtgaagaagctgatcaacgagaaaaaggaggatggcaaggtgttttggcagaatctggctggctacaagagacaggaagccctgagaccatacctgagcagcgaggaagatcggaagaagggaaagaaattcgctcggtaccagctgggcgacctgctgctgcacctggaaaagaagcacggcgaggactggggaaaggtgtacgacgaggcctgggagcggattgacaagaaagtggaaggcctgagcaagcacatcaagctggaagaggaacggagaagcgaggacgcccagagcaaggccgccctgaccgactggctgcgggctaaggccagcttcgtgatcgagggcctgaaggaggccgacaaggacgagttctgcagatgcgagctgaagctgcagaagtggtacggggacctgcggggaaagcccttcgccatcgaagccgagaacagcatcctggacatcagcggcttcagcaagcagtacaactgtgccttcatctggcagaaggacggcgtgaagaagctgaacctgtacctgatcatcaactacttcaagggcggcaagctgcggttcaagaagatcaaacctgaagccttcgaagccaacagattctacaccgtgatcaacaaaaagagcggcgagatcgtgcccatggaggtgaacttcaacttcgacgaccccaacctgatcatcctgcctctggcctttggcaagagacagggcagagaattcatctggaacgacctgctgtccctggaaaccggcagcctgaagctggccaacggaagagtgatcgagaagacactgtacaacagaagaacccggcaggatgagcctgccctgttcgtggccctgaccttcgagcggcgggaggtcctggactcctccaatatcaaaccaatgaacctgatcggcgtggcaagaggcgaaaacatccccgccgtgatcgccctgaccgaccccgagggctgcccactgagccggtttaaggatagcctgggaaacccaacccacatcctgagaatcggcgagagctataaggagaagcagcggaccatccaggccaagaaggaggtggagcagcggagagccggcggctacagccggaagtacgccagcaaagccaagaatctggcagacgatatggtgagaaacaccgctagagatctgctgtactacgccgtgacccaggatgccatgctgatcttcgccaacctgagccggggcttcggccggcagggcaagcggaccttcatggccgagagacagtacacacggatggaggactggctgaccgccaagctggcctacgagggcctgagcaagacctacctgtccaagacactggcccagtacacctccaagacatgcagcaactgtgggtttaccatcaccagcgccgactacgacagggtgctggagaagctgaagaagacagcaacaggctggatgaccacaattaacggcaaggagctgaaggtggagggccagattacctactacaacagatacaagagacagaacgtagtcaaggacctgtccgtcgagctggatagactgagcgaagaatctgtgaacaacgacatctcctcctggacaaagggcagaagcggagaagctctgagcctcctgaagaaaagattctcccatagacccgtgcaggagaagttcgtgtgcctgaactgcggcttcgagacacacgcagccgagcaagccgccctgaacatcgccagatcctggctgttcctgcggagccaggagtacaagaaataccagacaaacaagacaaccggcaacaccgataagagagccttcgtcgagacctggcagtccttttaccggaagaagcttaaggaggtgtggaaacctgccgtgcggtctggcggatctggcggaggctccacaagcgtgcaggccagcctgagcttcgaggacgtggccgtgaggttcacctgggaggagtggcagctgctggaccccagccagaaggacctgtacaggaacgtgatgctggagaactactgcaacctggtgagcgtgggctaccagacccccaagcccgacagcctgttccagctggagcagggcgagcccccctggagggtggagggcgccggccagagccagacctgccccgaggagatctgggagaccagccccaagaaaaagagaaaagtctaagctgccttctgcggggcttgccttctggccatgcccttcttctctcccttgcacctgtacctcttggtctttgaataaagcctgagtaggaaggctagcaaaaaaaaaaaaaaaaaaaaaaaaaaaaaaaaaaaaaaaaaaaaaaaaaaaaaaaaaaaaaaaaaaaaaaaaaaaaaaaa

SEQ ID NO: 6371 - RNA, 5797 nt, synthetic construct
  source 1..5797: mol_type = other RNA
aggaaataagagagaaaagaagagtaagaagaaatataagagccaccatggcccctaagaagaagcgtaaagtgagccggatggaacgcctcgtctacgaggtgcggcagaagtgcagaaacatcgaggacatctgcatctcctgcggatctctgaacgtgaccctggagcacccactgttcatcggcggcatgtgccagaactgtaaaaactgttttctggagtgtgcctatcaatacgacgatgacggctaccagagctactgcaccatctgttgcggcggaagagaggtgctgatgtgtggaaataacaactgctgccggtgcttctgcgtggaatgcgtggacctgctggtgggccccggcgccgcccaggccgctattaaggaagatccttggaactgctacatgtgcggccacaagggcacatacggcctgctgagacggagagaggactggcctagcagactgcagatgttcttcgccaataaccacgaccaggagttcgacccccctaaggtgtaccctcccgtccccgccgagaagagaaagcccatccgggtcctgagcctgttcgatggcatcgccaccggtctgctggtgctgaaggacctgggcatccaggtggataggtacattgcctccgaggtgtgcgaggactccatcaccgtgggaatggtgcgtcatcagggcaagatcatgtacgtgggcgacgtgcggagcgtgacacagaagcatatccaggagtggggccctttcgacctggtgatcggcggcagcccttgcaatgacctgagcatcgtgaacccagcccggaagggcctgtacgagggaaccggcagactgttcttcgagttttacagactgctgcacgacgcccggcctaaggaaggcgacgaccggcccttcttttggctgttcgagaatgtggtggccatgggagtcagcgacaagcgggatattagccggttcctggagagcaaccccgtgatgatcgatgccaaggaagtgagcgccgcccaccgggccagatacttctggggcaatctgcctggcatgaacagacccctggccagcaccgtgaacgacaagctggagctgcaggagtgcctggagcacggccggatcgccaagttcagcaaggtgagaaccatcaccacccgaagcaacagcatcaaacaaggcaaggaccagcactttcctgtgttcatgaacgagaaggaggacatcctgtggtgtaccgagatggagagagtgttcgggttcccagtccactacacagatgtcagcaacatgtctagactggccagacagagactgctgggaagaagctggtccgtccctgtgatcagacacctgttcgcccctctgaaggagtacttcgcctgcgtgagcagcggcaacagcaacgccaacagccggggccccagcttctctagcggcctggtgccactgtccctgagagggagccacatgggccccatggagatctacaaaaccgtgagcgcctggaagcggcagcctgtgcgcgtgctgagcctgtttcggaatatcgataaagtcctgaaaagcctgggattcctggagagcggctctggctccggcggtggcaccctgaagtacgtggaggatgtgacaaacgtggtcagacgggatgtggagaagtggggccccttcgatctggtgtacggcagcacccaacccctgggcagctcttgtgaccggtgccctggctggtacatgtttcagttccaccggatcctgcagtacgccctgccgagacaggagtcccagcggccattcttttggattttcatggacaacttgctgctgaccgaggatgaccaggaaactaccactcggttcctgcagaccgaagccgtgaccctgcaggacgtgagaggccgggactaccagaacgccatgcgggtgtggtccaacatccctggactgaaaagcaagcacgcacctctgacccctaaagaagaggagtacctgcaggcccaggtgcggagcagaagcaagctggacgcccctaaggtggatctgctggtgaagaattgcctcctgcccctgagagagtacttcaagtatttcagccagaatagtctgcccctgggcggcccaagcagcggcgcccctcctcccagcggcggcagcccagccggctccccaacctctaccgaggagggcacctctgagtccgccacccccgagagcggccctggcacctccaccgagcccagcgagggcagcgcacccggcagccctgccggcagccccacctccacagaggagggaaccagcaccgagcccagcgaaggcagcgccccaggcaccagcaccgagcctagtgagggcggctctggcggcggcagcgcccaggagattaaacggatcaacaagatcagaagaagacttgtgaaagacagcaacaccaagaaggccggcaagacaggccccatgaaaaccctgctggttagagtgatgacacccgatctgagagagcggctggaaaacctgagaaagaagcctgaaaatatcccccagcccatcagcaatacatctagagccaacctgaataagctgctgaccgattacaccgaaatgaagaaggcgatcctgcatgtgtactgggaagagttccagaaggaccctgtgggcctgatgagccgggtggcccagcctgccagcaagaagatcgatcagaacaagctgaaacctgagatggacgagaagggcaacctgaccaccgccggctttgcctgctctcagtgtggccagcccctgttcgtgtacaagctggagcaggtgtctgagaagggcaaggcttacaccaactacttcggacggtgcaatgtggccgagcacgaaaagctgatcctgctggcccagctgaagcccgagaaggatagcgacgaagccgtgacatatagcctgggaaagtttgggcagagggccctggatttctacagcattcatgtgaccaaggagtccacccaccccgtgaagcccctggcccagatcgccggaaacagatacgcctccggacctgtgggaaaggccctgagcgacgcatgtatgggcacaatcgcctccttcctgtctaagtaccaggacatcatcatcgaacaccagaaggtggtgaagggcaaccagaagagactggagagcctgcgggagctggccggcaaggaaaacctggaataccctagcgtgaccctgccacctcagcctcacaccaaggagggcgttgatgcctacaacgaagtgatcgcccgggtgcgaatgtgggtgaacctgaacctgtggcagaagctgaagctaagcagagatgatgccaagcctctgctgagactgaagggattcccttcctttcctctggtcgagagacaggccaacgaagtggactggtgggacatggtgtgtaacgtgaagaagctgatcaacgagaaaaaggaggatggcaaggtgttttggcagaatctggctggctacaagagacaggaagccctgagaccatacctgagcagcgaggaagatcggaagaagggaaagaaattcgctcggtaccagctgggcgacctgctgctgcacctggaaaagaagcacggcgaggactggggaaaggtgtacgacgaggcctgggagcggattgacaagaaagtggaaggcctgagcaagcacatcaagctggaagaggaacggagaagcgaggacgcccagagcaaggccgccctgaccgactggctgcgggctaaggccagcttcgtgatcgagggcctgaaggaggccgacaaggacgagttctgcagatgcgagctgaagctgcagaagtggtacggggacctgcggggaaagcccttcgccatcgaagccgagaacagcatcctggacatcagcggcttcagcaagcagtacaactgtgccttcatctggcagaaggacggcgtgaagaagctgaacctgtacctgatcatcaactacttcaagggcggcaagctgcggttcaagaagatcaaacctgaagccttcgaagccaacagattctacaccgtgatcaacaaaaagagcggcgagatcgtgcccatggaggtgaacttcaacttcgacgaccccaacctgatcatcctgcctctggcctttggcaagagacagggcagagaattcatctggaacgacctgctgtccctggaaaccggcagcctgaagctggccaacggaagagtgatcgagaagacactgtacaacagaagaacccggcaggatgagcctgccctgttcgtggccctgaccttcgagcggcgggaggtcctggactcctccaatatcaaaccaatgaacctgatcggcgtggcaagaggcgaaaacatccccgccgtgatcgccctgaccgaccccgagggctgcccactgagccggtttaaggatagcctgggaaacccaacccacatcctgagaatcggcgagagctataaggagaagcagcggaccatccaggccaagaaggaggtggagcagcggagagccggcggctacagccggaagtacgccagcaaagccaagaatctggcagacgatatggtgagaaacaccgctagagatctgctgtactacgccgtgacccaggatgccatgctgatcttcgccaacctgagccggggcttcggccggcagggcaagcggaccttcatggccgagagacagtacacacggatggaggactggctgaccgccaagctggcctacgagggcctgagcaagacctacctgtccaagacactggcccagtacacctccaagacatgcagcaactgtgggtttaccatcaccagcgccgactacgacagggtgctggagaagctgaagaagacagcaacaggctggatgaccacaattaacggcaaggagctgaaggtggagggccagattacctactacaacagatacaagagacagaacgtagtcaaggacctgtccgtcgagctggatagactgagcgaagaatctgtgaacaacgacatctcctcctggacaaagggcagaagcggagaagctctgagcctcctgaagaaaagattctcccatagacccgtgcaggagaagttcgtgtgcctgaactgcggcttcgagacacacgcagccgagcaagccgccctgaacatcgccagatcctggctgttcctgcggagccaggagtacaagaaataccagacaaacaagacaaccggcaacaccgataagagagccttcgtcgagacctggcagtccttttaccggaagaagcttaaggaggtgtggaaacctgccgtgcggtctggcggatctggcggaggctccacaagcctgctgcacggctgctgcagcctggagacccacagcatcagggacaagaacgccgtgacctacggcgacgtgcacgtgaacttcacccaggaggagtgggccctgctggaccccagccagaagaagctgtacaaggacgtgatgctggagacctacaggaacctgaacgccatcggcttcaactgggacgacaagaacaccgaggagcactgccccagcaccaggaggtggaggaggtaccccaccagccccaagaaaaagagaaaagtctaagctgccttctgcggggcttgccttctggccatgcccttcttctctcccttgcacctgtacctcttggtctttgaataaagcctgagtaggaaggctagcaaaaaaaaaaaaaaaaaaaaaaaaaaaaaaaaaaaaaaaaaaaaaaaaaaaaaaaaaaaaaaaaaaaaaaaaaaaaaaaa

SEQ ID NO: 6372 - RNA, 5797 nt, synthetic construct
  source 1..5797: mol_type = other RNA
aggaaataagagagaaaagaagagtaagaagaaatataagagccaccatggcccctaagaagaagcgtaaagtgagccggatggaacgcctcgtctacgaggtgcggcagaagtgcagaaacatcgaggacatctgcatctcctgcggatctctgaacgtgaccctggagcacccactgttcatcggcggcatgtgccagaactgtaaaaactgttttctggagtgtgcctatcaatacgacgatgacggctaccagagctactgcaccatctgttgcggcggaagagaggtgctgatgtgtggaaataacaactgctgccggtgcttctgcgtggaatgcgtggacctgctggtgggccccggcgccgcccaggccgctattaaggaagatccttggaactgctacatgtgcggccacaagggcacatacggcctgctgagacggagagaggactggcctagcagactgcagatgttcttcgccaataaccacgaccaggagttcgacccccctaaggtgtaccctcccgtccccgccgagaagagaaagcccatccgggtcctgagcctgttcgatggcatcgccaccggtctgctggtgctgaaggacctgggcatccaggtggataggtacattgcctccgaggtgtgcgaggactccatcaccgtgggaatggtgcgtcatcagggcaagatcatgtacgtgggcgacgtgcggagcgtgacacagaagcatatccaggagtggggccctttcgacctggtgatcggcggcagcccttgcaatgacctgagcatcgtgaacccagcccggaagggcctgtacgagggaaccggcagactgttcttcgagttttacagactgctgcacgacgcccggcctaaggaaggcgacgaccggcccttcttttggctgttcgagaatgtggtggccatgggagtcagcgacaagcgggatattagccggttcctggagagcaaccccgtgatgatcgatgccaaggaagtgagcgccgcccaccgggccagatacttctggggcaatctgcctggcatgaacagacccctggccagcaccgtgaacgacaagctggagctgcaggagtgcctggagcacggccggatcgccaagttcagcaaggtgagaaccatcaccacccgaagcaacagcatcaaacaaggcaaggaccagcactttcctgtgttcatgaacgagaaggaggacatcctgtggtgtaccgagatggagagagtgttcgggttcccagtccactacacagatgtcagcaacatgtctagactggccagacagagactgctgggaagaagctggtccgtccctgtgatcagacacctgttcgcccctctgaaggagtacttcgcctgcgtgagcagcggcaacagcaacgccaacagccggggccccagcttctctagcggcctggtgccactgtccctgagagggagccacatgggccccatggagatctacaaaaccgtgagcgcctggaagcggcagcctgtgcgcgtgctgagcctgtttcggaatatcgataaagtcctgaaaagcctgggattcctggagagcggctctggctccggcggtggcaccctgaagtacgtggaggatgtgacaaacgtggtcagacgggatgtggagaagtggggccccttcgatctggtgtacggcagcacccaacccctgggcagctcttgtgaccggtgccctggctggtacatgtttcagttccaccggatcctgcagtacgccctgccgagacaggagtcccagcggccattcttttggattttcatggacaacttgctgctgaccgaggatgaccaggaaactaccactcggttcctgcagaccgaagccgtgaccctgcaggacgtgagaggccgggactaccagaacgccatgcgggtgtggtccaacatccctggactgaaaagcaagcacgcacctctgacccctaaagaagaggagtacctgcaggcccaggtgcggagcagaagcaagctggacgcccctaaggtggatctgctggtgaagaattgcctcctgcccctgagagagtacttcaagtatttcagccagaatagtctgcccctgggcggcccaagcagcggcgcccctcctcccagcggcggcagcccagccggctccccaacctctaccgaggagggcacctctgagtccgccacccccgagagcggccctggcacctccaccgagcccagcgagggcagcgcacccggcagccctgccggcagccccacctccacagaggagggaaccagcaccgagcccagcgaaggcagcgccccaggcaccagcaccgagcctagtgagggcggctctggcggcggcagcgcccaggagattaaacggatcaacaagatcagaagaagacttgtgaaagacagcaacaccaagaaggccggcaagacaggccccatgaaaaccctgctggttagagtgatgacacccgatctgagagagcggctggaaaacctgagaaagaagcctgaaaatatcccccagcccatcagcaatacatctagagccaacctgaataagctgctgaccgattacaccgaaatgaagaaggcgatcctgcatgtgtactgggaagagttccagaaggaccctgtgggcctgatgagccgggtggcccagcctgccagcaagaagatcgatcagaacaagctgaaacctgagatggacgagaagggcaacctgaccaccgccggctttgcctgctctcagtgtggccagcccctgttcgtgtacaagctggagcaggtgtctgagaagggcaaggcttacaccaactacttcggacggtgcaatgtggccgagcacgaaaagctgatcctgctggcccagctgaagcccgagaaggatagcgacgaagccgtgacatatagcctgggaaagtttgggcagagggccctggatttctacagcattcatgtgaccaaggagtccacccaccccgtgaagcccctggcccagatcgccggaaacagatacgcctccggacctgtgggaaaggccctgagcgacgcatgtatgggcacaatcgcctccttcctgtctaagtaccaggacatcatcatcgaacaccagaaggtggtgaagggcaaccagaagagactggagagcctgcgggagctggccggcaaggaaaacctggaataccctagcgtgaccctgccacctcagcctcacaccaaggagggcgttgatgcctacaacgaagtgatcgcccgggtgcgaatgtgggtgaacctgaacctgtggcagaagctgaagctaagcagagatgatgccaagcctctgctgagactgaagggattcccttcctttcctctggtcgagagacaggccaacgaagtggactggtgggacatggtgtgtaacgtgaagaagctgatcaacgagaaaaaggaggatggcaaggtgttttggcagaatctggctggctacaagagacaggaagccctgagaccatacctgagcagcgaggaagatcggaagaagggaaagaaattcgctcggtaccagctgggcgacctgctgctgcacctggaaaagaagcacggcgaggactggggaaaggtgtacgacgaggcctgggagcggattgacaagaaagtggaaggcctgagcaagcacatcaagctggaagaggaacggagaagcgaggacgcccagagcaaggccgccctgaccgactggctgcgggctaaggccagcttcgtgatcgagggcctgaaggaggccgacaaggacgagttctgcagatgcgagctgaagctgcagaagtggtacggggacctgcggggaaagcccttcgccatcgaagccgagaacagcatcctggacatcagcggcttcagcaagcagtacaactgtgccttcatctggcagaaggacggcgtgaagaagctgaacctgtacctgatcatcaactacttcaagggcggcaagctgcggttcaagaagatcaaacctgaagccttcgaagccaacagattctacaccgtgatcaacaaaaagagcggcgagatcgtgcccatggaggtgaacttcaacttcgacgaccccaacctgatcatcctgcctctggcctttggcaagagacagggcagagaattcatctggaacgacctgctgtccctggaaaccggcagcctgaagctggccaacggaagagtgatcgagaagacactgtacaacagaagaacccggcaggatgagcctgccctgttcgtggccctgaccttcgagcggcgggaggtcctggactcctccaatatcaaaccaatgaacctgatcggcgtggcaagaggcgaaaacatccccgccgtgatcgccctgaccgaccccgagggctgcccactgagccggtttaaggatagcctgggaaacccaacccacatcctgagaatcggcgagagctataaggagaagcagcggaccatccaggccaagaaggaggtggagcagcggagagccggcggctacagccggaagtacgccagcaaagccaagaatctggcagacgatatggtgagaaacaccgctagagatctgctgtactacgccgtgacccaggatgccatgctgatcttcgccaacctgagccggggcttcggccggcagggcaagcggaccttcatggccgagagacagtacacacggatggaggactggctgaccgccaagctggcctacgagggcctgagcaagacctacctgtccaagacactggcccagtacacctccaagacatgcagcaactgtgggtttaccatcaccagcgccgactacgacagggtgctggagaagctgaagaagacagcaacaggctggatgaccacaattaacggcaaggagctgaaggtggagggccagattacctactacaacagatacaagagacagaacgtagtcaaggacctgtccgtcgagctggatagactgagcgaagaatctgtgaacaacgacatctcctcctggacaaagggcagaagcggagaagctctgagcctcctgaagaaaagattctcccatagacccgtgcaggagaagttcgtgtgcctgaactgcggcttcgagacacacgcagccgagcaagccgccctgaacatcgccagatcctggctgttcctgcggagccaggagtacaagaaataccagacaaacaagacaaccggcaacaccgataagagagccttcgtcgagacctggcagtccttttaccggaagaagcttaaggaggtgtggaaacctgccgtgcggtctggcggatctggcggaggctccacaagcatgggcctgctgaccttcagggacgtggccatcgagttcagcctggaggagtggcagtgcctggacaccgcccagaagaacctgtacaggaacgtgatgctggagaactacaggaacctggccttcctgggcatcgccgtgagcaagcccgacctgatcatctgcctggagaaggagaaggagccctggaacatgaagaggcacgagatggtggacgagccccccgacatctgcccccacttcaccagccccaagaaaaagagaaaagtctaagctgccttctgcggggcttgccttctggccatgcccttcttctctcccttgcacctgtacctcttggtctttgaataaagcctgagtaggaaggctagcaaaaaaaaaaaaaaaaaaaaaaaaaaaaaaaaaaaaaaaaaaaaaaaaaaaaaaaaaaaaaaaaaaaaaaaaaaaaaaaa

SEQ ID NO: 6373 - RNA, 5806 nt, synthetic construct
  source 1..5806: mol_type = other RNA
aggaaataagagagaaaagaagagtaagaagaaatataagagccaccatggcccctaagaagaagcgtaaagtgagccggatggaacgcctcgtctacgaggtgcggcagaagtgcagaaacatcgaggacatctgcatctcctgcggatctctgaacgtgaccctggagcacccactgttcatcggcggcatgtgccagaactgtaaaaactgttttctggagtgtgcctatcaatacgacgatgacggctaccagagctactgcaccatctgttgcggcggaagagaggtgctgatgtgtggaaataacaactgctgccggtgcttctgcgtggaatgcgtggacctgctggtgggccccggcgccgcccaggccgctattaaggaagatccttggaactgctacatgtgcggccacaagggcacatacggcctgctgagacggagagaggactggcctagcagactgcagatgttcttcgccaataaccacgaccaggagttcgacccccctaaggtgtaccctcccgtccccgccgagaagagaaagcccatccgggtcctgagcctgttcgatggcatcgccaccggtctgctggtgctgaaggacctgggcatccaggtggataggtacattgcctccgaggtgtgcgaggactccatcaccgtgggaatggtgcgtcatcagggcaagatcatgtacgtgggcgacgtgcggagcgtgacacagaagcatatccaggagtggggccctttcgacctggtgatcggcggcagcccttgcaatgacctgagcatcgtgaacccagcccggaagggcctgtacgagggaaccggcagactgttcttcgagttttacagactgctgcacgacgcccggcctaaggaaggcgacgaccggcccttcttttggctgttcgagaatgtggtggccatgggagtcagcgacaagcgggatattagccggttcctggagagcaaccccgtgatgatcgatgccaaggaagtgagcgccgcccaccgggccagatacttctggggcaatctgcctggcatgaacagacccctggccagcaccgtgaacgacaagctggagctgcaggagtgcctggagcacggccggatcgccaagttcagcaaggtgagaaccatcaccacccgaagcaacagcatcaaacaaggcaaggaccagcactttcctgtgttcatgaacgagaaggaggacatcctgtggtgtaccgagatggagagagtgttcgggttcccagtccactacacagatgtcagcaacatgtctagactggccagacagagactgctgggaagaagctggtccgtccctgtgatcagacacctgttcgcccctctgaaggagtacttcgcctgcgtgagcagcggcaacagcaacgccaacagccggggccccagcttctctagcggcctggtgccactgtccctgagagggagccacatgggccccatggagatctacaaaaccgtgagcgcctggaagcggcagcctgtgcgcgtgctgagcctgtttcggaatatcgataaagtcctgaaaagcctgggattcctggagagcggctctggctccggcggtggcaccctgaagtacgtggaggatgtgacaaacgtggtcagacgggatgtggagaagtggggccccttcgatctggtgtacggcagcacccaacccctgggcagctcttgtgaccggtgccctggctggtacatgtttcagttccaccggatcctgcagtacgccctgccgagacaggagtcccagcggccattcttttggattttcatggacaacttgctgctgaccgaggatgaccaggaaactaccactcggttcctgcagaccgaagccgtgaccctgcaggacgtgagaggccgggactaccagaacgccatgcgggtgtggtccaacatccctggactgaaaagcaagcacgcacctctgacccctaaagaagaggagtacctgcaggcccaggtgcggagcagaagcaagctggacgcccctaaggtggatctgctggtgaagaattgcctcctgcccctgagagagtacttcaagtatttcagccagaatagtctgcccctgggcggcccaagcagcggcgcccctcctcccagcggcggcagcccagccggctccccaacctctaccgaggagggcacctctgagtccgccacccccgagagcggccctggcacctccaccgagcccagcgagggcagcgcacccggcagccctgccggcagccccacctccacagaggagggaaccagcaccgagcccagcgaaggcagcgccccaggcaccagcaccgagcctagtgagggcggctctggcggcggcagcgcccaggagattaaacggatcaacaagatcagaagaagacttgtgaaagacagcaacaccaagaaggccggcaagacaggccccatgaaaaccctgctggttagagtgatgacacccgatctgagagagcggctggaaaacctgagaaagaagcctgaaaatatcccccagcccatcagcaatacatctagagccaacctgaataagctgctgaccgattacaccgaaatgaagaaggcgatcctgcatgtgtactgggaagagttccagaaggaccctgtgggcctgatgagccgggtggcccagcctgccagcaagaagatcgatcagaacaagctgaaacctgagatggacgagaagggcaacctgaccaccgccggctttgcctgctctcagtgtggccagcccctgttcgtgtacaagctggagcaggtgtctgagaagggcaaggcttacaccaactacttcggacggtgcaatgtggccgagcacgaaaagctgatcctgctggcccagctgaagcccgagaaggatagcgacgaagccgtgacatatagcctgggaaagtttgggcagagggccctggatttctacagcattcatgtgaccaaggagtccacccaccccgtgaagcccctggcccagatcgccggaaacagatacgcctccggacctgtgggaaaggccctgagcgacgcatgtatgggcacaatcgcctccttcctgtctaagtaccaggacatcatcatcgaacaccagaaggtggtgaagggcaaccagaagagactggagagcctgcgggagctggccggcaaggaaaacctggaataccctagcgtgaccctgccacctcagcctcacaccaaggagggcgttgatgcctacaacgaagtgatcgcccgggtgcgaatgtgggtgaacctgaacctgtggcagaagctgaagctaagcagagatgatgccaagcctctgctgagactgaagggattcccttcctttcctctggtcgagagacaggccaacgaagtggactggtgggacatggtgtgtaacgtgaagaagctgatcaacgagaaaaaggaggatggcaaggtgttttggcagaatctggctggctacaagagacaggaagccctgagaccatacctgagcagcgaggaagatcggaagaagggaaagaaattcgctcggtaccagctgggcgacctgctgctgcacctggaaaagaagcacggcgaggactggggaaaggtgtacgacgaggcctgggagcggattgacaagaaagtggaaggcctgagcaagcacatcaagctggaagaggaacggagaagcgaggacgcccagagcaaggccgccctgaccgactggctgcgggctaaggccagcttcgtgatcgagggcctgaaggaggccgacaaggacgagttctgcagatgcgagctgaagctgcagaagtggtacggggacctgcggggaaagcccttcgccatcgaagccgagaacagcatcctggacatcagcggcttcagcaagcagtacaactgtgccttcatctggcagaaggacggcgtgaagaagctgaacctgtacctgatcatcaactacttcaagggcggcaagctgcggttcaagaagatcaaacctgaagccttcgaagccaacagattctacaccgtgatcaacaaaaagagcggcgagatcgtgcccatggaggtgaacttcaacttcgacgaccccaacctgatcatcctgcctctggcctttggcaagagacagggcagagaattcatctggaacgacctgctgtccctggaaaccggcagcctgaagctggccaacggaagagtgatcgagaagacactgtacaacagaagaacccggcaggatgagcctgccctgttcgtggccctgaccttcgagcggcgggaggtcctggactcctccaatatcaaaccaatgaacctgatcggcgtggcaagaggcgaaaacatccccgccgtgatcgccctgaccgaccccgagggctgcccactgagccggtttaaggatagcctgggaaacccaacccacatcctgagaatcggcgagagctataaggagaagcagcggaccatccaggccaagaaggaggtggagcagcggagagccggcggctacagccggaagtacgccagcaaagccaagaatctggcagacgatatggtgagaaacaccgctagagatctgctgtactacgccgtgacccaggatgccatgctgatcttcgccaacctgagccggggcttcggccggcagggcaagcggaccttcatggccgagagacagtacacacggatggaggactggctgaccgccaagctggcctacgagggcctgagcaagacctacctgtccaagacactggcccagtacacctccaagacatgcagcaactgtgggtttaccatcaccagcgccgactacgacagggtgctggagaagctgaagaagacagcaacaggctggatgaccacaattaacggcaaggagctgaaggtggagggccagattacctactacaacagatacaagagacagaacgtagtcaaggacctgtccgtcgagctggatagactgagcgaagaatctgtgaacaacgacatctcctcctggacaaagggcagaagcggagaagctctgagcctcctgaagaaaagattctcccatagacccgtgcaggagaagttcgtgtgcctgaactgcggcttcgagacacacgcagccgagcaagccgccctgaacatcgccagatcctggctgttcctgcggagccaggagtacaagaaataccagacaaacaagacaaccggcaacaccgataagagagccttcgtcgagacctggcagtccttttaccggaagaagcttaaggaggtgtggaaacctgccgtgcggtctggcggatctggcggaggctccacaagcgtgacctacgaggacgtgcacgtgaacttcagccacgaggagtgggccctgctggacagcagccagaagagcctgtacagggacgtgatgctggagacctgcaggaacctgatggccatcggctacaggctggaggaccacaacatcgaggagcactgccagagcagcaggaggcccggcaggtacaacatctgcaactgcggctacaagccctgcgagaacgaggaccacggcaagaagcagtgcaccttcaccagccccaagaaaaagagaaaagtctaagctgccttctgcggggcttgccttctggccatgcccttcttctctcccttgcacctgtacctcttggtctttgaataaagcctgagtaggaaggctagcaaaaaaaaaaaaaaaaaaaaaaaaaaaaaaaaaaaaaaaaaaaaaaaaaaaaaaaaaaaaaaaaaaaaaaaaaaaaaaaa

SEQ ID NO: 6374 - RNA, 5806 nt, synthetic construct
  source 1..5806: mol_type = other RNA
aggaaataagagagaaaagaagagtaagaagaaatataagagccaccatggcccctaagaagaagcgtaaagtgagccggatggaacgcctcgtctacgaggtgcggcagaagtgcagaaacatcgaggacatctgcatctcctgcggatctctgaacgtgaccctggagcacccactgttcatcggcggcatgtgccagaactgtaaaaactgttttctggagtgtgcctatcaatacgacgatgacggctaccagagctactgcaccatctgttgcggcggaagagaggtgctgatgtgtggaaataacaactgctgccggtgcttctgcgtggaatgcgtggacctgctggtgggccccggcgccgcccaggccgctattaaggaagatccttggaactgctacatgtgcggccacaagggcacatacggcctgctgagacggagagaggactggcctagcagactgcagatgttcttcgccaataaccacgaccaggagttcgacccccctaaggtgtaccctcccgtccccgccgagaagagaaagcccatccgggtcctgagcctgttcgatggcatcgccaccggtctgctggtgctgaaggacctgggcatccaggtggataggtacattgcctccgaggtgtgcgaggactccatcaccgtgggaatggtgcgtcatcagggcaagatcatgtacgtgggcgacgtgcggagcgtgacacagaagcatatccaggagtggggccctttcgacctggtgatcggcggcagcccttgcaatgacctgagcatcgtgaacccagcccggaagggcctgtacgagggaaccggcagactgttcttcgagttttacagactgctgcacgacgcccggcctaaggaaggcgacgaccggcccttcttttggctgttcgagaatgtggtggccatgggagtcagcgacaagcgggatattagccggttcctggagagcaaccccgtgatgatcgatgccaaggaagtgagcgccgcccaccgggccagatacttctggggcaatctgcctggcatgaacagacccctggccagcaccgtgaacgacaagctggagctgcaggagtgcctggagcacggccggatcgccaagttcagcaaggtgagaaccatcaccacccgaagcaacagcatcaaacaaggcaaggaccagcactttcctgtgttcatgaacgagaaggaggacatcctgtggtgtaccgagatggagagagtgttcgggttcccagtccactacacagatgtcagcaacatgtctagactggccagacagagactgctgggaagaagctggtccgtccctgtgatcagacacctgttcgcccctctgaaggagtacttcgcctgcgtgagcagcggcaacagcaacgccaacagccggggccccagcttctctagcggcctggtgccactgtccctgagagggagccacatgggccccatggagatctacaaaaccgtgagcgcctggaagcggcagcctgtgcgcgtgctgagcctgtttcggaatatcgataaagtcctgaaaagcctgggattcctggagagcggctctggctccggcggtggcaccctgaagtacgtggaggatgtgacaaacgtggtcagacgggatgtggagaagtggggccccttcgatctggtgtacggcagcacccaacccctgggcagctcttgtgaccggtgccctggctggtacatgtttcagttccaccggatcctgcagtacgccctgccgagacaggagtcccagcggccattcttttggattttcatggacaacttgctgctgaccgaggatgaccaggaaactaccactcggttcctgcagaccgaagccgtgaccctgcaggacgtgagaggccgggactaccagaacgccatgcgggtgtggtccaacatccctggactgaaaagcaagcacgcacctctgacccctaaagaagaggagtacctgcaggcccaggtgcggagcagaagcaagctggacgcccctaaggtggatctgctggtgaagaattgcctcctgcccctgagagagtacttcaagtatttcagccagaatagtctgcccctgggcggcccaagcagcggcgcccctcctcccagcggcggcagcccagccggctccccaacctctaccgaggagggcacctctgagtccgccacccccgagagcggccctggcacctccaccgagcccagcgagggcagcgcacccggcagccctgccggcagccccacctccacagaggagggaaccagcaccgagcccagcgaaggcagcgccccaggcaccagcaccgagcctagtgagggcggctctggcggcggcagcgcccaggagattaaacggatcaacaagatcagaagaagacttgtgaaagacagcaacaccaagaaggccggcaagacaggccccatgaaaaccctgctggttagagtgatgacacccgatctgagagagcggctggaaaacctgagaaagaagcctgaaaatatcccccagcccatcagcaatacatctagagccaacctgaataagctgctgaccgattacaccgaaatgaagaaggcgatcctgcatgtgtactgggaagagttccagaaggaccctgtgggcctgatgagccgggtggcccagcctgccagcaagaagatcgatcagaacaagctgaaacctgagatggacgagaagggcaacctgaccaccgccggctttgcctgctctcagtgtggccagcccctgttcgtgtacaagctggagcaggtgtctgagaagggcaaggcttacaccaactacttcggacggtgcaatgtggccgagcacgaaaagctgatcctgctggcccagctgaagcccgagaaggatagcgacgaagccgtgacatatagcctgggaaagtttgggcagagggccctggatttctacagcattcatgtgaccaaggagtccacccaccccgtgaagcccctggcccagatcgccggaaacagatacgcctccggacctgtgggaaaggccctgagcgacgcatgtatgggcacaatcgcctccttcctgtctaagtaccaggacatcatcatcgaacaccagaaggtggtgaagggcaaccagaagagactggagagcctgcgggagctggccggcaaggaaaacctggaataccctagcgtgaccctgccacctcagcctcacaccaaggagggcgttgatgcctacaacgaagtgatcgcccgggtgcgaatgtgggtgaacctgaacctgtggcagaagctgaagctaagcagagatgatgccaagcctctgctgagactgaagggattcccttcctttcctctggtcgagagacaggccaacgaagtggactggtgggacatggtgtgtaacgtgaagaagctgatcaacgagaaaaaggaggatggcaaggtgttttggcagaatctggctggctacaagagacaggaagccctgagaccatacctgagcagcgaggaagatcggaagaagggaaagaaattcgctcggtaccagctgggcgacctgctgctgcacctggaaaagaagcacggcgaggactggggaaaggtgtacgacgaggcctgggagcggattgacaagaaagtggaaggcctgagcaagcacatcaagctggaagaggaacggagaagcgaggacgcccagagcaaggccgccctgaccgactggctgcgggctaaggccagcttcgtgatcgagggcctgaaggaggccgacaaggacgagttctgcagatgcgagctgaagctgcagaagtggtacggggacctgcggggaaagcccttcgccatcgaagccgagaacagcatcctggacatcagcggcttcagcaagcagtacaactgtgccttcatctggcagaaggacggcgtgaagaagctgaacctgtacctgatcatcaactacttcaagggcggcaagctgcggttcaagaagatcaaacctgaagccttcgaagccaacagattctacaccgtgatcaacaaaaagagcggcgagatcgtgcccatggaggtgaacttcaacttcgacgaccccaacctgatcatcctgcctctggcctttggcaagagacagggcagagaattcatctggaacgacctgctgtccctggaaaccggcagcctgaagctggccaacggaagagtgatcgagaagacactgtacaacagaagaacccggcaggatgagcctgccctgttcgtggccctgaccttcgagcggcgggaggtcctggactcctccaatatcaaaccaatgaacctgatcggcgtggcaagaggcgaaaacatccccgccgtgatcgccctgaccgaccccgagggctgcccactgagccggtttaaggatagcctgggaaacccaacccacatcctgagaatcggcgagagctataaggagaagcagcggaccatccaggccaagaaggaggtggagcagcggagagccggcggctacagccggaagtacgccagcaaagccaagaatctggcagacgatatggtgagaaacaccgctagagatctgctgtactacgccgtgacccaggatgccatgctgatcttcgccaacctgagccggggcttcggccggcagggcaagcggaccttcatggccgagagacagtacacacggatggaggactggctgaccgccaagctggcctacgagggcctgagcaagacctacctgtccaagacactggcccagtacacctccaagacatgcagcaactgtgggtttaccatcaccagcgccgactacgacagggtgctggagaagctgaagaagacagcaacaggctggatgaccacaattaacggcaaggagctgaaggtggagggccagattacctactacaacagatacaagagacagaacgtagtcaaggacctgtccgtcgagctggatagactgagcgaagaatctgtgaacaacgacatctcctcctggacaaagggcagaagcggagaagctctgagcctcctgaagaaaagattctcccatagacccgtgcaggagaagttcgtgtgcctgaactgcggcttcgagacacacgcagccgagcaagccgccctgaacatcgccagatcctggctgttcctgcggagccaggagtacaagaaataccagacaaacaagacaaccggcaacaccgataagagagccttcgtcgagacctggcagtccttttaccggaagaagcttaaggaggtgtggaaacctgccgtgcggtctggcggatctggcggaggctccacaagcctgacctacgacgacgtgtacgtgaacttcacccaggaggagtgggccctgctgaaccccagccagaagagcctgtacaaggacgtgatgctggagacctacaggaacctgatcgccgtgggctacaactgggaggaccacaacatcgaggagcactgccagagcagcaggaggcacggcaggaacgagaggatcctgaccggcgagaacccctacgagggcatccagtgcggcgaggccttcgtgcaccacaccagccccaagaaaaagagaaaagtctaagctgccttctgcggggcttgccttctggccatgcccttcttctctcccttgcacctgtacctcttggtctttgaataaagcctgagtaggaaggctagcaaaaaaaaaaaaaaaaaaaaaaaaaaaaaaaaaaaaaaaaaaaaaaaaaaaaaaaaaaaaaaaaaaaaaaaaaaaaaaaa

SEQ ID NO: 6375 - RNA, 5797 nt, synthetic construct
  source 1..5797: mol_type = other RNA
aggaaataagagagaaaagaagagtaagaagaaatataagagccaccatggcccctaagaagaagcgtaaagtgagccggatggaacgcctcgtctacgaggtgcggcagaagtgcagaaacatcgaggacatctgcatctcctgcggatctctgaacgtgaccctggagcacccactgttcatcggcggcatgtgccagaactgtaaaaactgttttctggagtgtgcctatcaatacgacgatgacggctaccagagctactgcaccatctgttgcggcggaagagaggtgctgatgtgtggaaataacaactgctgccggtgcttctgcgtggaatgcgtggacctgctggtgggccccggcgccgcccaggccgctattaaggaagatccttggaactgctacatgtgcggccacaagggcacatacggcctgctgagacggagagaggactggcctagcagactgcagatgttcttcgccaataaccacgaccaggagttcgacccccctaaggtgtaccctcccgtccccgccgagaagagaaagcccatccgggtcctgagcctgttcgatggcatcgccaccggtctgctggtgctgaaggacctgggcatccaggtggataggtacattgcctccgaggtgtgcgaggactccatcaccgtgggaatggtgcgtcatcagggcaagatcatgtacgtgggcgacgtgcggagcgtgacacagaagcatatccaggagtggggccctttcgacctggtgatcggcggcagcccttgcaatgacctgagcatcgtgaacccagcccggaagggcctgtacgagggaaccggcagactgttcttcgagttttacagactgctgcacgacgcccggcctaaggaaggcgacgaccggcccttcttttggctgttcgagaatgtggtggccatgggagtcagcgacaagcgggatattagccggttcctggagagcaaccccgtgatgatcgatgccaaggaagtgagcgccgcccaccgggccagatacttctggggcaatctgcctggcatgaacagacccctggccagcaccgtgaacgacaagctggagctgcaggagtgcctggagcacggccggatcgccaagttcagcaaggtgagaaccatcaccacccgaagcaacagcatcaaacaaggcaaggaccagcactttcctgtgttcatgaacgagaaggaggacatcctgtggtgtaccgagatggagagagtgttcgggttcccagtccactacacagatgtcagcaacatgtctagactggccagacagagactgctgggaagaagctggtccgtccctgtgatcagacacctgttcgcccctctgaaggagtacttcgcctgcgtgagcagcggcaacagcaacgccaacagccggggccccagcttctctagcggcctggtgccactgtccctgagagggagccacatgggccccatggagatctacaaaaccgtgagcgcctggaagcggcagcctgtgcgcgtgctgagcctgtttcggaatatcgataaagtcctgaaaagcctgggattcctggagagcggctctggctccggcggtggcaccctgaagtacgtggaggatgtgacaaacgtggtcagacgggatgtggagaagtggggccccttcgatctggtgtacggcagcacccaacccctgggcagctcttgtgaccggtgccctggctggtacatgtttcagttccaccggatcctgcagtacgccctgccgagacaggagtcccagcggccattcttttggattttcatggacaacttgctgctgaccgaggatgaccaggaaactaccactcggttcctgcagaccgaagccgtgaccctgcaggacgtgagaggccgggactaccagaacgccatgcgggtgtggtccaacatccctggactgaaaagcaagcacgcacctctgacccctaaagaagaggagtacctgcaggcccaggtgcggagcagaagcaagctggacgcccctaaggtggatctgctggtgaagaattgcctcctgcccctgagagagtacttcaagtatttcagccagaatagtctgcccctgggcggcccaagcagcggcgcccctcctcccagcggcggcagcccagccggctccccaacctctaccgaggagggcacctctgagtccgccacccccgagagcggccctggcacctccaccgagcccagcgagggcagcgcacccggcagccctgccggcagccccacctccacagaggagggaaccagcaccgagcccagcgaaggcagcgccccaggcaccagcaccgagcctagtgagggcggctctggcggcggcagcgcccaggagattaaacggatcaacaagatcagaagaagacttgtgaaagacagcaacaccaagaaggccggcaagacaggccccatgaaaaccctgctggttagagtgatgacacccgatctgagagagcggctggaaaacctgagaaagaagcctgaaaatatcccccagcccatcagcaatacatctagagccaacctgaataagctgctgaccgattacaccgaaatgaagaaggcgatcctgcatgtgtactgggaagagttccagaaggaccctgtgggcctgatgagccgggtggcccagcctgccagcaagaagatcgatcagaacaagctgaaacctgagatggacgagaagggcaacctgaccaccgccggctttgcctgctctcagtgtggccagcccctgttcgtgtacaagctggagcaggtgtctgagaagggcaaggcttacaccaactacttcggacggtgcaatgtggccgagcacgaaaagctgatcctgctggcccagctgaagcccgagaaggatagcgacgaagccgtgacatatagcctgggaaagtttgggcagagggccctggatttctacagcattcatgtgaccaaggagtccacccaccccgtgaagcccctggcccagatcgccggaaacagatacgcctccggacctgtgggaaaggccctgagcgacgcatgtatgggcacaatcgcctccttcctgtctaagtaccaggacatcatcatcgaacaccagaaggtggtgaagggcaaccagaagagactggagagcctgcgggagctggccggcaaggaaaacctggaataccctagcgtgaccctgccacctcagcctcacaccaaggagggcgttgatgcctacaacgaagtgatcgcccgggtgcgaatgtgggtgaacctgaacctgtggcagaagctgaagctaagcagagatgatgccaagcctctgctgagactgaagggattcccttcctttcctctggtcgagagacaggccaacgaagtggactggtgggacatggtgtgtaacgtgaagaagctgatcaacgagaaaaaggaggatggcaaggtgttttggcagaatctggctggctacaagagacaggaagccctgagaccatacctgagcagcgaggaagatcggaagaagggaaagaaattcgctcggtaccagctgggcgacctgctgctgcacctggaaaagaagcacggcgaggactggggaaaggtgtacgacgaggcctgggagcggattgacaagaaagtggaaggcctgagcaagcacatcaagctggaagaggaacggagaagcgaggacgcccagagcaaggccgccctgaccgactggctgcgggctaaggccagcttcgtgatcgagggcctgaaggaggccgacaaggacgagttctgcagatgcgagctgaagctgcagaagtggtacggggacctgcggggaaagcccttcgccatcgaagccgagaacagcatcctggacatcagcggcttcagcaagcagtacaactgtgccttcatctggcagaaggacggcgtgaagaagctgaacctgtacctgatcatcaactacttcaagggcggcaagctgcggttcaagaagatcaaacctgaagccttcgaagccaacagattctacaccgtgatcaacaaaaagagcggcgagatcgtgcccatggaggtgaacttcaacttcgacgaccccaacctgatcatcctgcctctggcctttggcaagagacagggcagagaattcatctggaacgacctgctgtccctggaaaccggcagcctgaagctggccaacggaagagtgatcgagaagacactgtacaacagaagaacccggcaggatgagcctgccctgttcgtggccctgaccttcgagcggcgggaggtcctggactcctccaatatcaaaccaatgaacctgatcggcgtggcaagaggcgaaaacatccccgccgtgatcgccctgaccgaccccgagggctgcccactgagccggtttaaggatagcctgggaaacccaacccacatcctgagaatcggcgagagctataaggagaagcagcggaccatccaggccaagaaggaggtggagcagcggagagccggcggctacagccggaagtacgccagcaaagccaagaatctggcagacgatatggtgagaaacaccgctagagatctgctgtactacgccgtgacccaggatgccatgctgatcttcgccaacctgagccggggcttcggccggcagggcaagcggaccttcatggccgagagacagtacacacggatggaggactggctgaccgccaagctggcctacgagggcctgagcaagacctacctgtccaagacactggcccagtacacctccaagacatgcagcaactgtgggtttaccatcaccagcgccgactacgacagggtgctggagaagctgaagaagacagcaacaggctggatgaccacaattaacggcaaggagctgaaggtggagggccagattacctactacaacagatacaagagacagaacgtagtcaaggacctgtccgtcgagctggatagactgagcgaagaatctgtgaacaacgacatctcctcctggacaaagggcagaagcggagaagctctgagcctcctgaagaaaagattctcccatagacccgtgcaggagaagttcgtgtgcctgaactgcggcttcgagacacacgcagccgagcaagccgccctgaacatcgccagatcctggctgttcctgcggagccaggagtacaagaaataccagacaaacaagacaaccggcaacaccgataagagagccttcgtcgagacctggcagtccttttaccggaagaagcttaaggaggtgtggaaacctgccgtgcggtctggcggatctggcggaggctccacaagcctggagggcctggtgaccttcgaggaggtggccgtgtacttcaccgagagcgagtggagcctgctggaccccgcccagagggccctgtacagggacgtgatggaggagaactacgagaacgtgaccagcctgggcttccccgtgagcaagcccgacgtgatcagctggctggagaggggcgaggacccctgggtgcccgacctgcaggaccccgagaagagggagaccctgagggaggcctgcaccagccccaagaaaaagagaaaagtctaagctgccttctgcggggcttgccttctggccatgcccttcttctctcccttgcacctgtacctcttggtctttgaataaagcctgagtaggaaggctagcaaaaaaaaaaaaaaaaaaaaaaaaaaaaaaaaaaaaaaaaaaaaaaaaaaaaaaaaaaaaaaaaaaaaaaaaaaaaaaaa

SEQ ID NO: 6376 - RNA, 5797 nt, synthetic construct
  source 1..5797: mol_type = other RNA
aggaaataagagagaaaagaagagtaagaagaaatataagagccaccatggcccctaagaagaagcgtaaagtgagccggatggaacgcctcgtctacgaggtgcggcagaagtgcagaaacatcgaggacatctgcatctcctgcggatctctgaacgtgaccctggagcacccactgttcatcggcggcatgtgccagaactgtaaaaactgttttctggagtgtgcctatcaatacgacgatgacggctaccagagctactgcaccatctgttgcggcggaagagaggtgctgatgtgtggaaataacaactgctgccggtgcttctgcgtggaatgcgtggacctgctggtgggccccggcgccgcccaggccgctattaaggaagatccttggaactgctacatgtgcggccacaagggcacatacggcctgctgagacggagagaggactggcctagcagactgcagatgttcttcgccaataaccacgaccaggagttcgacccccctaaggtgtaccctcccgtccccgccgagaagagaaagcccatccgggtcctgagcctgttcgatggcatcgccaccggtctgctggtgctgaaggacctgggcatccaggtggataggtacattgcctccgaggtgtgcgaggactccatcaccgtgggaatggtgcgtcatcagggcaagatcatgtacgtgggcgacgtgcggagcgtgacacagaagcatatccaggagtggggccctttcgacctggtgatcggcggcagcccttgcaatgacctgagcatcgtgaacccagcccggaagggcctgtacgagggaaccggcagactgttcttcgagttttacagactgctgcacgacgcccggcctaaggaaggcgacgaccggcccttcttttggctgttcgagaatgtggtggccatgggagtcagcgacaagcgggatattagccggttcctggagagcaaccccgtgatgatcgatgccaaggaagtgagcgccgcccaccgggccagatacttctggggcaatctgcctggcatgaacagacccctggccagcaccgtgaacgacaagctggagctgcaggagtgcctggagcacggccggatcgccaagttcagcaaggtgagaaccatcaccacccgaagcaacagcatcaaacaaggcaaggaccagcactttcctgtgttcatgaacgagaaggaggacatcctgtggtgtaccgagatggagagagtgttcgggttcccagtccactacacagatgtcagcaacatgtctagactggccagacagagactgctgggaagaagctggtccgtccctgtgatcagacacctgttcgcccctctgaaggagtacttcgcctgcgtgagcagcggcaacagcaacgccaacagccggggccccagcttctctagcggcctggtgccactgtccctgagagggagccacatgggccccatggagatctacaaaaccgtgagcgcctggaagcggcagcctgtgcgcgtgctgagcctgtttcggaatatcgataaagtcctgaaaagcctgggattcctggagagcggctctggctccggcggtggcaccctgaagtacgtggaggatgtgacaaacgtggtcagacgggatgtggagaagtggggccccttcgatctggtgtacggcagcacccaacccctgggcagctcttgtgaccggtgccctggctggtacatgtttcagttccaccggatcctgcagtacgccctgccgagacaggagtcccagcggccattcttttggattttcatggacaacttgctgctgaccgaggatgaccaggaaactaccactcggttcctgcagaccgaagccgtgaccctgcaggacgtgagaggccgggactaccagaacgccatgcgggtgtggtccaacatccctggactgaaaagcaagcacgcacctctgacccctaaagaagaggagtacctgcaggcccaggtgcggagcagaagcaagctggacgcccctaaggtggatctgctggtgaagaattgcctcctgcccctgagagagtacttcaagtatttcagccagaatagtctgcccctgggcggcccaagcagcggcgcccctcctcccagcggcggcagcccagccggctccccaacctctaccgaggagggcacctctgagtccgccacccccgagagcggccctggcacctccaccgagcccagcgagggcagcgcacccggcagccctgccggcagccccacctccacagaggagggaaccagcaccgagcccagcgaaggcagcgccccaggcaccagcaccgagcctagtgagggcggctctggcggcggcagcgcccaggagattaaacggatcaacaagatcagaagaagacttgtgaaagacagcaacaccaagaaggccggcaagacaggccccatgaaaaccctgctggttagagtgatgacacccgatctgagagagcggctggaaaacctgagaaagaagcctgaaaatatcccccagcccatcagcaatacatctagagccaacctgaataagctgctgaccgattacaccgaaatgaagaaggcgatcctgcatgtgtactgggaagagttccagaaggaccctgtgggcctgatgagccgggtggcccagcctgccagcaagaagatcgatcagaacaagctgaaacctgagatggacgagaagggcaacctgaccaccgccggctttgcctgctctcagtgtggccagcccctgttcgtgtacaagctggagcaggtgtctgagaagggcaaggcttacaccaactacttcggacggtgcaatgtggccgagcacgaaaagctgatcctgctggcccagctgaagcccgagaaggatagcgacgaagccgtgacatatagcctgggaaagtttgggcagagggccctggatttctacagcattcatgtgaccaaggagtccacccaccccgtgaagcccctggcccagatcgccggaaacagatacgcctccggacctgtgggaaaggccctgagcgacgcatgtatgggcacaatcgcctccttcctgtctaagtaccaggacatcatcatcgaacaccagaaggtggtgaagggcaaccagaagagactggagagcctgcgggagctggccggcaaggaaaacctggaataccctagcgtgaccctgccacctcagcctcacaccaaggagggcgttgatgcctacaacgaagtgatcgcccgggtgcgaatgtgggtgaacctgaacctgtggcagaagctgaagctaagcagagatgatgccaagcctctgctgagactgaagggattcccttcctttcctctggtcgagagacaggccaacgaagtggactggtgggacatggtgtgtaacgtgaagaagctgatcaacgagaaaaaggaggatggcaaggtgttttggcagaatctggctggctacaagagacaggaagccctgagaccatacctgagcagcgaggaagatcggaagaagggaaagaaattcgctcggtaccagctgggcgacctgctgctgcacctggaaaagaagcacggcgaggactggggaaaggtgtacgacgaggcctgggagcggattgacaagaaagtggaaggcctgagcaagcacatcaagctggaagaggaacggagaagcgaggacgcccagagcaaggccgccctgaccgactggctgcgggctaaggccagcttcgtgatcgagggcctgaaggaggccgacaaggacgagttctgcagatgcgagctgaagctgcagaagtggtacggggacctgcggggaaagcccttcgccatcgaagccgagaacagcatcctggacatcagcggcttcagcaagcagtacaactgtgccttcatctggcagaaggacggcgtgaagaagctgaacctgtacctgatcatcaactacttcaagggcggcaagctgcggttcaagaagatcaaacctgaagccttcgaagccaacagattctacaccgtgatcaacaaaaagagcggcgagatcgtgcccatggaggtgaacttcaacttcgacgaccccaacctgatcatcctgcctctggcctttggcaagagacagggcagagaattcatctggaacgacctgctgtccctggaaaccggcagcctgaagctggccaacggaagagtgatcgagaagacactgtacaacagaagaacccggcaggatgagcctgccctgttcgtggccctgaccttcgagcggcgggaggtcctggactcctccaatatcaaaccaatgaacctgatcggcgtggcaagaggcgaaaacatccccgccgtgatcgccctgaccgaccccgagggctgcccactgagccggtttaaggatagcctgggaaacccaacccacatcctgagaatcggcgagagctataaggagaagcagcggaccatccaggccaagaaggaggtggagcagcggagagccggcggctacagccggaagtacgccagcaaagccaagaatctggcagacgatatggtgagaaacaccgctagagatctgctgtactacgccgtgacccaggatgccatgctgatcttcgccaacctgagccggggcttcggccggcagggcaagcggaccttcatggccgagagacagtacacacggatggaggactggctgaccgccaagctggcctacgagggcctgagcaagacctacctgtccaagacactggcccagtacacctccaagacatgcagcaactgtgggtttaccatcaccagcgccgactacgacagggtgctggagaagctgaagaagacagcaacaggctggatgaccacaattaacggcaaggagctgaaggtggagggccagattacctactacaacagatacaagagacagaacgtagtcaaggacctgtccgtcgagctggatagactgagcgaagaatctgtgaacaacgacatctcctcctggacaaagggcagaagcggagaagctctgagcctcctgaagaaaagattctcccatagacccgtgcaggagaagttcgtgtgcctgaactgcggcttcgagacacacgcagccgagcaagccgccctgaacatcgccagatcctggctgttcctgcggagccaggagtacaagaaataccagacaaacaagacaaccggcaacaccgataagagagccttcgtcgagacctggcagtccttttaccggaagaagcttaaggaggtgtggaaacctgccgtgcggtctggcggatctggcggaggctccacaagcatccaggagagcgtgaccttcaaggacgtgagcgtggacttcacctgggaggagtggaggcacctggaccccgcccagagggacctgtacaggaacgtgatgctggagaactacgagaacctggtgagcgtgggcatcagcgtgagcaccgtggacatgatcagcctgctggagaagagggacggcccctggatgcccgagggcgaggtgagcggcgccatctgccccgacagcctgaacgagaccagccccaagaaaaagagaaaagtctaagctgccttctgcggggcttgccttctggccatgcccttcttctctcccttgcacctgtacctcttggtctttgaataaagcctgagtaggaaggctagcaaaaaaaaaaaaaaaaaaaaaaaaaaaaaaaaaaaaaaaaaaaaaaaaaaaaaaaaaaaaaaaaaaaaaaaaaaaaaaaa

SEQ ID NO: 6377 - RNA, 5797 nt, synthetic construct
  source 1..5797: mol_type = other RNA
aggaaataagagagaaaagaagagtaagaagaaatataagagccaccatggcccctaagaagaagcgtaaagtgagccggatggaacgcctcgtctacgaggtgcggcagaagtgcagaaacatcgaggacatctgcatctcctgcggatctctgaacgtgaccctggagcacccactgttcatcggcggcatgtgccagaactgtaaaaactgttttctggagtgtgcctatcaatacgacgatgacggctaccagagctactgcaccatctgttgcggcggaagagaggtgctgatgtgtggaaataacaactgctgccggtgcttctgcgtggaatgcgtggacctgctggtgggccccggcgccgcccaggccgctattaaggaagatccttggaactgctacatgtgcggccacaagggcacatacggcctgctgagacggagagaggactggcctagcagactgcagatgttcttcgccaataaccacgaccaggagttcgacccccctaaggtgtaccctcccgtccccgccgagaagagaaagcccatccgggtcctgagcctgttcgatggcatcgccaccggtctgctggtgctgaaggacctgggcatccaggtggataggtacattgcctccgaggtgtgcgaggactccatcaccgtgggaatggtgcgtcatcagggcaagatcatgtacgtgggcgacgtgcggagcgtgacacagaagcatatccaggagtggggccctttcgacctggtgatcggcggcagcccttgcaatgacctgagcatcgtgaacccagcccggaagggcctgtacgagggaaccggcagactgttcttcgagttttacagactgctgcacgacgcccggcctaaggaaggcgacgaccggcccttcttttggctgttcgagaatgtggtggccatgggagtcagcgacaagcgggatattagccggttcctggagagcaaccccgtgatgatcgatgccaaggaagtgagcgccgcccaccgggccagatacttctggggcaatctgcctggcatgaacagacccctggccagcaccgtgaacgacaagctggagctgcaggagtgcctggagcacggccggatcgccaagttcagcaaggtgagaaccatcaccacccgaagcaacagcatcaaacaaggcaaggaccagcactttcctgtgttcatgaacgagaaggaggacatcctgtggtgtaccgagatggagagagtgttcgggttcccagtccactacacagatgtcagcaacatgtctagactggccagacagagactgctgggaagaagctggtccgtccctgtgatcagacacctgttcgcccctctgaaggagtacttcgcctgcgtgagcagcggcaacagcaacgccaacagccggggccccagcttctctagcggcctggtgccactgtccctgagagggagccacatgggccccatggagatctacaaaaccgtgagcgcctggaagcggcagcctgtgcgcgtgctgagcctgtttcggaatatcgataaagtcctgaaaagcctgggattcctggagagcggctctggctccggcggtggcaccctgaagtacgtggaggatgtgacaaacgtggtcagacgggatgtggagaagtggggccccttcgatctggtgtacggcagcacccaacccctgggcagctcttgtgaccggtgccctggctggtacatgtttcagttccaccggatcctgcagtacgccctgccgagacaggagtcccagcggccattcttttggattttcatggacaacttgctgctgaccgaggatgaccaggaaactaccactcggttcctgcagaccgaagccgtgaccctgcaggacgtgagaggccgggactaccagaacgccatgcgggtgtggtccaacatccctggactgaaaagcaagcacgcacctctgacccctaaagaagaggagtacctgcaggcccaggtgcggagcagaagcaagctggacgcccctaaggtggatctgctggtgaagaattgcctcctgcccctgagagagtacttcaagtatttcagccagaatagtctgcccctgggcggcccaagcagcggcgcccctcctcccagcggcggcagcccagccggctccccaacctctaccgaggagggcacctctgagtccgccacccccgagagcggccctggcacctccaccgagcccagcgagggcagcgcacccggcagccctgccggcagccccacctccacagaggagggaaccagcaccgagcccagcgaaggcagcgccccaggcaccagcaccgagcctagtgagggcggctctggcggcggcagcgcccaggagattaaacggatcaacaagatcagaagaagacttgtgaaagacagcaacaccaagaaggccggcaagacaggccccatgaaaaccctgctggttagagtgatgacacccgatctgagagagcggctggaaaacctgagaaagaagcctgaaaatatcccccagcccatcagcaatacatctagagccaacctgaataagctgctgaccgattacaccgaaatgaagaaggcgatcctgcatgtgtactgggaagagttccagaaggaccctgtgggcctgatgagccgggtggcccagcctgccagcaagaagatcgatcagaacaagctgaaacctgagatggacgagaagggcaacctgaccaccgccggctttgcctgctctcagtgtggccagcccctgttcgtgtacaagctggagcaggtgtctgagaagggcaaggcttacaccaactacttcggacggtgcaatgtggccgagcacgaaaagctgatcctgctggcccagctgaagcccgagaaggatagcgacgaagccgtgacatatagcctgggaaagtttgggcagagggccctggatttctacagcattcatgtgaccaaggagtccacccaccccgtgaagcccctggcccagatcgccggaaacagatacgcctccggacctgtgggaaaggccctgagcgacgcatgtatgggcacaatcgcctccttcctgtctaagtaccaggacatcatcatcgaacaccagaaggtggtgaagggcaaccagaagagactggagagcctgcgggagctggccggcaaggaaaacctggaataccctagcgtgaccctgccacctcagcctcacaccaaggagggcgttgatgcctacaacgaagtgatcgcccgggtgcgaatgtgggtgaacctgaacctgtggcagaagctgaagctaagcagagatgatgccaagcctctgctgagactgaagggattcccttcctttcctctggtcgagagacaggccaacgaagtggactggtgggacatggtgtgtaacgtgaagaagctgatcaacgagaaaaaggaggatggcaaggtgttttggcagaatctggctggctacaagagacaggaagccctgagaccatacctgagcagcgaggaagatcggaagaagggaaagaaattcgctcggtaccagctgggcgacctgctgctgcacctggaaaagaagcacggcgaggactggggaaaggtgtacgacgaggcctgggagcggattgacaagaaagtggaaggcctgagcaagcacatcaagctggaagaggaacggagaagcgaggacgcccagagcaaggccgccctgaccgactggctgcgggctaaggccagcttcgtgatcgagggcctgaaggaggccgacaaggacgagttctgcagatgcgagctgaagctgcagaagtggtacggggacctgcggggaaagcccttcgccatcgaagccgagaacagcatcctggacatcagcggcttcagcaagcagtacaactgtgccttcatctggcagaaggacggcgtgaagaagctgaacctgtacctgatcatcaactacttcaagggcggcaagctgcggttcaagaagatcaaacctgaagccttcgaagccaacagattctacaccgtgatcaacaaaaagagcggcgagatcgtgcccatggaggtgaacttcaacttcgacgaccccaacctgatcatcctgcctctggcctttggcaagagacagggcagagaattcatctggaacgacctgctgtccctggaaaccggcagcctgaagctggccaacggaagagtgatcgagaagacactgtacaacagaagaacccggcaggatgagcctgccctgttcgtggccctgaccttcgagcggcgggaggtcctggactcctccaatatcaaaccaatgaacctgatcggcgtggcaagaggcgaaaacatccccgccgtgatcgccctgaccgaccccgagggctgcccactgagccggtttaaggatagcctgggaaacccaacccacatcctgagaatcggcgagagctataaggagaagcagcggaccatccaggccaagaaggaggtggagcagcggagagccggcggctacagccggaagtacgccagcaaagccaagaatctggcagacgatatggtgagaaacaccgctagagatctgctgtactacgccgtgacccaggatgccatgctgatcttcgccaacctgagccggggcttcggccggcagggcaagcggaccttcatggccgagagacagtacacacggatggaggactggctgaccgccaagctggcctacgagggcctgagcaagacctacctgtccaagacactggcccagtacacctccaagacatgcagcaactgtgggtttaccatcaccagcgccgactacgacagggtgctggagaagctgaagaagacagcaacaggctggatgaccacaattaacggcaaggagctgaaggtggagggccagattacctactacaacagatacaagagacagaacgtagtcaaggacctgtccgtcgagctggatagactgagcgaagaatctgtgaacaacgacatctcctcctggacaaagggcagaagcggagaagctctgagcctcctgaagaaaagattctcccatagacccgtgcaggagaagttcgtgtgcctgaactgcggcttcgagacacacgcagccgagcaagccgccctgaacatcgccagatcctggctgttcctgcggagccaggagtacaagaaataccagacaaacaagacaaccggcaacaccgataagagagccttcgtcgagacctggcagtccttttaccggaagaagcttaaggaggtgtggaaacctgccgtgcggtctggcggatctggcggaggctccacaagcaagacccaggtgagcctggagttcaacgacgtggccgtggagttcgcctgggaggagtggcagctgctggaccccgcccagaaggacctgtacagggaggtgatgctggagaacttccacaacctggtgagcgtgggctgccaggtgggcaagcccgacgtgctgttcaggctggagagggagcccccctggagcctggaggacgagatccacagccagaacttcagcgagatccaggaggtgaccagccccaagaaaaagagaaaagtctaagctgccttctgcggggcttgccttctggccatgcccttcttctctcccttgcacctgtacctcttggtctttgaataaagcctgagtaggaaggctagcaaaaaaaaaaaaaaaaaaaaaaaaaaaaaaaaaaaaaaaaaaaaaaaaaaaaaaaaaaaaaaaaaaaaaaaaaaaaaaaa

SEQ ID NO: 6378 - RNA, 5797 nt, synthetic construct
  source 1..5797: mol_type = other RNA
aggaaataagagagaaaagaagagtaagaagaaatataagagccaccatggcccctaagaagaagcgtaaagtgagccggatggaacgcctcgtctacgaggtgcggcagaagtgcagaaacatcgaggacatctgcatctcctgcggatctctgaacgtgaccctggagcacccactgttcatcggcggcatgtgccagaactgtaaaaactgttttctggagtgtgcctatcaatacgacgatgacggctaccagagctactgcaccatctgttgcggcggaagagaggtgctgatgtgtggaaataacaactgctgccggtgcttctgcgtggaatgcgtggacctgctggtgggccccggcgccgcccaggccgctattaaggaagatccttggaactgctacatgtgcggccacaagggcacatacggcctgctgagacggagagaggactggcctagcagactgcagatgttcttcgccaataaccacgaccaggagttcgacccccctaaggtgtaccctcccgtccccgccgagaagagaaagcccatccgggtcctgagcctgttcgatggcatcgccaccggtctgctggtgctgaaggacctgggcatccaggtggataggtacattgcctccgaggtgtgcgaggactccatcaccgtgggaatggtgcgtcatcagggcaagatcatgtacgtgggcgacgtgcggagcgtgacacagaagcatatccaggagtggggccctttcgacctggtgatcggcggcagcccttgcaatgacctgagcatcgtgaacccagcccggaagggcctgtacgagggaaccggcagactgttcttcgagttttacagactgctgcacgacgcccggcctaaggaaggcgacgaccggcccttcttttggctgttcgagaatgtggtggccatgggagtcagcgacaagcgggatattagccggttcctggagagcaaccccgtgatgatcgatgccaaggaagtgagcgccgcccaccgggccagatacttctggggcaatctgcctggcatgaacagacccctggccagcaccgtgaacgacaagctggagctgcaggagtgcctggagcacggccggatcgccaagttcagcaaggtgagaaccatcaccacccgaagcaacagcatcaaacaaggcaaggaccagcactttcctgtgttcatgaacgagaaggaggacatcctgtggtgtaccgagatggagagagtgttcgggttcccagtccactacacagatgtcagcaacatgtctagactggccagacagagactgctgggaagaagctggtccgtccctgtgatcagacacctgttcgcccctctgaaggagtacttcgcctgcgtgagcagcggcaacagcaacgccaacagccggggccccagcttctctagcggcctggtgccactgtccctgagagggagccacatgggccccatggagatctacaaaaccgtgagcgcctggaagcggcagcctgtgcgcgtgctgagcctgtttcggaatatcgataaagtcctgaaaagcctgggattcctggagagcggctctggctccggcggtggcaccctgaagtacgtggaggatgtgacaaacgtggtcagacgggatgtggagaagtggggccccttcgatctggtgtacggcagcacccaacccctgggcagctcttgtgaccggtgccctggctggtacatgtttcagttccaccggatcctgcagtacgccctgccgagacaggagtcccagcggccattcttttggattttcatggacaacttgctgctgaccgaggatgaccaggaaactaccactcggttcctgcagaccgaagccgtgaccctgcaggacgtgagaggccgggactaccagaacgccatgcgggtgtggtccaacatccctggactgaaaagcaagcacgcacctctgacccctaaagaagaggagtacctgcaggcccaggtgcggagcagaagcaagctggacgcccctaaggtggatctgctggtgaagaattgcctcctgcccctgagagagtacttcaagtatttcagccagaatagtctgcccctgggcggcccaagcagcggcgcccctcctcccagcggcggcagcccagccggctccccaacctctaccgaggagggcacctctgagtccgccacccccgagagcggccctggcacctccaccgagcccagcgagggcagcgcacccggcagccctgccggcagccccacctccacagaggagggaaccagcaccgagcccagcgaaggcagcgccccaggcaccagcaccgagcctagtgagggcggctctggcggcggcagcgcccaggagattaaacggatcaacaagatcagaagaagacttgtgaaagacagcaacaccaagaaggccggcaagacaggccccatgaaaaccctgctggttagagtgatgacacccgatctgagagagcggctggaaaacctgagaaagaagcctgaaaatatcccccagcccatcagcaatacatctagagccaacctgaataagctgctgaccgattacaccgaaatgaagaaggcgatcctgcatgtgtactgggaagagttccagaaggaccctgtgggcctgatgagccgggtggcccagcctgccagcaagaagatcgatcagaacaagctgaaacctgagatggacgagaagggcaacctgaccaccgccggctttgcctgctctcagtgtggccagcccctgttcgtgtacaagctggagcaggtgtctgagaagggcaaggcttacaccaactacttcggacggtgcaatgtggccgagcacgaaaagctgatcctgctggcccagctgaagcccgagaaggatagcgacgaagccgtgacatatagcctgggaaagtttgggcagagggccctggatttctacagcattcatgtgaccaaggagtccacccaccccgtgaagcccctggcccagatcgccggaaacagatacgcctccggacctgtgggaaaggccctgagcgacgcatgtatgggcacaatcgcctccttcctgtctaagtaccaggacatcatcatcgaacaccagaaggtggtgaagggcaaccagaagagactggagagcctgcgggagctggccggcaaggaaaacctggaataccctagcgtgaccctgccacctcagcctcacaccaaggagggcgttgatgcctacaacgaagtgatcgcccgggtgcgaatgtgggtgaacctgaacctgtggcagaagctgaagctaagcagagatgatgccaagcctctgctgagactgaagggattcccttcctttcctctggtcgagagacaggccaacgaagtggactggtgggacatggtgtgtaacgtgaagaagctgatcaacgagaaaaaggaggatggcaaggtgttttggcagaatctggctggctacaagagacaggaagccctgagaccatacctgagcagcgaggaagatcggaagaagggaaagaaattcgctcggtaccagctgggcgacctgctgctgcacctggaaaagaagcacggcgaggactggggaaaggtgtacgacgaggcctgggagcggattgacaagaaagtggaaggcctgagcaagcacatcaagctggaagaggaacggagaagcgaggacgcccagagcaaggccgccctgaccgactggctgcgggctaaggccagcttcgtgatcgagggcctgaaggaggccgacaaggacgagttctgcagatgcgagctgaagctgcagaagtggtacggggacctgcggggaaagcccttcgccatcgaagccgagaacagcatcctggacatcagcggcttcagcaagcagtacaactgtgccttcatctggcagaaggacggcgtgaagaagctgaacctgtacctgatcatcaactacttcaagggcggcaagctgcggttcaagaagatcaaacctgaagccttcgaagccaacagattctacaccgtgatcaacaaaaagagcggcgagatcgtgcccatggaggtgaacttcaacttcgacgaccccaacctgatcatcctgcctctggcctttggcaagagacagggcagagaattcatctggaacgacctgctgtccctggaaaccggcagcctgaagctggccaacggaagagtgatcgagaagacactgtacaacagaagaacccggcaggatgagcctgccctgttcgtggccctgaccttcgagcggcgggaggtcctggactcctccaatatcaaaccaatgaacctgatcggcgtggcaagaggcgaaaacatccccgccgtgatcgccctgaccgaccccgagggctgcccactgagccggtttaaggatagcctgggaaacccaacccacatcctgagaatcggcgagagctataaggagaagcagcggaccatccaggccaagaaggaggtggagcagcggagagccggcggctacagccggaagtacgccagcaaagccaagaatctggcagacgatatggtgagaaacaccgctagagatctgctgtactacgccgtgacccaggatgccatgctgatcttcgccaacctgagccggggcttcggccggcagggcaagcggaccttcatggccgagagacagtacacacggatggaggactggctgaccgccaagctggcctacgagggcctgagcaagacctacctgtccaagacactggcccagtacacctccaagacatgcagcaactgtgggtttaccatcaccagcgccgactacgacagggtgctggagaagctgaagaagacagcaacaggctggatgaccacaattaacggcaaggagctgaaggtggagggccagattacctactacaacagatacaagagacagaacgtagtcaaggacctgtccgtcgagctggatagactgagcgaagaatctgtgaacaacgacatctcctcctggacaaagggcagaagcggagaagctctgagcctcctgaagaaaagattctcccatagacccgtgcaggagaagttcgtgtgcctgaactgcggcttcgagacacacgcagccgagcaagccgccctgaacatcgccagatcctggctgttcctgcggagccaggagtacaagaaataccagacaaacaagacaaccggcaacaccgataagagagccttcgtcgagacctggcagtccttttaccggaagaagcttaaggaggtgtggaaacctgccgtgcggtctggcggatctggcggaggctccacaagctgcgagggcagcgtgagcttcgaggacgtgaccatggacttcagcagggaggagtggcagcagctggaccccgcccagaggtgcctgtaccaggacgtgatgctggagatctacagccacctgctgttcgtgggctacaacatccccaaccccgagatcatcagcaggatggagaagggcgaggagccctggatgagggaggtgcagctgccccaccagaggcacagggagagggccttcggcaccagccccaagaaaaagagaaaagtctaagctgccttctgcggggcttgccttctggccatgcccttcttctctcccttgcacctgtacctcttggtctttgaataaagcctgagtaggaaggctagcaaaaaaaaaaaaaaaaaaaaaaaaaaaaaaaaaaaaaaaaaaaaaaaaaaaaaaaaaaaaaaaaaaaaaaaaaaaaaaaa

SEQ ID NO: 6379 - RNA, 5797 nt, synthetic construct
  source 1..5797: mol_type = other RNA
aggaaataagagagaaaagaagagtaagaagaaatataagagccaccatggcccctaagaagaagcgtaaagtgagccggatggaacgcctcgtctacgaggtgcggcagaagtgcagaaacatcgaggacatctgcatctcctgcggatctctgaacgtgaccctggagcacccactgttcatcggcggcatgtgccagaactgtaaaaactgttttctggagtgtgcctatcaatacgacgatgacggctaccagagctactgcaccatctgttgcggcggaagagaggtgctgatgtgtggaaataacaactgctgccggtgcttctgcgtggaatgcgtggacctgctggtgggccccggcgccgcccaggccgctattaaggaagatccttggaactgctacatgtgcggccacaagggcacatacggcctgctgagacggagagaggactggcctagcagactgcagatgttcttcgccaataaccacgaccaggagttcgacccccctaaggtgtaccctcccgtccccgccgagaagagaaagcccatccgggtcctgagcctgttcgatggcatcgccaccggtctgctggtgctgaaggacctgggcatccaggtggataggtacattgcctccgaggtgtgcgaggactccatcaccgtgggaatggtgcgtcatcagggcaagatcatgtacgtgggcgacgtgcggagcgtgacacagaagcatatccaggagtggggccctttcgacctggtgatcggcggcagcccttgcaatgacctgagcatcgtgaacccagcccggaagggcctgtacgagggaaccggcagactgttcttcgagttttacagactgctgcacgacgcccggcctaaggaaggcgacgaccggcccttcttttggctgttcgagaatgtggtggccatgggagtcagcgacaagcgggatattagccggttcctggagagcaaccccgtgatgatcgatgccaaggaagtgagcgccgcccaccgggccagatacttctggggcaatctgcctggcatgaacagacccctggccagcaccgtgaacgacaagctggagctgcaggagtgcctggagcacggccggatcgccaagttcagcaaggtgagaaccatcaccacccgaagcaacagcatcaaacaaggcaaggaccagcactttcctgtgttcatgaacgagaaggaggacatcctgtggtgtaccgagatggagagagtgttcgggttcccagtccactacacagatgtcagcaacatgtctagactggccagacagagactgctgggaagaagctggtccgtccctgtgatcagacacctgttcgcccctctgaaggagtacttcgcctgcgtgagcagcggcaacagcaacgccaacagccggggccccagcttctctagcggcctggtgccactgtccctgagagggagccacatgggccccatggagatctacaaaaccgtgagcgcctggaagcggcagcctgtgcgcgtgctgagcctgtttcggaatatcgataaagtcctgaaaagcctgggattcctggagagcggctctggctccggcggtggcaccctgaagtacgtggaggatgtgacaaacgtggtcagacgggatgtggagaagtggggccccttcgatctggtgtacggcagcacccaacccctgggcagctcttgtgaccggtgccctggctggtacatgtttcagttccaccggatcctgcagtacgccctgccgagacaggagtcccagcggccattcttttggattttcatggacaacttgctgctgaccgaggatgaccaggaaactaccactcggttcctgcagaccgaagccgtgaccctgcaggacgtgagaggccgggactaccagaacgccatgcgggtgtggtccaacatccctggactgaaaagcaagcacgcacctctgacccctaaagaagaggagtacctgcaggcccaggtgcggagcagaagcaagctggacgcccctaaggtggatctgctggtgaagaattgcctcctgcccctgagagagtacttcaagtatttcagccagaatagtctgcccctgggcggcccaagcagcggcgcccctcctcccagcggcggcagcccagccggctccccaacctctaccgaggagggcacctctgagtccgccacccccgagagcggccctggcacctccaccgagcccagcgagggcagcgcacccggcagccctgccggcagccccacctccacagaggagggaaccagcaccgagcccagcgaaggcagcgccccaggcaccagcaccgagcctagtgagggcggctctggcggcggcagcgcccaggagattaaacggatcaacaagatcagaagaagacttgtgaaagacagcaacaccaagaaggccggcaagacaggccccatgaaaaccctgctggttagagtgatgacacccgatctgagagagcggctggaaaacctgagaaagaagcctgaaaatatcccccagcccatcagcaatacatctagagccaacctgaataagctgctgaccgattacaccgaaatgaagaaggcgatcctgcatgtgtactgggaagagttccagaaggaccctgtgggcctgatgagccgggtggcccagcctgccagcaagaagatcgatcagaacaagctgaaacctgagatggacgagaagggcaacctgaccaccgccggctttgcctgctctcagtgtggccagcccctgttcgtgtacaagctggagcaggtgtctgagaagggcaaggcttacaccaactacttcggacggtgcaatgtggccgagcacgaaaagctgatcctgctggcccagctgaagcccgagaaggatagcgacgaagccgtgacatatagcctgggaaagtttgggcagagggccctggatttctacagcattcatgtgaccaaggagtccacccaccccgtgaagcccctggcccagatcgccggaaacagatacgcctccggacctgtgggaaaggccctgagcgacgcatgtatgggcacaatcgcctccttcctgtctaagtaccaggacatcatcatcgaacaccagaaggtggtgaagggcaaccagaagagactggagagcctgcgggagctggccggcaaggaaaacctggaataccctagcgtgaccctgccacctcagcctcacaccaaggagggcgttgatgcctacaacgaagtgatcgcccgggtgcgaatgtgggtgaacctgaacctgtggcagaagctgaagctaagcagagatgatgccaagcctctgctgagactgaagggattcccttcctttcctctggtcgagagacaggccaacgaagtggactggtgggacatggtgtgtaacgtgaagaagctgatcaacgagaaaaaggaggatggcaaggtgttttggcagaatctggctggctacaagagacaggaagccctgagaccatacctgagcagcgaggaagatcggaagaagggaaagaaattcgctcggtaccagctgggcgacctgctgctgcacctggaaaagaagcacggcgaggactggggaaaggtgtacgacgaggcctgggagcggattgacaagaaagtggaaggcctgagcaagcacatcaagctggaagaggaacggagaagcgaggacgcccagagcaaggccgccctgaccgactggctgcgggctaaggccagcttcgtgatcgagggcctgaaggaggccgacaaggacgagttctgcagatgcgagctgaagctgcagaagtggtacggggacctgcggggaaagcccttcgccatcgaagccgagaacagcatcctggacatcagcggcttcagcaagcagtacaactgtgccttcatctggcagaaggacggcgtgaagaagctgaacctgtacctgatcatcaactacttcaagggcggcaagctgcggttcaagaagatcaaacctgaagccttcgaagccaacagattctacaccgtgatcaacaaaaagagcggcgagatcgtgcccatggaggtgaacttcaacttcgacgaccccaacctgatcatcctgcctctggcctttggcaagagacagggcagagaattcatctggaacgacctgctgtccctggaaaccggcagcctgaagctggccaacggaagagtgatcgagaagacactgtacaacagaagaacccggcaggatgagcctgccctgttcgtggccctgaccttcgagcggcgggaggtcctggactcctccaatatcaaaccaatgaacctgatcggcgtggcaagaggcgaaaacatccccgccgtgatcgccctgaccgaccccgagggctgcccactgagccggtttaaggatagcctgggaaacccaacccacatcctgagaatcggcgagagctataaggagaagcagcggaccatccaggccaagaaggaggtggagcagcggagagccggcggctacagccggaagtacgccagcaaagccaagaatctggcagacgatatggtgagaaacaccgctagagatctgctgtactacgccgtgacccaggatgccatgctgatcttcgccaacctgagccggggcttcggccggcagggcaagcggaccttcatggccgagagacagtacacacggatggaggactggctgaccgccaagctggcctacgagggcctgagcaagacctacctgtccaagacactggcccagtacacctccaagacatgcagcaactgtgggtttaccatcaccagcgccgactacgacagggtgctggagaagctgaagaagacagcaacaggctggatgaccacaattaacggcaaggagctgaaggtggagggccagattacctactacaacagatacaagagacagaacgtagtcaaggacctgtccgtcgagctggatagactgagcgaagaatctgtgaacaacgacatctcctcctggacaaagggcagaagcggagaagctctgagcctcctgaagaaaagattctcccatagacccgtgcaggagaagttcgtgtgcctgaactgcggcttcgagacacacgcagccgagcaagccgccctgaacatcgccagatcctggctgttcctgcggagccaggagtacaagaaataccagacaaacaagacaaccggcaacaccgataagagagccttcgtcgagacctggcagtccttttaccggaagaagcttaaggaggtgtggaaacctgccgtgcggtctggcggatctggcggaggctccacaagcctgcaggagagcgtgaccttcagcgacgtggccgtggacttcaccctggaggagtggggctgcctgtgccccccccagaaggagatgtacagggaggtgatgctggagaactacggcaacctggtgtgcctgggcctggccatgagcaagcccgacgtgatcagcaggctggagaggggcgaggcccccaggagccccggcggcgacctgggcagcgccgactggggcaccgagagcggcgccaccagccccaagaaaaagagaaaagtctaagctgccttctgcggggcttgccttctggccatgcccttcttctctcccttgcacctgtacctcttggtctttgaataaagcctgagtaggaaggctagcaaaaaaaaaaaaaaaaaaaaaaaaaaaaaaaaaaaaaaaaaaaaaaaaaaaaaaaaaaaaaaaaaaaaaaaaaaaaaaaa

SEQ ID NO: 6380 - RNA, 5797 nt, synthetic construct
  source 1..5797: mol_type = other RNA
aggaaataagagagaaaagaagagtaagaagaaatataagagccaccatggcccctaagaagaagcgtaaagtgagccggatggaacgcctcgtctacgaggtgcggcagaagtgcagaaacatcgaggacatctgcatctcctgcggatctctgaacgtgaccctggagcacccactgttcatcggcggcatgtgccagaactgtaaaaactgttttctggagtgtgcctatcaatacgacgatgacggctaccagagctactgcaccatctgttgcggcggaagagaggtgctgatgtgtggaaataacaactgctgccggtgcttctgcgtggaatgcgtggacctgctggtgggccccggcgccgcccaggccgctattaaggaagatccttggaactgctacatgtgcggccacaagggcacatacggcctgctgagacggagagaggactggcctagcagactgcagatgttcttcgccaataaccacgaccaggagttcgacccccctaaggtgtaccctcccgtccccgccgagaagagaaagcccatccgggtcctgagcctgttcgatggcatcgccaccggtctgctggtgctgaaggacctgggcatccaggtggataggtacattgcctccgaggtgtgcgaggactccatcaccgtgggaatggtgcgtcatcagggcaagatcatgtacgtgggcgacgtgcggagcgtgacacagaagcatatccaggagtggggccctttcgacctggtgatcggcggcagcccttgcaatgacctgagcatcgtgaacccagcccggaagggcctgtacgagggaaccggcagactgttcttcgagttttacagactgctgcacgacgcccggcctaaggaaggcgacgaccggcccttcttttggctgttcgagaatgtggtggccatgggagtcagcgacaagcgggatattagccggttcctggagagcaaccccgtgatgatcgatgccaaggaagtgagcgccgcccaccgggccagatacttctggggcaatctgcctggcatgaacagacccctggccagcaccgtgaacgacaagctggagctgcaggagtgcctggagcacggccggatcgccaagttcagcaaggtgagaaccatcaccacccgaagcaacagcatcaaacaaggcaaggaccagcactttcctgtgttcatgaacgagaaggaggacatcctgtggtgtaccgagatggagagagtgttcgggttcccagtccactacacagatgtcagcaacatgtctagactggccagacagagactgctgggaagaagctggtccgtccctgtgatcagacacctgttcgcccctctgaaggagtacttcgcctgcgtgagcagcggcaacagcaacgccaacagccggggccccagcttctctagcggcctggtgccactgtccctgagagggagccacatgggccccatggagatctacaaaaccgtgagcgcctggaagcggcagcctgtgcgcgtgctgagcctgtttcggaatatcgataaagtcctgaaaagcctgggattcctggagagcggctctggctccggcggtggcaccctgaagtacgtggaggatgtgacaaacgtggtcagacgggatgtggagaagtggggccccttcgatctggtgtacggcagcacccaacccctgggcagctcttgtgaccggtgccctggctggtacatgtttcagttccaccggatcctgcagtacgccctgccgagacaggagtcccagcggccattcttttggattttcatggacaacttgctgctgaccgaggatgaccaggaaactaccactcggttcctgcagaccgaagccgtgaccctgcaggacgtgagaggccgggactaccagaacgccatgcgggtgtggtccaacatccctggactgaaaagcaagcacgcacctctgacccctaaagaagaggagtacctgcaggcccaggtgcggagcagaagcaagctggacgcccctaaggtggatctgctggtgaagaattgcctcctgcccctgagagagtacttcaagtatttcagccagaatagtctgcccctgggcggcccaagcagcggcgcccctcctcccagcggcggcagcccagccggctccccaacctctaccgaggagggcacctctgagtccgccacccccgagagcggccctggcacctccaccgagcccagcgagggcagcgcacccggcagccctgccggcagccccacctccacagaggagggaaccagcaccgagcccagcgaaggcagcgccccaggcaccagcaccgagcctagtgagggcggctctggcggcggcagcgcccaggagattaaacggatcaacaagatcagaagaagacttgtgaaagacagcaacaccaagaaggccggcaagacaggccccatgaaaaccctgctggttagagtgatgacacccgatctgagagagcggctggaaaacctgagaaagaagcctgaaaatatcccccagcccatcagcaatacatctagagccaacctgaataagctgctgaccgattacaccgaaatgaagaaggcgatcctgcatgtgtactgggaagagttccagaaggaccctgtgggcctgatgagccgggtggcccagcctgccagcaagaagatcgatcagaacaagctgaaacctgagatggacgagaagggcaacctgaccaccgccggctttgcctgctctcagtgtggccagcccctgttcgtgtacaagctggagcaggtgtctgagaagggcaaggcttacaccaactacttcggacggtgcaatgtggccgagcacgaaaagctgatcctgctggcccagctgaagcccgagaaggatagcgacgaagccgtgacatatagcctgggaaagtttgggcagagggccctggatttctacagcattcatgtgaccaaggagtccacccaccccgtgaagcccctggcccagatcgccggaaacagatacgcctccggacctgtgggaaaggccctgagcgacgcatgtatgggcacaatcgcctccttcctgtctaagtaccaggacatcatcatcgaacaccagaaggtggtgaagggcaaccagaagagactggagagcctgcgggagctggccggcaaggaaaacctggaataccctagcgtgaccctgccacctcagcctcacaccaaggagggcgttgatgcctacaacgaagtgatcgcccgggtgcgaatgtgggtgaacctgaacctgtggcagaagctgaagctaagcagagatgatgccaagcctctgctgagactgaagggattcccttcctttcctctggtcgagagacaggccaacgaagtggactggtgggacatggtgtgtaacgtgaagaagctgatcaacgagaaaaaggaggatggcaaggtgttttggcagaatctggctggctacaagagacaggaagccctgagaccatacctgagcagcgaggaagatcggaagaagggaaagaaattcgctcggtaccagctgggcgacctgctgctgcacctggaaaagaagcacggcgaggactggggaaaggtgtacgacgaggcctgggagcggattgacaagaaagtggaaggcctgagcaagcacatcaagctggaagaggaacggagaagcgaggacgcccagagcaaggccgccctgaccgactggctgcgggctaaggccagcttcgtgatcgagggcctgaaggaggccgacaaggacgagttctgcagatgcgagctgaagctgcagaagtggtacggggacctgcggggaaagcccttcgccatcgaagccgagaacagcatcctggacatcagcggcttcagcaagcagtacaactgtgccttcatctggcagaaggacggcgtgaagaagctgaacctgtacctgatcatcaactacttcaagggcggcaagctgcggttcaagaagatcaaacctgaagccttcgaagccaacagattctacaccgtgatcaacaaaaagagcggcgagatcgtgcccatggaggtgaacttcaacttcgacgaccccaacctgatcatcctgcctctggcctttggcaagagacagggcagagaattcatctggaacgacctgctgtccctggaaaccggcagcctgaagctggccaacggaagagtgatcgagaagacactgtacaacagaagaacccggcaggatgagcctgccctgttcgtggccctgaccttcgagcggcgggaggtcctggactcctccaatatcaaaccaatgaacctgatcggcgtggcaagaggcgaaaacatccccgccgtgatcgccctgaccgaccccgagggctgcccactgagccggtttaaggatagcctgggaaacccaacccacatcctgagaatcggcgagagctataaggagaagcagcggaccatccaggccaagaaggaggtggagcagcggagagccggcggctacagccggaagtacgccagcaaagccaagaatctggcagacgatatggtgagaaacaccgctagagatctgctgtactacgccgtgacccaggatgccatgctgatcttcgccaacctgagccggggcttcggccggcagggcaagcggaccttcatggccgagagacagtacacacggatggaggactggctgaccgccaagctggcctacgagggcctgagcaagacctacctgtccaagacactggcccagtacacctccaagacatgcagcaactgtgggtttaccatcaccagcgccgactacgacagggtgctggagaagctgaagaagacagcaacaggctggatgaccacaattaacggcaaggagctgaaggtggagggccagattacctactacaacagatacaagagacagaacgtagtcaaggacctgtccgtcgagctggatagactgagcgaagaatctgtgaacaacgacatctcctcctggacaaagggcagaagcggagaagctctgagcctcctgaagaaaagattctcccatagacccgtgcaggagaagttcgtgtgcctgaactgcggcttcgagacacacgcagccgagcaagccgccctgaacatcgccagatcctggctgttcctgcggagccaggagtacaagaaataccagacaaacaagacaaccggcaacaccgataagagagccttcgtcgagacctggcagtccttttaccggaagaagcttaaggaggtgtggaaacctgccgtgcggtctggcggatctggcggaggctccacaagcagctgggccagcgtggtgttcgaggacgtggccgtgaacttcacccccgaggagtgggccctgctgaacaggggccagaggaagctgtacagggacgtgatgctggagacctgcaggaacctgagcgccgtggagaagaggaagttccacagcagcggcgacctgaccaggatgcaggagggcctgctgaggagccccctggtggagagcgtgtgcgagaggatcgagggcgacccctgcggcaccagccccaagaaaaagagaaaagtctaagctgccttctgcggggcttgccttctggccatgcccttcttctctcccttgcacctgtacctcttggtctttgaataaagcctgagtaggaaggctagcaaaaaaaaaaaaaaaaaaaaaaaaaaaaaaaaaaaaaaaaaaaaaaaaaaaaaaaaaaaaaaaaaaaaaaaaaaaaaaaa

SEQ ID NO: 6381 - RNA, 5797 nt, synthetic construct
  source 1..5797: mol_type = other RNA
aggaaataagagagaaaagaagagtaagaagaaatataagagccaccatggcccctaagaagaagcgtaaagtgagccggatggaacgcctcgtctacgaggtgcggcagaagtgcagaaacatcgaggacatctgcatctcctgcggatctctgaacgtgaccctggagcacccactgttcatcggcggcatgtgccagaactgtaaaaactgttttctggagtgtgcctatcaatacgacgatgacggctaccagagctactgcaccatctgttgcggcggaagagaggtgctgatgtgtggaaataacaactgctgccggtgcttctgcgtggaatgcgtggacctgctggtgggccccggcgccgcccaggccgctattaaggaagatccttggaactgctacatgtgcggccacaagggcacatacggcctgctgagacggagagaggactggcctagcagactgcagatgttcttcgccaataaccacgaccaggagttcgacccccctaaggtgtaccctcccgtccccgccgagaagagaaagcccatccgggtcctgagcctgttcgatggcatcgccaccggtctgctggtgctgaaggacctgggcatccaggtggataggtacattgcctccgaggtgtgcgaggactccatcaccgtgggaatggtgcgtcatcagggcaagatcatgtacgtgggcgacgtgcggagcgtgacacagaagcatatccaggagtggggccctttcgacctggtgatcggcggcagcccttgcaatgacctgagcatcgtgaacccagcccggaagggcctgtacgagggaaccggcagactgttcttcgagttttacagactgctgcacgacgcccggcctaaggaaggcgacgaccggcccttcttttggctgttcgagaatgtggtggccatgggagtcagcgacaagcgggatattagccggttcctggagagcaaccccgtgatgatcgatgccaaggaagtgagcgccgcccaccgggccagatacttctggggcaatctgcctggcatgaacagacccctggccagcaccgtgaacgacaagctggagctgcaggagtgcctggagcacggccggatcgccaagttcagcaaggtgagaaccatcaccacccgaagcaacagcatcaaacaaggcaaggaccagcactttcctgtgttcatgaacgagaaggaggacatcctgtggtgtaccgagatggagagagtgttcgggttcccagtccactacacagatgtcagcaacatgtctagactggccagacagagactgctgggaagaagctggtccgtccctgtgatcagacacctgttcgcccctctgaaggagtacttcgcctgcgtgagcagcggcaacagcaacgccaacagccggggccccagcttctctagcggcctggtgccactgtccctgagagggagccacatgggccccatggagatctacaaaaccgtgagcgcctggaagcggcagcctgtgcgcgtgctgagcctgtttcggaatatcgataaagtcctgaaaagcctgggattcctggagagcggctctggctccggcggtggcaccctgaagtacgtggaggatgtgacaaacgtggtcagacgggatgtggagaagtggggccccttcgatctggtgtacggcagcacccaacccctgggcagctcttgtgaccggtgccctggctggtacatgtttcagttccaccggatcctgcagtacgccctgccgagacaggagtcccagcggccattcttttggattttcatggacaacttgctgctgaccgaggatgaccaggaaactaccactcggttcctgcagaccgaagccgtgaccctgcaggacgtgagaggccgggactaccagaacgccatgcgggtgtggtccaacatccctggactgaaaagcaagcacgcacctctgacccctaaagaagaggagtacctgcaggcccaggtgcggagcagaagcaagctggacgcccctaaggtggatctgctggtgaagaattgcctcctgcccctgagagagtacttcaagtatttcagccagaatagtctgcccctgggcggcccaagcagcggcgcccctcctcccagcggcggcagcccagccggctccccaacctctaccgaggagggcacctctgagtccgccacccccgagagcggccctggcacctccaccgagcccagcgagggcagcgcacccggcagccctgccggcagccccacctccacagaggagggaaccagcaccgagcccagcgaaggcagcgccccaggcaccagcaccgagcctagtgagggcggctctggcggcggcagcgcccaggagattaaacggatcaacaagatcagaagaagacttgtgaaagacagcaacaccaagaaggccggcaagacaggccccatgaaaaccctgctggttagagtgatgacacccgatctgagagagcggctggaaaacctgagaaagaagcctgaaaatatcccccagcccatcagcaatacatctagagccaacctgaataagctgctgaccgattacaccgaaatgaagaaggcgatcctgcatgtgtactgggaagagttccagaaggaccctgtgggcctgatgagccgggtggcccagcctgccagcaagaagatcgatcagaacaagctgaaacctgagatggacgagaagggcaacctgaccaccgccggctttgcctgctctcagtgtggccagcccctgttcgtgtacaagctggagcaggtgtctgagaagggcaaggcttacaccaactacttcggacggtgcaatgtggccgagcacgaaaagctgatcctgctggcccagctgaagcccgagaaggatagcgacgaagccgtgacatatagcctgggaaagtttgggcagagggccctggatttctacagcattcatgtgaccaaggagtccacccaccccgtgaagcccctggcccagatcgccggaaacagatacgcctccggacctgtgggaaaggccctgagcgacgcatgtatgggcacaatcgcctccttcctgtctaagtaccaggacatcatcatcgaacaccagaaggtggtgaagggcaaccagaagagactggagagcctgcgggagctggccggcaaggaaaacctggaataccctagcgtgaccctgccacctcagcctcacaccaaggagggcgttgatgcctacaacgaagtgatcgcccgggtgcgaatgtgggtgaacctgaacctgtggcagaagctgaagctaagcagagatgatgccaagcctctgctgagactgaagggattcccttcctttcctctggtcgagagacaggccaacgaagtggactggtgggacatggtgtgtaacgtgaagaagctgatcaacgagaaaaaggaggatggcaaggtgttttggcagaatctggctggctacaagagacaggaagccctgagaccatacctgagcagcgaggaagatcggaagaagggaaagaaattcgctcggtaccagctgggcgacctgctgctgcacctggaaaagaagcacggcgaggactggggaaaggtgtacgacgaggcctgggagcggattgacaagaaagtggaaggcctgagcaagcacatcaagctggaagaggaacggagaagcgaggacgcccagagcaaggccgccctgaccgactggctgcgggctaaggccagcttcgtgatcgagggcctgaaggaggccgacaaggacgagttctgcagatgcgagctgaagctgcagaagtggtacggggacctgcggggaaagcccttcgccatcgaagccgagaacagcatcctggacatcagcggcttcagcaagcagtacaactgtgccttcatctggcagaaggacggcgtgaagaagctgaacctgtacctgatcatcaactacttcaagggcggcaagctgcggttcaagaagatcaaacctgaagccttcgaagccaacagattctacaccgtgatcaacaaaaagagcggcgagatcgtgcccatggaggtgaacttcaacttcgacgaccccaacctgatcatcctgcctctggcctttggcaagagacagggcagagaattcatctggaacgacctgctgtccctggaaaccggcagcctgaagctggccaacggaagagtgatcgagaagacactgtacaacagaagaacccggcaggatgagcctgccctgttcgtggccctgaccttcgagcggcgggaggtcctggactcctccaatatcaaaccaatgaacctgatcggcgtggcaagaggcgaaaacatccccgccgtgatcgccctgaccgaccccgagggctgcccactgagccggtttaaggatagcctgggaaacccaacccacatcctgagaatcggcgagagctataaggagaagcagcggaccatccaggccaagaaggaggtggagcagcggagagccggcggctacagccggaagtacgccagcaaagccaagaatctggcagacgatatggtgagaaacaccgctagagatctgctgtactacgccgtgacccaggatgccatgctgatcttcgccaacctgagccggggcttcggccggcagggcaagcggaccttcatggccgagagacagtacacacggatggaggactggctgaccgccaagctggcctacgagggcctgagcaagacctacctgtccaagacactggcccagtacacctccaagacatgcagcaactgtgggtttaccatcaccagcgccgactacgacagggtgctggagaagctgaagaagacagcaacaggctggatgaccacaattaacggcaaggagctgaaggtggagggccagattacctactacaacagatacaagagacagaacgtagtcaaggacctgtccgtcgagctggatagactgagcgaagaatctgtgaacaacgacatctcctcctggacaaagggcagaagcggagaagctctgagcctcctgaagaaaagattctcccatagacccgtgcaggagaagttcgtgtgcctgaactgcggcttcgagacacacgcagccgagcaagccgccctgaacatcgccagatcctggctgttcctgcggagccaggagtacaagaaataccagacaaacaagacaaccggcaacaccgataagagagccttcgtcgagacctggcagtccttttaccggaagaagcttaaggaggtgtggaaacctgccgtgcggtctggcggatctggcggaggctccacaagcgcccaggagagcctgaccctggaggacgtggccgtggacttcagcagggaggagtggaggctgctggcccccgcccagaaggacctgtacagggacgtgatgctggagaactacaggaacctggtgagcgtgggccaccaggccagcaagcccgacgtgctggccaggctggagaggggcgaggagccctgggccatcgaggaggaggtgaggagcggcaccagccccgagaccggcaaggtgaccagccccaagaaaaagagaaaagtctaagctgccttctgcggggcttgccttctggccatgcccttcttctctcccttgcacctgtacctcttggtctttgaataaagcctgagtaggaaggctagcaaaaaaaaaaaaaaaaaaaaaaaaaaaaaaaaaaaaaaaaaaaaaaaaaaaaaaaaaaaaaaaaaaaaaaaaaaaaaaaa

SEQ ID NO: 6382 - RNA, 5797 nt, synthetic construct
  source 1..5797: mol_type = other RNA
aggaaataagagagaaaagaagagtaagaagaaatataagagccaccatggcccctaagaagaagcgtaaagtgagccggatggaacgcctcgtctacgaggtgcggcagaagtgcagaaacatcgaggacatctgcatctcctgcggatctctgaacgtgaccctggagcacccactgttcatcggcggcatgtgccagaactgtaaaaactgttttctggagtgtgcctatcaatacgacgatgacggctaccagagctactgcaccatctgttgcggcggaagagaggtgctgatgtgtggaaataacaactgctgccggtgcttctgcgtggaatgcgtggacctgctggtgggccccggcgccgcccaggccgctattaaggaagatccttggaactgctacatgtgcggccacaagggcacatacggcctgctgagacggagagaggactggcctagcagactgcagatgttcttcgccaataaccacgaccaggagttcgacccccctaaggtgtaccctcccgtccccgccgagaagagaaagcccatccgggtcctgagcctgttcgatggcatcgccaccggtctgctggtgctgaaggacctgggcatccaggtggataggtacattgcctccgaggtgtgcgaggactccatcaccgtgggaatggtgcgtcatcagggcaagatcatgtacgtgggcgacgtgcggagcgtgacacagaagcatatccaggagtggggccctttcgacctggtgatcggcggcagcccttgcaatgacctgagcatcgtgaacccagcccggaagggcctgtacgagggaaccggcagactgttcttcgagttttacagactgctgcacgacgcccggcctaaggaaggcgacgaccggcccttcttttggctgttcgagaatgtggtggccatgggagtcagcgacaagcgggatattagccggttcctggagagcaaccccgtgatgatcgatgccaaggaagtgagcgccgcccaccgggccagatacttctggggcaatctgcctggcatgaacagacccctggccagcaccgtgaacgacaagctggagctgcaggagtgcctggagcacggccggatcgccaagttcagcaaggtgagaaccatcaccacccgaagcaacagcatcaaacaaggcaaggaccagcactttcctgtgttcatgaacgagaaggaggacatcctgtggtgtaccgagatggagagagtgttcgggttcccagtccactacacagatgtcagcaacatgtctagactggccagacagagactgctgggaagaagctggtccgtccctgtgatcagacacctgttcgcccctctgaaggagtacttcgcctgcgtgagcagcggcaacagcaacgccaacagccggggccccagcttctctagcggcctggtgccactgtccctgagagggagccacatgggccccatggagatctacaaaaccgtgagcgcctggaagcggcagcctgtgcgcgtgctgagcctgtttcggaatatcgataaagtcctgaaaagcctgggattcctggagagcggctctggctccggcggtggcaccctgaagtacgtggaggatgtgacaaacgtggtcagacgggatgtggagaagtggggccccttcgatctggtgtacggcagcacccaacccctgggcagctcttgtgaccggtgccctggctggtacatgtttcagttccaccggatcctgcagtacgccctgccgagacaggagtcccagcggccattcttttggattttcatggacaacttgctgctgaccgaggatgaccaggaaactaccactcggttcctgcagaccgaagccgtgaccctgcaggacgtgagaggccgggactaccagaacgccatgcgggtgtggtccaacatccctggactgaaaagcaagcacgcacctctgacccctaaagaagaggagtacctgcaggcccaggtgcggagcagaagcaagctggacgcccctaaggtggatctgctggtgaagaattgcctcctgcccctgagagagtacttcaagtatttcagccagaatagtctgcccctgggcggcccaagcagcggcgcccctcctcccagcggcggcagcccagccggctccccaacctctaccgaggagggcacctctgagtccgccacccccgagagcggccctggcacctccaccgagcccagcgagggcagcgcacccggcagccctgccggcagccccacctccacagaggagggaaccagcaccgagcccagcgaaggcagcgccccaggcaccagcaccgagcctagtgagggcggctctggcggcggcagcgcccaggagattaaacggatcaacaagatcagaagaagacttgtgaaagacagcaacaccaagaaggccggcaagacaggccccatgaaaaccctgctggttagagtgatgacacccgatctgagagagcggctggaaaacctgagaaagaagcctgaaaatatcccccagcccatcagcaatacatctagagccaacctgaataagctgctgaccgattacaccgaaatgaagaaggcgatcctgcatgtgtactgggaagagttccagaaggaccctgtgggcctgatgagccgggtggcccagcctgccagcaagaagatcgatcagaacaagctgaaacctgagatggacgagaagggcaacctgaccaccgccggctttgcctgctctcagtgtggccagcccctgttcgtgtacaagctggagcaggtgtctgagaagggcaaggcttacaccaactacttcggacggtgcaatgtggccgagcacgaaaagctgatcctgctggcccagctgaagcccgagaaggatagcgacgaagccgtgacatatagcctgggaaagtttgggcagagggccctggatttctacagcattcatgtgaccaaggagtccacccaccccgtgaagcccctggcccagatcgccggaaacagatacgcctccggacctgtgggaaaggccctgagcgacgcatgtatgggcacaatcgcctccttcctgtctaagtaccaggacatcatcatcgaacaccagaaggtggtgaagggcaaccagaagagactggagagcctgcgggagctggccggcaaggaaaacctggaataccctagcgtgaccctgccacctcagcctcacaccaaggagggcgttgatgcctacaacgaagtgatcgcccgggtgcgaatgtgggtgaacctgaacctgtggcagaagctgaagctaagcagagatgatgccaagcctctgctgagactgaagggattcccttcctttcctctggtcgagagacaggccaacgaagtggactggtgggacatggtgtgtaacgtgaagaagctgatcaacgagaaaaaggaggatggcaaggtgttttggcagaatctggctggctacaagagacaggaagccctgagaccatacctgagcagcgaggaagatcggaagaagggaaagaaattcgctcggtaccagctgggcgacctgctgctgcacctggaaaagaagcacggcgaggactggggaaaggtgtacgacgaggcctgggagcggattgacaagaaagtggaaggcctgagcaagcacatcaagctggaagaggaacggagaagcgaggacgcccagagcaaggccgccctgaccgactggctgcgggctaaggccagcttcgtgatcgagggcctgaaggaggccgacaaggacgagttctgcagatgcgagctgaagctgcagaagtggtacggggacctgcggggaaagcccttcgccatcgaagccgagaacagcatcctggacatcagcggcttcagcaagcagtacaactgtgccttcatctggcagaaggacggcgtgaagaagctgaacctgtacctgatcatcaactacttcaagggcggcaagctgcggttcaagaagatcaaacctgaagccttcgaagccaacagattctacaccgtgatcaacaaaaagagcggcgagatcgtgcccatggaggtgaacttcaacttcgacgaccccaacctgatcatcctgcctctggcctttggcaagagacagggcagagaattcatctggaacgacctgctgtccctggaaaccggcagcctgaagctggccaacggaagagtgatcgagaagacactgtacaacagaagaacccggcaggatgagcctgccctgttcgtggccctgaccttcgagcggcgggaggtcctggactcctccaatatcaaaccaatgaacctgatcggcgtggcaagaggcgaaaacatccccgccgtgatcgccctgaccgaccccgagggctgcccactgagccggtttaaggatagcctgggaaacccaacccacatcctgagaatcggcgagagctataaggagaagcagcggaccatccaggccaagaaggaggtggagcagcggagagccggcggctacagccggaagtacgccagcaaagccaagaatctggcagacgatatggtgagaaacaccgctagagatctgctgtactacgccgtgacccaggatgccatgctgatcttcgccaacctgagccggggcttcggccggcagggcaagcggaccttcatggccgagagacagtacacacggatggaggactggctgaccgccaagctggcctacgagggcctgagcaagacctacctgtccaagacactggcccagtacacctccaagacatgcagcaactgtgggtttaccatcaccagcgccgactacgacagggtgctggagaagctgaagaagacagcaacaggctggatgaccacaattaacggcaaggagctgaaggtggagggccagattacctactacaacagatacaagagacagaacgtagtcaaggacctgtccgtcgagctggatagactgagcgaagaatctgtgaacaacgacatctcctcctggacaaagggcagaagcggagaagctctgagcctcctgaagaaaagattctcccatagacccgtgcaggagaagttcgtgtgcctgaactgcggcttcgagacacacgcagccgagcaagccgccctgaacatcgccagatcctggctgttcctgcggagccaggagtacaagaaataccagacaaacaagacaaccggcaacaccgataagagagccttcgtcgagacctggcagtccttttaccggaagaagcttaaggaggtgtggaaacctgccgtgcggtctggcggatctggcggaggctccacaagccaggagagcgtgaccttcaaggacgtggccgtggacttcacccaggaggagtggcaccacatggaccccacccagaggatcctgtacagggacgtgatgctggagacctacagccacctggtgagcctgggctaccaggtgagcaagcccgaggtgatcttcaagctggagcagggcgaggagccctggatcagcgaggaggagatccagaggcccttctgccccgactgggagatcaggcccaccagccccaagaaaaagagaaaagtctaagctgccttctgcggggcttgccttctggccatgcccttcttctctcccttgcacctgtacctcttggtctttgaataaagcctgagtaggaaggctagcaaaaaaaaaaaaaaaaaaaaaaaaaaaaaaaaaaaaaaaaaaaaaaaaaaaaaaaaaaaaaaaaaaaaaaaaaaaaaaaa

SEQ ID NO: 6383 - RNA, 5797 nt, synthetic construct
  source 1..5797: mol_type = other RNA
aggaaataagagagaaaagaagagtaagaagaaatataagagccaccatggcccctaagaagaagcgtaaagtgagccggatggaacgcctcgtctacgaggtgcggcagaagtgcagaaacatcgaggacatctgcatctcctgcggatctctgaacgtgaccctggagcacccactgttcatcggcggcatgtgccagaactgtaaaaactgttttctggagtgtgcctatcaatacgacgatgacggctaccagagctactgcaccatctgttgcggcggaagagaggtgctgatgtgtggaaataacaactgctgccggtgcttctgcgtggaatgcgtggacctgctggtgggccccggcgccgcccaggccgctattaaggaagatccttggaactgctacatgtgcggccacaagggcacatacggcctgctgagacggagagaggactggcctagcagactgcagatgttcttcgccaataaccacgaccaggagttcgacccccctaaggtgtaccctcccgtccccgccgagaagagaaagcccatccgggtcctgagcctgttcgatggcatcgccaccggtctgctggtgctgaaggacctgggcatccaggtggataggtacattgcctccgaggtgtgcgaggactccatcaccgtgggaatggtgcgtcatcagggcaagatcatgtacgtgggcgacgtgcggagcgtgacacagaagcatatccaggagtggggccctttcgacctggtgatcggcggcagcccttgcaatgacctgagcatcgtgaacccagcccggaagggcctgtacgagggaaccggcagactgttcttcgagttttacagactgctgcacgacgcccggcctaaggaaggcgacgaccggcccttcttttggctgttcgagaatgtggtggccatgggagtcagcgacaagcgggatattagccggttcctggagagcaaccccgtgatgatcgatgccaaggaagtgagcgccgcccaccgggccagatacttctggggcaatctgcctggcatgaacagacccctggccagcaccgtgaacgacaagctggagctgcaggagtgcctggagcacggccggatcgccaagttcagcaaggtgagaaccatcaccacccgaagcaacagcatcaaacaaggcaaggaccagcactttcctgtgttcatgaacgagaaggaggacatcctgtggtgtaccgagatggagagagtgttcgggttcccagtccactacacagatgtcagcaacatgtctagactggccagacagagactgctgggaagaagctggtccgtccctgtgatcagacacctgttcgcccctctgaaggagtacttcgcctgcgtgagcagcggcaacagcaacgccaacagccggggccccagcttctctagcggcctggtgccactgtccctgagagggagccacatgggccccatggagatctacaaaaccgtgagcgcctggaagcggcagcctgtgcgcgtgctgagcctgtttcggaatatcgataaagtcctgaaaagcctgggattcctggagagcggctctggctccggcggtggcaccctgaagtacgtggaggatgtgacaaacgtggtcagacgggatgtggagaagtggggccccttcgatctggtgtacggcagcacccaacccctgggcagctcttgtgaccggtgccctggctggtacatgtttcagttccaccggatcctgcagtacgccctgccgagacaggagtcccagcggccattcttttggattttcatggacaacttgctgctgaccgaggatgaccaggaaactaccactcggttcctgcagaccgaagccgtgaccctgcaggacgtgagaggccgggactaccagaacgccatgcgggtgtggtccaacatccctggactgaaaagcaagcacgcacctctgacccctaaagaagaggagtacctgcaggcccaggtgcggagcagaagcaagctggacgcccctaaggtggatctgctggtgaagaattgcctcctgcccctgagagagtacttcaagtatttcagccagaatagtctgcccctgggcggcccaagcagcggcgcccctcctcccagcggcggcagcccagccggctccccaacctctaccgaggagggcacctctgagtccgccacccccgagagcggccctggcacctccaccgagcccagcgagggcagcgcacccggcagccctgccggcagccccacctccacagaggagggaaccagcaccgagcccagcgaaggcagcgccccaggcaccagcaccgagcctagtgagggcggctctggcggcggcagcgcccaggagattaaacggatcaacaagatcagaagaagacttgtgaaagacagcaacaccaagaaggccggcaagacaggccccatgaaaaccctgctggttagagtgatgacacccgatctgagagagcggctggaaaacctgagaaagaagcctgaaaatatcccccagcccatcagcaatacatctagagccaacctgaataagctgctgaccgattacaccgaaatgaagaaggcgatcctgcatgtgtactgggaagagttccagaaggaccctgtgggcctgatgagccgggtggcccagcctgccagcaagaagatcgatcagaacaagctgaaacctgagatggacgagaagggcaacctgaccaccgccggctttgcctgctctcagtgtggccagcccctgttcgtgtacaagctggagcaggtgtctgagaagggcaaggcttacaccaactacttcggacggtgcaatgtggccgagcacgaaaagctgatcctgctggcccagctgaagcccgagaaggatagcgacgaagccgtgacatatagcctgggaaagtttgggcagagggccctggatttctacagcattcatgtgaccaaggagtccacccaccccgtgaagcccctggcccagatcgccggaaacagatacgcctccggacctgtgggaaaggccctgagcgacgcatgtatgggcacaatcgcctccttcctgtctaagtaccaggacatcatcatcgaacaccagaaggtggtgaagggcaaccagaagagactggagagcctgcgggagctggccggcaaggaaaacctggaataccctagcgtgaccctgccacctcagcctcacaccaaggagggcgttgatgcctacaacgaagtgatcgcccgggtgcgaatgtgggtgaacctgaacctgtggcagaagctgaagctaagcagagatgatgccaagcctctgctgagactgaagggattcccttcctttcctctggtcgagagacaggccaacgaagtggactggtgggacatggtgtgtaacgtgaagaagctgatcaacgagaaaaaggaggatggcaaggtgttttggcagaatctggctggctacaagagacaggaagccctgagaccatacctgagcagcgaggaagatcggaagaagggaaagaaattcgctcggtaccagctgggcgacctgctgctgcacctggaaaagaagcacggcgaggactggggaaaggtgtacgacgaggcctgggagcggattgacaagaaagtggaaggcctgagcaagcacatcaagctggaagaggaacggagaagcgaggacgcccagagcaaggccgccctgaccgactggctgcgggctaaggccagcttcgtgatcgagggcctgaaggaggccgacaaggacgagttctgcagatgcgagctgaagctgcagaagtggtacggggacctgcggggaaagcccttcgccatcgaagccgagaacagcatcctggacatcagcggcttcagcaagcagtacaactgtgccttcatctggcagaaggacggcgtgaagaagctgaacctgtacctgatcatcaactacttcaagggcggcaagctgcggttcaagaagatcaaacctgaagccttcgaagccaacagattctacaccgtgatcaacaaaaagagcggcgagatcgtgcccatggaggtgaacttcaacttcgacgaccccaacctgatcatcctgcctctggcctttggcaagagacagggcagagaattcatctggaacgacctgctgtccctggaaaccggcagcctgaagctggccaacggaagagtgatcgagaagacactgtacaacagaagaacccggcaggatgagcctgccctgttcgtggccctgaccttcgagcggcgggaggtcctggactcctccaatatcaaaccaatgaacctgatcggcgtggcaagaggcgaaaacatccccgccgtgatcgccctgaccgaccccgagggctgcccactgagccggtttaaggatagcctgggaaacccaacccacatcctgagaatcggcgagagctataaggagaagcagcggaccatccaggccaagaaggaggtggagcagcggagagccggcggctacagccggaagtacgccagcaaagccaagaatctggcagacgatatggtgagaaacaccgctagagatctgctgtactacgccgtgacccaggatgccatgctgatcttcgccaacctgagccggggcttcggccggcagggcaagcggaccttcatggccgagagacagtacacacggatggaggactggctgaccgccaagctggcctacgagggcctgagcaagacctacctgtccaagacactggcccagtacacctccaagacatgcagcaactgtgggtttaccatcaccagcgccgactacgacagggtgctggagaagctgaagaagacagcaacaggctggatgaccacaattaacggcaaggagctgaaggtggagggccagattacctactacaacagatacaagagacagaacgtagtcaaggacctgtccgtcgagctggatagactgagcgaagaatctgtgaacaacgacatctcctcctggacaaagggcagaagcggagaagctctgagcctcctgaagaaaagattctcccatagacccgtgcaggagaagttcgtgtgcctgaactgcggcttcgagacacacgcagccgagcaagccgccctgaacatcgccagatcctggctgttcctgcggagccaggagtacaagaaataccagacaaacaagacaaccggcaacaccgataagagagccttcgtcgagacctggcagtccttttaccggaagaagcttaaggaggtgtggaaacctgccgtgcggtctggcggatctggcggaggctccacaagcgccagggacctggtgatgttcagggacgtggccgtggacttcagccaggaggagtgggagtgcctgaacagctaccagaggaacctgtacagggacgtgatcctggagaactacagcaacctggtgagcctgggctgcagcatcagcaagcccgacgtgatcaccctgctggagcagggcaaggagccctggctggtggtgagggacgagaagaggaggtggagcctgggccccaccttcaagaccagccccaagaaaaagagaaaagtctaagctgccttctgcggggcttgccttctggccatgcccttcttctctcccttgcacctgtacctcttggtctttgaataaagcctgagtaggaaggctagcaaaaaaaaaaaaaaaaaaaaaaaaaaaaaaaaaaaaaaaaaaaaaaaaaaaaaaaaaaaaaaaaaaaaaaaaaaaaaaaa

SEQ ID NO: 6384 - RNA, 5797 nt, synthetic construct
  source 1..5797: mol_type = other RNA
aggaaataagagagaaaagaagagtaagaagaaatataagagccaccatggcccctaagaagaagcgtaaagtgagccggatggaacgcctcgtctacgaggtgcggcagaagtgcagaaacatcgaggacatctgcatctcctgcggatctctgaacgtgaccctggagcacccactgttcatcggcggcatgtgccagaactgtaaaaactgttttctggagtgtgcctatcaatacgacgatgacggctaccagagctactgcaccatctgttgcggcggaagagaggtgctgatgtgtggaaataacaactgctgccggtgcttctgcgtggaatgcgtggacctgctggtgggccccggcgccgcccaggccgctattaaggaagatccttggaactgctacatgtgcggccacaagggcacatacggcctgctgagacggagagaggactggcctagcagactgcagatgttcttcgccaataaccacgaccaggagttcgacccccctaaggtgtaccctcccgtccccgccgagaagagaaagcccatccgggtcctgagcctgttcgatggcatcgccaccggtctgctggtgctgaaggacctgggcatccaggtggataggtacattgcctccgaggtgtgcgaggactccatcaccgtgggaatggtgcgtcatcagggcaagatcatgtacgtgggcgacgtgcggagcgtgacacagaagcatatccaggagtggggccctttcgacctggtgatcggcggcagcccttgcaatgacctgagcatcgtgaacccagcccggaagggcctgtacgagggaaccggcagactgttcttcgagttttacagactgctgcacgacgcccggcctaaggaaggcgacgaccggcccttcttttggctgttcgagaatgtggtggccatgggagtcagcgacaagcgggatattagccggttcctggagagcaaccccgtgatgatcgatgccaaggaagtgagcgccgcccaccgggccagatacttctggggcaatctgcctggcatgaacagacccctggccagcaccgtgaacgacaagctggagctgcaggagtgcctggagcacggccggatcgccaagttcagcaaggtgagaaccatcaccacccgaagcaacagcatcaaacaaggcaaggaccagcactttcctgtgttcatgaacgagaaggaggacatcctgtggtgtaccgagatggagagagtgttcgggttcccagtccactacacagatgtcagcaacatgtctagactggccagacagagactgctgggaagaagctggtccgtccctgtgatcagacacctgttcgcccctctgaaggagtacttcgcctgcgtgagcagcggcaacagcaacgccaacagccggggccccagcttctctagcggcctggtgccactgtccctgagagggagccacatgggccccatggagatctacaaaaccgtgagcgcctggaagcggcagcctgtgcgcgtgctgagcctgtttcggaatatcgataaagtcctgaaaagcctgggattcctggagagcggctctggctccggcggtggcaccctgaagtacgtggaggatgtgacaaacgtggtcagacgggatgtggagaagtggggccccttcgatctggtgtacggcagcacccaacccctgggcagctcttgtgaccggtgccctggctggtacatgtttcagttccaccggatcctgcagtacgccctgccgagacaggagtcccagcggccattcttttggattttcatggacaacttgctgctgaccgaggatgaccaggaaactaccactcggttcctgcagaccgaagccgtgaccctgcaggacgtgagaggccgggactaccagaacgccatgcgggtgtggtccaacatccctggactgaaaagcaagcacgcacctctgacccctaaagaagaggagtacctgcaggcccaggtgcggagcagaagcaagctggacgcccctaaggtggatctgctggtgaagaattgcctcctgcccctgagagagtacttcaagtatttcagccagaatagtctgcccctgggcggcccaagcagcggcgcccctcctcccagcggcggcagcccagccggctccccaacctctaccgaggagggcacctctgagtccgccacccccgagagcggccctggcacctccaccgagcccagcgagggcagcgcacccggcagccctgccggcagccccacctccacagaggagggaaccagcaccgagcccagcgaaggcagcgccccaggcaccagcaccgagcctagtgagggcggctctggcggcggcagcgcccaggagattaaacggatcaacaagatcagaagaagacttgtgaaagacagcaacaccaagaaggccggcaagacaggccccatgaaaaccctgctggttagagtgatgacacccgatctgagagagcggctggaaaacctgagaaagaagcctgaaaatatcccccagcccatcagcaatacatctagagccaacctgaataagctgctgaccgattacaccgaaatgaagaaggcgatcctgcatgtgtactgggaagagttccagaaggaccctgtgggcctgatgagccgggtggcccagcctgccagcaagaagatcgatcagaacaagctgaaacctgagatggacgagaagggcaacctgaccaccgccggctttgcctgctctcagtgtggccagcccctgttcgtgtacaagctggagcaggtgtctgagaagggcaaggcttacaccaactacttcggacggtgcaatgtggccgagcacgaaaagctgatcctgctggcccagctgaagcccgagaaggatagcgacgaagccgtgacatatagcctgggaaagtttgggcagagggccctggatttctacagcattcatgtgaccaaggagtccacccaccccgtgaagcccctggcccagatcgccggaaacagatacgcctccggacctgtgggaaaggccctgagcgacgcatgtatgggcacaatcgcctccttcctgtctaagtaccaggacatcatcatcgaacaccagaaggtggtgaagggcaaccagaagagactggagagcctgcgggagctggccggcaaggaaaacctggaataccctagcgtgaccctgccacctcagcctcacaccaaggagggcgttgatgcctacaacgaagtgatcgcccgggtgcgaatgtgggtgaacctgaacctgtggcagaagctgaagctaagcagagatgatgccaagcctctgctgagactgaagggattcccttcctttcctctggtcgagagacaggccaacgaagtggactggtgggacatggtgtgtaacgtgaagaagctgatcaacgagaaaaaggaggatggcaaggtgttttggcagaatctggctggctacaagagacaggaagccctgagaccatacctgagcagcgaggaagatcggaagaagggaaagaaattcgctcggtaccagctgggcgacctgctgctgcacctggaaaagaagcacggcgaggactggggaaaggtgtacgacgaggcctgggagcggattgacaagaaagtggaaggcctgagcaagcacatcaagctggaagaggaacggagaagcgaggacgcccagagcaaggccgccctgaccgactggctgcgggctaaggccagcttcgtgatcgagggcctgaaggaggccgacaaggacgagttctgcagatgcgagctgaagctgcagaagtggtacggggacctgcggggaaagcccttcgccatcgaagccgagaacagcatcctggacatcagcggcttcagcaagcagtacaactgtgccttcatctggcagaaggacggcgtgaagaagctgaacctgtacctgatcatcaactacttcaagggcggcaagctgcggttcaagaagatcaaacctgaagccttcgaagccaacagattctacaccgtgatcaacaaaaagagcggcgagatcgtgcccatggaggtgaacttcaacttcgacgaccccaacctgatcatcctgcctctggcctttggcaagagacagggcagagaattcatctggaacgacctgctgtccctggaaaccggcagcctgaagctggccaacggaagagtgatcgagaagacactgtacaacagaagaacccggcaggatgagcctgccctgttcgtggccctgaccttcgagcggcgggaggtcctggactcctccaatatcaaaccaatgaacctgatcggcgtggcaagaggcgaaaacatccccgccgtgatcgccctgaccgaccccgagggctgcccactgagccggtttaaggatagcctgggaaacccaacccacatcctgagaatcggcgagagctataaggagaagcagcggaccatccaggccaagaaggaggtggagcagcggagagccggcggctacagccggaagtacgccagcaaagccaagaatctggcagacgatatggtgagaaacaccgctagagatctgctgtactacgccgtgacccaggatgccatgctgatcttcgccaacctgagccggggcttcggccggcagggcaagcggaccttcatggccgagagacagtacacacggatggaggactggctgaccgccaagctggcctacgagggcctgagcaagacctacctgtccaagacactggcccagtacacctccaagacatgcagcaactgtgggtttaccatcaccagcgccgactacgacagggtgctggagaagctgaagaagacagcaacaggctggatgaccacaattaacggcaaggagctgaaggtggagggccagattacctactacaacagatacaagagacagaacgtagtcaaggacctgtccgtcgagctggatagactgagcgaagaatctgtgaacaacgacatctcctcctggacaaagggcagaagcggagaagctctgagcctcctgaagaaaagattctcccatagacccgtgcaggagaagttcgtgtgcctgaactgcggcttcgagacacacgcagccgagcaagccgccctgaacatcgccagatcctggctgttcctgcggagccaggagtacaagaaataccagacaaacaagacaaccggcaacaccgataagagagccttcgtcgagacctggcagtccttttaccggaagaagcttaaggaggtgtggaaacctgccgtgcggtctggcggatctggcggaggctccacaagcagccagggcaggctgaccttccaggacgtggccatcgacttcacccaggaggagtgggagtgcctggacctgggccagagggagctgtacagggacgtgatgctggagaactacggcaacctggccagcctgggcctggtgatcagcaagcccgacctggtgaccttcctggagcagatgaaggacccctgggacaccaggaggatggagacccccgccgtgcaccccgccgtgagcagccacaccagccccaagaaaaagagaaaagtctaagctgccttctgcggggcttgccttctggccatgcccttcttctctcccttgcacctgtacctcttggtctttgaataaagcctgagtaggaaggctagcaaaaaaaaaaaaaaaaaaaaaaaaaaaaaaaaaaaaaaaaaaaaaaaaaaaaaaaaaaaaaaaaaaaaaaaaaaaaaaaa

SEQ ID NO: 6385 - RNA, 5797 nt, synthetic construct
  source 1..5797: mol_type = other RNA
aggaaataagagagaaaagaagagtaagaagaaatataagagccaccatggcccctaagaagaagcgtaaagtgagccggatggaacgcctcgtctacgaggtgcggcagaagtgcagaaacatcgaggacatctgcatctcctgcggatctctgaacgtgaccctggagcacccactgttcatcggcggcatgtgccagaactgtaaaaactgttttctggagtgtgcctatcaatacgacgatgacggctaccagagctactgcaccatctgttgcggcggaagagaggtgctgatgtgtggaaataacaactgctgccggtgcttctgcgtggaatgcgtggacctgctggtgggccccggcgccgcccaggccgctattaaggaagatccttggaactgctacatgtgcggccacaagggcacatacggcctgctgagacggagagaggactggcctagcagactgcagatgttcttcgccaataaccacgaccaggagttcgacccccctaaggtgtaccctcccgtccccgccgagaagagaaagcccatccgggtcctgagcctgttcgatggcatcgccaccggtctgctggtgctgaaggacctgggcatccaggtggataggtacattgcctccgaggtgtgcgaggactccatcaccgtgggaatggtgcgtcatcagggcaagatcatgtacgtgggcgacgtgcggagcgtgacacagaagcatatccaggagtggggccctttcgacctggtgatcggcggcagcccttgcaatgacctgagcatcgtgaacccagcccggaagggcctgtacgagggaaccggcagactgttcttcgagttttacagactgctgcacgacgcccggcctaaggaaggcgacgaccggcccttcttttggctgttcgagaatgtggtggccatgggagtcagcgacaagcgggatattagccggttcctggagagcaaccccgtgatgatcgatgccaaggaagtgagcgccgcccaccgggccagatacttctggggcaatctgcctggcatgaacagacccctggccagcaccgtgaacgacaagctggagctgcaggagtgcctggagcacggccggatcgccaagttcagcaaggtgagaaccatcaccacccgaagcaacagcatcaaacaaggcaaggaccagcactttcctgtgttcatgaacgagaaggaggacatcctgtggtgtaccgagatggagagagtgttcgggttcccagtccactacacagatgtcagcaacatgtctagactggccagacagagactgctgggaagaagctggtccgtccctgtgatcagacacctgttcgcccctctgaaggagtacttcgcctgcgtgagcagcggcaacagcaacgccaacagccggggccccagcttctctagcggcctggtgccactgtccctgagagggagccacatgggccccatggagatctacaaaaccgtgagcgcctggaagcggcagcctgtgcgcgtgctgagcctgtttcggaatatcgataaagtcctgaaaagcctgggattcctggagagcggctctggctccggcggtggcaccctgaagtacgtggaggatgtgacaaacgtggtcagacgggatgtggagaagtggggccccttcgatctggtgtacggcagcacccaacccctgggcagctcttgtgaccggtgccctggctggtacatgtttcagttccaccggatcctgcagtacgccctgccgagacaggagtcccagcggccattcttttggattttcatggacaacttgctgctgaccgaggatgaccaggaaactaccactcggttcctgcagaccgaagccgtgaccctgcaggacgtgagaggccgggactaccagaacgccatgcgggtgtggtccaacatccctggactgaaaagcaagcacgcacctctgacccctaaagaagaggagtacctgcaggcccaggtgcggagcagaagcaagctggacgcccctaaggtggatctgctggtgaagaattgcctcctgcccctgagagagtacttcaagtatttcagccagaatagtctgcccctgggcggcccaagcagcggcgcccctcctcccagcggcggcagcccagccggctccccaacctctaccgaggagggcacctctgagtccgccacccccgagagcggccctggcacctccaccgagcccagcgagggcagcgcacccggcagccctgccggcagccccacctccacagaggagggaaccagcaccgagcccagcgaaggcagcgccccaggcaccagcaccgagcctagtgagggcggctctggcggcggcagcgcccaggagattaaacggatcaacaagatcagaagaagacttgtgaaagacagcaacaccaagaaggccggcaagacaggccccatgaaaaccctgctggttagagtgatgacacccgatctgagagagcggctggaaaacctgagaaagaagcctgaaaatatcccccagcccatcagcaatacatctagagccaacctgaataagctgctgaccgattacaccgaaatgaagaaggcgatcctgcatgtgtactgggaagagttccagaaggaccctgtgggcctgatgagccgggtggcccagcctgccagcaagaagatcgatcagaacaagctgaaacctgagatggacgagaagggcaacctgaccaccgccggctttgcctgctctcagtgtggccagcccctgttcgtgtacaagctggagcaggtgtctgagaagggcaaggcttacaccaactacttcggacggtgcaatgtggccgagcacgaaaagctgatcctgctggcccagctgaagcccgagaaggatagcgacgaagccgtgacatatagcctgggaaagtttgggcagagggccctggatttctacagcattcatgtgaccaaggagtccacccaccccgtgaagcccctggcccagatcgccggaaacagatacgcctccggacctgtgggaaaggccctgagcgacgcatgtatgggcacaatcgcctccttcctgtctaagtaccaggacatcatcatcgaacaccagaaggtggtgaagggcaaccagaagagactggagagcctgcgggagctggccggcaaggaaaacctggaataccctagcgtgaccctgccacctcagcctcacaccaaggagggcgttgatgcctacaacgaagtgatcgcccgggtgcgaatgtgggtgaacctgaacctgtggcagaagctgaagctaagcagagatgatgccaagcctctgctgagactgaagggattcccttcctttcctctggtcgagagacaggccaacgaagtggactggtgggacatggtgtgtaacgtgaagaagctgatcaacgagaaaaaggaggatggcaaggtgttttggcagaatctggctggctacaagagacaggaagccctgagaccatacctgagcagcgaggaagatcggaagaagggaaagaaattcgctcggtaccagctgggcgacctgctgctgcacctggaaaagaagcacggcgaggactggggaaaggtgtacgacgaggcctgggagcggattgacaagaaagtggaaggcctgagcaagcacatcaagctggaagaggaacggagaagcgaggacgcccagagcaaggccgccctgaccgactggctgcgggctaaggccagcttcgtgatcgagggcctgaaggaggccgacaaggacgagttctgcagatgcgagctgaagctgcagaagtggtacggggacctgcggggaaagcccttcgccatcgaagccgagaacagcatcctggacatcagcggcttcagcaagcagtacaactgtgccttcatctggcagaaggacggcgtgaagaagctgaacctgtacctgatcatcaactacttcaagggcggcaagctgcggttcaagaagatcaaacctgaagccttcgaagccaacagattctacaccgtgatcaacaaaaagagcggcgagatcgtgcccatggaggtgaacttcaacttcgacgaccccaacctgatcatcctgcctctggcctttggcaagagacagggcagagaattcatctggaacgacctgctgtccctggaaaccggcagcctgaagctggccaacggaagagtgatcgagaagacactgtacaacagaagaacccggcaggatgagcctgccctgttcgtggccctgaccttcgagcggcgggaggtcctggactcctccaatatcaaaccaatgaacctgatcggcgtggcaagaggcgaaaacatccccgccgtgatcgccctgaccgaccccgagggctgcccactgagccggtttaaggatagcctgggaaacccaacccacatcctgagaatcggcgagagctataaggagaagcagcggaccatccaggccaagaaggaggtggagcagcggagagccggcggctacagccggaagtacgccagcaaagccaagaatctggcagacgatatggtgagaaacaccgctagagatctgctgtactacgccgtgacccaggatgccatgctgatcttcgccaacctgagccggggcttcggccggcagggcaagcggaccttcatggccgagagacagtacacacggatggaggactggctgaccgccaagctggcctacgagggcctgagcaagacctacctgtccaagacactggcccagtacacctccaagacatgcagcaactgtgggtttaccatcaccagcgccgactacgacagggtgctggagaagctgaagaagacagcaacaggctggatgaccacaattaacggcaaggagctgaaggtggagggccagattacctactacaacagatacaagagacagaacgtagtcaaggacctgtccgtcgagctggatagactgagcgaagaatctgtgaacaacgacatctcctcctggacaaagggcagaagcggagaagctctgagcctcctgaagaaaagattctcccatagacccgtgcaggagaagttcgtgtgcctgaactgcggcttcgagacacacgcagccgagcaagccgccctgaacatcgccagatcctggctgttcctgcggagccaggagtacaagaaataccagacaaacaagacaaccggcaacaccgataagagagccttcgtcgagacctggcagtccttttaccggaagaagcttaaggaggtgtggaaacctgccgtgcggtctggcggatctggcggaggctccacaagcatgcaggtgaagttcgaggacgtggccgtgagcttcagccaggaggagtgggagtacctggacgagggccagaaggagctgtacagggaggtgatgaaggagaactacgagaccctgctgagcctgggcctgaagtgcctgcagaagatccacgagagcgacaggcccttcacctaccccgcctgcggcaagagcttcaaccaccagagcaacctgaggaagcacaagaggaaccacaccggcaccagccccaagaaaaagagaaaagtctaagctgccttctgcggggcttgccttctggccatgcccttcttctctcccttgcacctgtacctcttggtctttgaataaagcctgagtaggaaggctagcaaaaaaaaaaaaaaaaaaaaaaaaaaaaaaaaaaaaaaaaaaaaaaaaaaaaaaaaaaaaaaaaaaaaaaaaaaaaaaaa

SEQ ID NO: 6386 - RNA, 5797 nt, synthetic construct
  source 1..5797: mol_type = other RNA
aggaaataagagagaaaagaagagtaagaagaaatataagagccaccatggcccctaagaagaagcgtaaagtgagccggatggaacgcctcgtctacgaggtgcggcagaagtgcagaaacatcgaggacatctgcatctcctgcggatctctgaacgtgaccctggagcacccactgttcatcggcggcatgtgccagaactgtaaaaactgttttctggagtgtgcctatcaatacgacgatgacggctaccagagctactgcaccatctgttgcggcggaagagaggtgctgatgtgtggaaataacaactgctgccggtgcttctgcgtggaatgcgtggacctgctggtgggccccggcgccgcccaggccgctattaaggaagatccttggaactgctacatgtgcggccacaagggcacatacggcctgctgagacggagagaggactggcctagcagactgcagatgttcttcgccaataaccacgaccaggagttcgacccccctaaggtgtaccctcccgtccccgccgagaagagaaagcccatccgggtcctgagcctgttcgatggcatcgccaccggtctgctggtgctgaaggacctgggcatccaggtggataggtacattgcctccgaggtgtgcgaggactccatcaccgtgggaatggtgcgtcatcagggcaagatcatgtacgtgggcgacgtgcggagcgtgacacagaagcatatccaggagtggggccctttcgacctggtgatcggcggcagcccttgcaatgacctgagcatcgtgaacccagcccggaagggcctgtacgagggaaccggcagactgttcttcgagttttacagactgctgcacgacgcccggcctaaggaaggcgacgaccggcccttcttttggctgttcgagaatgtggtggccatgggagtcagcgacaagcgggatattagccggttcctggagagcaaccccgtgatgatcgatgccaaggaagtgagcgccgcccaccgggccagatacttctggggcaatctgcctggcatgaacagacccctggccagcaccgtgaacgacaagctggagctgcaggagtgcctggagcacggccggatcgccaagttcagcaaggtgagaaccatcaccacccgaagcaacagcatcaaacaaggcaaggaccagcactttcctgtgttcatgaacgagaaggaggacatcctgtggtgtaccgagatggagagagtgttcgggttcccagtccactacacagatgtcagcaacatgtctagactggccagacagagactgctgggaagaagctggtccgtccctgtgatcagacacctgttcgcccctctgaaggagtacttcgcctgcgtgagcagcggcaacagcaacgccaacagccggggccccagcttctctagcggcctggtgccactgtccctgagagggagccacatgggccccatggagatctacaaaaccgtgagcgcctggaagcggcagcctgtgcgcgtgctgagcctgtttcggaatatcgataaagtcctgaaaagcctgggattcctggagagcggctctggctccggcggtggcaccctgaagtacgtggaggatgtgacaaacgtggtcagacgggatgtggagaagtggggccccttcgatctggtgtacggcagcacccaacccctgggcagctcttgtgaccggtgccctggctggtacatgtttcagttccaccggatcctgcagtacgccctgccgagacaggagtcccagcggccattcttttggattttcatggacaacttgctgctgaccgaggatgaccaggaaactaccactcggttcctgcagaccgaagccgtgaccctgcaggacgtgagaggccgggactaccagaacgccatgcgggtgtggtccaacatccctggactgaaaagcaagcacgcacctctgacccctaaagaagaggagtacctgcaggcccaggtgcggagcagaagcaagctggacgcccctaaggtggatctgctggtgaagaattgcctcctgcccctgagagagtacttcaagtatttcagccagaatagtctgcccctgggcggcccaagcagcggcgcccctcctcccagcggcggcagcccagccggctccccaacctctaccgaggagggcacctctgagtccgccacccccgagagcggccctggcacctccaccgagcccagcgagggcagcgcacccggcagccctgccggcagccccacctccacagaggagggaaccagcaccgagcccagcgaaggcagcgccccaggcaccagcaccgagcctagtgagggcggctctggcggcggcagcgcccaggagattaaacggatcaacaagatcagaagaagacttgtgaaagacagcaacaccaagaaggccggcaagacaggccccatgaaaaccctgctggttagagtgatgacacccgatctgagagagcggctggaaaacctgagaaagaagcctgaaaatatcccccagcccatcagcaatacatctagagccaacctgaataagctgctgaccgattacaccgaaatgaagaaggcgatcctgcatgtgtactgggaagagttccagaaggaccctgtgggcctgatgagccgggtggcccagcctgccagcaagaagatcgatcagaacaagctgaaacctgagatggacgagaagggcaacctgaccaccgccggctttgcctgctctcagtgtggccagcccctgttcgtgtacaagctggagcaggtgtctgagaagggcaaggcttacaccaactacttcggacggtgcaatgtggccgagcacgaaaagctgatcctgctggcccagctgaagcccgagaaggatagcgacgaagccgtgacatatagcctgggaaagtttgggcagagggccctggatttctacagcattcatgtgaccaaggagtccacccaccccgtgaagcccctggcccagatcgccggaaacagatacgcctccggacctgtgggaaaggccctgagcgacgcatgtatgggcacaatcgcctccttcctgtctaagtaccaggacatcatcatcgaacaccagaaggtggtgaagggcaaccagaagagactggagagcctgcgggagctggccggcaaggaaaacctggaataccctagcgtgaccctgccacctcagcctcacaccaaggagggcgttgatgcctacaacgaagtgatcgcccgggtgcgaatgtgggtgaacctgaacctgtggcagaagctgaagctaagcagagatgatgccaagcctctgctgagactgaagggattcccttcctttcctctggtcgagagacaggccaacgaagtggactggtgggacatggtgtgtaacgtgaagaagctgatcaacgagaaaaaggaggatggcaaggtgttttggcagaatctggctggctacaagagacaggaagccctgagaccatacctgagcagcgaggaagatcggaagaagggaaagaaattcgctcggtaccagctgggcgacctgctgctgcacctggaaaagaagcacggcgaggactggggaaaggtgtacgacgaggcctgggagcggattgacaagaaagtggaaggcctgagcaagcacatcaagctggaagaggaacggagaagcgaggacgcccagagcaaggccgccctgaccgactggctgcgggctaaggccagcttcgtgatcgagggcctgaaggaggccgacaaggacgagttctgcagatgcgagctgaagctgcagaagtggtacggggacctgcggggaaagcccttcgccatcgaagccgagaacagcatcctggacatcagcggcttcagcaagcagtacaactgtgccttcatctggcagaaggacggcgtgaagaagctgaacctgtacctgatcatcaactacttcaagggcggcaagctgcggttcaagaagatcaaacctgaagccttcgaagccaacagattctacaccgtgatcaacaaaaagagcggcgagatcgtgcccatggaggtgaacttcaacttcgacgaccccaacctgatcatcctgcctctggcctttggcaagagacagggcagagaattcatctggaacgacctgctgtccctggaaaccggcagcctgaagctggccaacggaagagtgatcgagaagacactgtacaacagaagaacccggcaggatgagcctgccctgttcgtggccctgaccttcgagcggcgggaggtcctggactcctccaatatcaaaccaatgaacctgatcggcgtggcaagaggcgaaaacatccccgccgtgatcgccctgaccgaccccgagggctgcccactgagccggtttaaggatagcctgggaaacccaacccacatcctgagaatcggcgagagctataaggagaagcagcggaccatccaggccaagaaggaggtggagcagcggagagccggcggctacagccggaagtacgccagcaaagccaagaatctggcagacgatatggtgagaaacaccgctagagatctgctgtactacgccgtgacccaggatgccatgctgatcttcgccaacctgagccggggcttcggccggcagggcaagcggaccttcatggccgagagacagtacacacggatggaggactggctgaccgccaagctggcctacgagggcctgagcaagacctacctgtccaagacactggcccagtacacctccaagacatgcagcaactgtgggtttaccatcaccagcgccgactacgacagggtgctggagaagctgaagaagacagcaacaggctggatgaccacaattaacggcaaggagctgaaggtggagggccagattacctactacaacagatacaagagacagaacgtagtcaaggacctgtccgtcgagctggatagactgagcgaagaatctgtgaacaacgacatctcctcctggacaaagggcagaagcggagaagctctgagcctcctgaagaaaagattctcccatagacccgtgcaggagaagttcgtgtgcctgaactgcggcttcgagacacacgcagccgagcaagccgccctgaacatcgccagatcctggctgttcctgcggagccaggagtacaagaaataccagacaaacaagacaaccggcaacaccgataagagagccttcgtcgagacctggcagtccttttaccggaagaagcttaaggaggtgtggaaacctgccgtgcggtctggcggatctggcggaggctccacaagcaggaagaggggcagcctgaccctggaggacgtggccgtggacttcacctgggaggagtggcagctgctggcccccgcccagaaggccctgtacagggacgtgatgctggagaactacggcaacctggtgttcgtgggctaccaggccagcaagcccgccgccctgagcaggctggagaggggcgagccctggcccgtggaggacgaggtgcacagccagctgtgccccgagatgaggaaggacaccagccccaagaaaaagagaaaagtctaagctgccttctgcggggcttgccttctggccatgcccttcttctctcccttgcacctgtacctcttggtctttgaataaagcctgagtaggaaggctagcaaaaaaaaaaaaaaaaaaaaaaaaaaaaaaaaaaaaaaaaaaaaaaaaaaaaaaaaaaaaaaaaaaaaaaaaaaaaaaaa

SEQ ID NO: 6387 - RNA, 5797 nt, synthetic construct
  source 1..5797: mol_type = other RNA
aggaaataagagagaaaagaagagtaagaagaaatataagagccaccatggcccctaagaagaagcgtaaagtgagccggatggaacgcctcgtctacgaggtgcggcagaagtgcagaaacatcgaggacatctgcatctcctgcggatctctgaacgtgaccctggagcacccactgttcatcggcggcatgtgccagaactgtaaaaactgttttctggagtgtgcctatcaatacgacgatgacggctaccagagctactgcaccatctgttgcggcggaagagaggtgctgatgtgtggaaataacaactgctgccggtgcttctgcgtggaatgcgtggacctgctggtgggccccggcgccgcccaggccgctattaaggaagatccttggaactgctacatgtgcggccacaagggcacatacggcctgctgagacggagagaggactggcctagcagactgcagatgttcttcgccaataaccacgaccaggagttcgacccccctaaggtgtaccctcccgtccccgccgagaagagaaagcccatccgggtcctgagcctgttcgatggcatcgccaccggtctgctggtgctgaaggacctgggcatccaggtggataggtacattgcctccgaggtgtgcgaggactccatcaccgtgggaatggtgcgtcatcagggcaagatcatgtacgtgggcgacgtgcggagcgtgacacagaagcatatccaggagtggggccctttcgacctggtgatcggcggcagcccttgcaatgacctgagcatcgtgaacccagcccggaagggcctgtacgagggaaccggcagactgttcttcgagttttacagactgctgcacgacgcccggcctaaggaaggcgacgaccggcccttcttttggctgttcgagaatgtggtggccatgggagtcagcgacaagcgggatattagccggttcctggagagcaaccccgtgatgatcgatgccaaggaagtgagcgccgcccaccgggccagatacttctggggcaatctgcctggcatgaacagacccctggccagcaccgtgaacgacaagctggagctgcaggagtgcctggagcacggccggatcgccaagttcagcaaggtgagaaccatcaccacccgaagcaacagcatcaaacaaggcaaggaccagcactttcctgtgttcatgaacgagaaggaggacatcctgtggtgtaccgagatggagagagtgttcgggttcccagtccactacacagatgtcagcaacatgtctagactggccagacagagactgctgggaagaagctggtccgtccctgtgatcagacacctgttcgcccctctgaaggagtacttcgcctgcgtgagcagcggcaacagcaacgccaacagccggggccccagcttctctagcggcctggtgccactgtccctgagagggagccacatgggccccatggagatctacaaaaccgtgagcgcctggaagcggcagcctgtgcgcgtgctgagcctgtttcggaatatcgataaagtcctgaaaagcctgggattcctggagagcggctctggctccggcggtggcaccctgaagtacgtggaggatgtgacaaacgtggtcagacgggatgtggagaagtggggccccttcgatctggtgtacggcagcacccaacccctgggcagctcttgtgaccggtgccctggctggtacatgtttcagttccaccggatcctgcagtacgccctgccgagacaggagtcccagcggccattcttttggattttcatggacaacttgctgctgaccgaggatgaccaggaaactaccactcggttcctgcagaccgaagccgtgaccctgcaggacgtgagaggccgggactaccagaacgccatgcgggtgtggtccaacatccctggactgaaaagcaagcacgcacctctgacccctaaagaagaggagtacctgcaggcccaggtgcggagcagaagcaagctggacgcccctaaggtggatctgctggtgaagaattgcctcctgcccctgagagagtacttcaagtatttcagccagaatagtctgcccctgggcggcccaagcagcggcgcccctcctcccagcggcggcagcccagccggctccccaacctctaccgaggagggcacctctgagtccgccacccccgagagcggccctggcacctccaccgagcccagcgagggcagcgcacccggcagccctgccggcagccccacctccacagaggagggaaccagcaccgagcccagcgaaggcagcgccccaggcaccagcaccgagcctagtgagggcggctctggcggcggcagcgcccaggagattaaacggatcaacaagatcagaagaagacttgtgaaagacagcaacaccaagaaggccggcaagacaggccccatgaaaaccctgctggttagagtgatgacacccgatctgagagagcggctggaaaacctgagaaagaagcctgaaaatatcccccagcccatcagcaatacatctagagccaacctgaataagctgctgaccgattacaccgaaatgaagaaggcgatcctgcatgtgtactgggaagagttccagaaggaccctgtgggcctgatgagccgggtggcccagcctgccagcaagaagatcgatcagaacaagctgaaacctgagatggacgagaagggcaacctgaccaccgccggctttgcctgctctcagtgtggccagcccctgttcgtgtacaagctggagcaggtgtctgagaagggcaaggcttacaccaactacttcggacggtgcaatgtggccgagcacgaaaagctgatcctgctggcccagctgaagcccgagaaggatagcgacgaagccgtgacatatagcctgggaaagtttgggcagagggccctggatttctacagcattcatgtgaccaaggagtccacccaccccgtgaagcccctggcccagatcgccggaaacagatacgcctccggacctgtgggaaaggccctgagcgacgcatgtatgggcacaatcgcctccttcctgtctaagtaccaggacatcatcatcgaacaccagaaggtggtgaagggcaaccagaagagactggagagcctgcgggagctggccggcaaggaaaacctggaataccctagcgtgaccctgccacctcagcctcacaccaaggagggcgttgatgcctacaacgaagtgatcgcccgggtgcgaatgtgggtgaacctgaacctgtggcagaagctgaagctaagcagagatgatgccaagcctctgctgagactgaagggattcccttcctttcctctggtcgagagacaggccaacgaagtggactggtgggacatggtgtgtaacgtgaagaagctgatcaacgagaaaaaggaggatggcaaggtgttttggcagaatctggctggctacaagagacaggaagccctgagaccatacctgagcagcgaggaagatcggaagaagggaaagaaattcgctcggtaccagctgggcgacctgctgctgcacctggaaaagaagcacggcgaggactggggaaaggtgtacgacgaggcctgggagcggattgacaagaaagtggaaggcctgagcaagcacatcaagctggaagaggaacggagaagcgaggacgcccagagcaaggccgccctgaccgactggctgcgggctaaggccagcttcgtgatcgagggcctgaaggaggccgacaaggacgagttctgcagatgcgagctgaagctgcagaagtggtacggggacctgcggggaaagcccttcgccatcgaagccgagaacagcatcctggacatcagcggcttcagcaagcagtacaactgtgccttcatctggcagaaggacggcgtgaagaagctgaacctgtacctgatcatcaactacttcaagggcggcaagctgcggttcaagaagatcaaacctgaagccttcgaagccaacagattctacaccgtgatcaacaaaaagagcggcgagatcgtgcccatggaggtgaacttcaacttcgacgaccccaacctgatcatcctgcctctggcctttggcaagagacagggcagagaattcatctggaacgacctgctgtccctggaaaccggcagcctgaagctggccaacggaagagtgatcgagaagacactgtacaacagaagaacccggcaggatgagcctgccctgttcgtggccctgaccttcgagcggcgggaggtcctggactcctccaatatcaaaccaatgaacctgatcggcgtggcaagaggcgaaaacatccccgccgtgatcgccctgaccgaccccgagggctgcccactgagccggtttaaggatagcctgggaaacccaacccacatcctgagaatcggcgagagctataaggagaagcagcggaccatccaggccaagaaggaggtggagcagcggagagccggcggctacagccggaagtacgccagcaaagccaagaatctggcagacgatatggtgagaaacaccgctagagatctgctgtactacgccgtgacccaggatgccatgctgatcttcgccaacctgagccggggcttcggccggcagggcaagcggaccttcatggccgagagacagtacacacggatggaggactggctgaccgccaagctggcctacgagggcctgagcaagacctacctgtccaagacactggcccagtacacctccaagacatgcagcaactgtgggtttaccatcaccagcgccgactacgacagggtgctggagaagctgaagaagacagcaacaggctggatgaccacaattaacggcaaggagctgaaggtggagggccagattacctactacaacagatacaagagacagaacgtagtcaaggacctgtccgtcgagctggatagactgagcgaagaatctgtgaacaacgacatctcctcctggacaaagggcagaagcggagaagctctgagcctcctgaagaaaagattctcccatagacccgtgcaggagaagttcgtgtgcctgaactgcggcttcgagacacacgcagccgagcaagccgccctgaacatcgccagatcctggctgttcctgcggagccaggagtacaagaaataccagacaaacaagacaaccggcaacaccgataagagagccttcgtcgagacctggcagtccttttaccggaagaagcttaaggaggtgtggaaacctgccgtgcggtctggcggatctggcggaggctccacaagcagcatgggcagcgacctgttcagggacgtggccgtggtgttcagcagggaggagtgggagaggctggcccccgcccagagggacctgtacagggacgtgatgctggagacctacagccacctgaggagcctggacctggccatcagcaagcccgacgtgatcgccttcctggagcagggcgaggagccctggagggccgaggaggccgccagggacggcctgtgccccgtggactgggagtgcaccagccccaagaaaaagagaaaagtctaagctgccttctgcggggcttgccttctggccatgcccttcttctctcccttgcacctgtacctcttggtctttgaataaagcctgagtaggaaggctagcaaaaaaaaaaaaaaaaaaaaaaaaaaaaaaaaaaaaaaaaaaaaaaaaaaaaaaaaaaaaaaaaaaaaaaaaaaaaaaaa

SEQ ID NO: 6388 - RNA, 5797 nt, synthetic construct
  source 1..5797: mol_type = other RNA
aggaaataagagagaaaagaagagtaagaagaaatataagagccaccatggcccctaagaagaagcgtaaagtgagccggatggaacgcctcgtctacgaggtgcggcagaagtgcagaaacatcgaggacatctgcatctcctgcggatctctgaacgtgaccctggagcacccactgttcatcggcggcatgtgccagaactgtaaaaactgttttctggagtgtgcctatcaatacgacgatgacggctaccagagctactgcaccatctgttgcggcggaagagaggtgctgatgtgtggaaataacaactgctgccggtgcttctgcgtggaatgcgtggacctgctggtgggccccggcgccgcccaggccgctattaaggaagatccttggaactgctacatgtgcggccacaagggcacatacggcctgctgagacggagagaggactggcctagcagactgcagatgttcttcgccaataaccacgaccaggagttcgacccccctaaggtgtaccctcccgtccccgccgagaagagaaagcccatccgggtcctgagcctgttcgatggcatcgccaccggtctgctggtgctgaaggacctgggcatccaggtggataggtacattgcctccgaggtgtgcgaggactccatcaccgtgggaatggtgcgtcatcagggcaagatcatgtacgtgggcgacgtgcggagcgtgacacagaagcatatccaggagtggggccctttcgacctggtgatcggcggcagcccttgcaatgacctgagcatcgtgaacccagcccggaagggcctgtacgagggaaccggcagactgttcttcgagttttacagactgctgcacgacgcccggcctaaggaaggcgacgaccggcccttcttttggctgttcgagaatgtggtggccatgggagtcagcgacaagcgggatattagccggttcctggagagcaaccccgtgatgatcgatgccaaggaagtgagcgccgcccaccgggccagatacttctggggcaatctgcctggcatgaacagacccctggccagcaccgtgaacgacaagctggagctgcaggagtgcctggagcacggccggatcgccaagttcagcaaggtgagaaccatcaccacccgaagcaacagcatcaaacaaggcaaggaccagcactttcctgtgttcatgaacgagaaggaggacatcctgtggtgtaccgagatggagagagtgttcgggttcccagtccactacacagatgtcagcaacatgtctagactggccagacagagactgctgggaagaagctggtccgtccctgtgatcagacacctgttcgcccctctgaaggagtacttcgcctgcgtgagcagcggcaacagcaacgccaacagccggggccccagcttctctagcggcctggtgccactgtccctgagagggagccacatgggccccatggagatctacaaaaccgtgagcgcctggaagcggcagcctgtgcgcgtgctgagcctgtttcggaatatcgataaagtcctgaaaagcctgggattcctggagagcggctctggctccggcggtggcaccctgaagtacgtggaggatgtgacaaacgtggtcagacgggatgtggagaagtggggccccttcgatctggtgtacggcagcacccaacccctgggcagctcttgtgaccggtgccctggctggtacatgtttcagttccaccggatcctgcagtacgccctgccgagacaggagtcccagcggccattcttttggattttcatggacaacttgctgctgaccgaggatgaccaggaaactaccactcggttcctgcagaccgaagccgtgaccctgcaggacgtgagaggccgggactaccagaacgccatgcgggtgtggtccaacatccctggactgaaaagcaagcacgcacctctgacccctaaagaagaggagtacctgcaggcccaggtgcggagcagaagcaagctggacgcccctaaggtggatctgctggtgaagaattgcctcctgcccctgagagagtacttcaagtatttcagccagaatagtctgcccctgggcggcccaagcagcggcgcccctcctcccagcggcggcagcccagccggctccccaacctctaccgaggagggcacctctgagtccgccacccccgagagcggccctggcacctccaccgagcccagcgagggcagcgcacccggcagccctgccggcagccccacctccacagaggagggaaccagcaccgagcccagcgaaggcagcgccccaggcaccagcaccgagcctagtgagggcggctctggcggcggcagcgcccaggagattaaacggatcaacaagatcagaagaagacttgtgaaagacagcaacaccaagaaggccggcaagacaggccccatgaaaaccctgctggttagagtgatgacacccgatctgagagagcggctggaaaacctgagaaagaagcctgaaaatatcccccagcccatcagcaatacatctagagccaacctgaataagctgctgaccgattacaccgaaatgaagaaggcgatcctgcatgtgtactgggaagagttccagaaggaccctgtgggcctgatgagccgggtggcccagcctgccagcaagaagatcgatcagaacaagctgaaacctgagatggacgagaagggcaacctgaccaccgccggctttgcctgctctcagtgtggccagcccctgttcgtgtacaagctggagcaggtgtctgagaagggcaaggcttacaccaactacttcggacggtgcaatgtggccgagcacgaaaagctgatcctgctggcccagctgaagcccgagaaggatagcgacgaagccgtgacatatagcctgggaaagtttgggcagagggccctggatttctacagcattcatgtgaccaaggagtccacccaccccgtgaagcccctggcccagatcgccggaaacagatacgcctccggacctgtgggaaaggccctgagcgacgcatgtatgggcacaatcgcctccttcctgtctaagtaccaggacatcatcatcgaacaccagaaggtggtgaagggcaaccagaagagactggagagcctgcgggagctggccggcaaggaaaacctggaataccctagcgtgaccctgccacctcagcctcacaccaaggagggcgttgatgcctacaacgaagtgatcgcccgggtgcgaatgtgggtgaacctgaacctgtggcagaagctgaagctaagcagagatgatgccaagcctctgctgagactgaagggattcccttcctttcctctggtcgagagacaggccaacgaagtggactggtgggacatggtgtgtaacgtgaagaagctgatcaacgagaaaaaggaggatggcaaggtgttttggcagaatctggctggctacaagagacaggaagccctgagaccatacctgagcagcgaggaagatcggaagaagggaaagaaattcgctcggtaccagctgggcgacctgctgctgcacctggaaaagaagcacggcgaggactggggaaaggtgtacgacgaggcctgggagcggattgacaagaaagtggaaggcctgagcaagcacatcaagctggaagaggaacggagaagcgaggacgcccagagcaaggccgccctgaccgactggctgcgggctaaggccagcttcgtgatcgagggcctgaaggaggccgacaaggacgagttctgcagatgcgagctgaagctgcagaagtggtacggggacctgcggggaaagcccttcgccatcgaagccgagaacagcatcctggacatcagcggcttcagcaagcagtacaactgtgccttcatctggcagaaggacggcgtgaagaagctgaacctgtacctgatcatcaactacttcaagggcggcaagctgcggttcaagaagatcaaacctgaagccttcgaagccaacagattctacaccgtgatcaacaaaaagagcggcgagatcgtgcccatggaggtgaacttcaacttcgacgaccccaacctgatcatcctgcctctggcctttggcaagagacagggcagagaattcatctggaacgacctgctgtccctggaaaccggcagcctgaagctggccaacggaagagtgatcgagaagacactgtacaacagaagaacccggcaggatgagcctgccctgttcgtggccctgaccttcgagcggcgggaggtcctggactcctccaatatcaaaccaatgaacctgatcggcgtggcaagaggcgaaaacatccccgccgtgatcgccctgaccgaccccgagggctgcccactgagccggtttaaggatagcctgggaaacccaacccacatcctgagaatcggcgagagctataaggagaagcagcggaccatccaggccaagaaggaggtggagcagcggagagccggcggctacagccggaagtacgccagcaaagccaagaatctggcagacgatatggtgagaaacaccgctagagatctgctgtactacgccgtgacccaggatgccatgctgatcttcgccaacctgagccggggcttcggccggcagggcaagcggaccttcatggccgagagacagtacacacggatggaggactggctgaccgccaagctggcctacgagggcctgagcaagacctacctgtccaagacactggcccagtacacctccaagacatgcagcaactgtgggtttaccatcaccagcgccgactacgacagggtgctggagaagctgaagaagacagcaacaggctggatgaccacaattaacggcaaggagctgaaggtggagggccagattacctactacaacagatacaagagacagaacgtagtcaaggacctgtccgtcgagctggatagactgagcgaagaatctgtgaacaacgacatctcctcctggacaaagggcagaagcggagaagctctgagcctcctgaagaaaagattctcccatagacccgtgcaggagaagttcgtgtgcctgaactgcggcttcgagacacacgcagccgagcaagccgccctgaacatcgccagatcctggctgttcctgcggagccaggagtacaagaaataccagacaaacaagacaaccggcaacaccgataagagagccttcgtcgagacctggcagtccttttaccggaagaagcttaaggaggtgtggaaacctgccgtgcggtctggcggatctggcggaggctccacaagcggcagcgtgagcttcgacgaggtgagcgtgaggttcagcaacgaggagtgggccctgctggaccccggccagagggccctgtacgaggaggtgatggaggagatcagggagatgatgaccagcgtgggcgacgtgagcgagttcctgaccgagggcgagcagagcgagcccagcagggagggcgccgaggagcagaaggagcagaggaagcagagggtgcaggtgggcacctacaggaaggagaccagccccaagaaaaagagaaaagtctaagctgccttctgcggggcttgccttctggccatgcccttcttctctcccttgcacctgtacctcttggtctttgaataaagcctgagtaggaaggctagcaaaaaaaaaaaaaaaaaaaaaaaaaaaaaaaaaaaaaaaaaaaaaaaaaaaaaaaaaaaaaaaaaaaaaaaaaaaaaaaa

SEQ ID NO: 6389 - RNA, 5797 nt, synthetic construct
  source 1..5797: mol_type = other RNA
aggaaataagagagaaaagaagagtaagaagaaatataagagccaccatggcccctaagaagaagcgtaaagtgagccggatggaacgcctcgtctacgaggtgcggcagaagtgcagaaacatcgaggacatctgcatctcctgcggatctctgaacgtgaccctggagcacccactgttcatcggcggcatgtgccagaactgtaaaaactgttttctggagtgtgcctatcaatacgacgatgacggctaccagagctactgcaccatctgttgcggcggaagagaggtgctgatgtgtggaaataacaactgctgccggtgcttctgcgtggaatgcgtggacctgctggtgggccccggcgccgcccaggccgctattaaggaagatccttggaactgctacatgtgcggccacaagggcacatacggcctgctgagacggagagaggactggcctagcagactgcagatgttcttcgccaataaccacgaccaggagttcgacccccctaaggtgtaccctcccgtccccgccgagaagagaaagcccatccgggtcctgagcctgttcgatggcatcgccaccggtctgctggtgctgaaggacctgggcatccaggtggataggtacattgcctccgaggtgtgcgaggactccatcaccgtgggaatggtgcgtcatcagggcaagatcatgtacgtgggcgacgtgcggagcgtgacacagaagcatatccaggagtggggccctttcgacctggtgatcggcggcagcccttgcaatgacctgagcatcgtgaacccagcccggaagggcctgtacgagggaaccggcagactgttcttcgagttttacagactgctgcacgacgcccggcctaaggaaggcgacgaccggcccttcttttggctgttcgagaatgtggtggccatgggagtcagcgacaagcgggatattagccggttcctggagagcaaccccgtgatgatcgatgccaaggaagtgagcgccgcccaccgggccagatacttctggggcaatctgcctggcatgaacagacccctggccagcaccgtgaacgacaagctggagctgcaggagtgcctggagcacggccggatcgccaagttcagcaaggtgagaaccatcaccacccgaagcaacagcatcaaacaaggcaaggaccagcactttcctgtgttcatgaacgagaaggaggacatcctgtggtgtaccgagatggagagagtgttcgggttcccagtccactacacagatgtcagcaacatgtctagactggccagacagagactgctgggaagaagctggtccgtccctgtgatcagacacctgttcgcccctctgaaggagtacttcgcctgcgtgagcagcggcaacagcaacgccaacagccggggccccagcttctctagcggcctggtgccactgtccctgagagggagccacatgggccccatggagatctacaaaaccgtgagcgcctggaagcggcagcctgtgcgcgtgctgagcctgtttcggaatatcgataaagtcctgaaaagcctgggattcctggagagcggctctggctccggcggtggcaccctgaagtacgtggaggatgtgacaaacgtggtcagacgggatgtggagaagtggggccccttcgatctggtgtacggcagcacccaacccctgggcagctcttgtgaccggtgccctggctggtacatgtttcagttccaccggatcctgcagtacgccctgccgagacaggagtcccagcggccattcttttggattttcatggacaacttgctgctgaccgaggatgaccaggaaactaccactcggttcctgcagaccgaagccgtgaccctgcaggacgtgagaggccgggactaccagaacgccatgcgggtgtggtccaacatccctggactgaaaagcaagcacgcacctctgacccctaaagaagaggagtacctgcaggcccaggtgcggagcagaagcaagctggacgcccctaaggtggatctgctggtgaagaattgcctcctgcccctgagagagtacttcaagtatttcagccagaatagtctgcccctgggcggcccaagcagcggcgcccctcctcccagcggcggcagcccagccggctccccaacctctaccgaggagggcacctctgagtccgccacccccgagagcggccctggcacctccaccgagcccagcgagggcagcgcacccggcagccctgccggcagccccacctccacagaggagggaaccagcaccgagcccagcgaaggcagcgccccaggcaccagcaccgagcctagtgagggcggctctggcggcggcagcgcccaggagattaaacggatcaacaagatcagaagaagacttgtgaaagacagcaacaccaagaaggccggcaagacaggccccatgaaaaccctgctggttagagtgatgacacccgatctgagagagcggctggaaaacctgagaaagaagcctgaaaatatcccccagcccatcagcaatacatctagagccaacctgaataagctgctgaccgattacaccgaaatgaagaaggcgatcctgcatgtgtactgggaagagttccagaaggaccctgtgggcctgatgagccgggtggcccagcctgccagcaagaagatcgatcagaacaagctgaaacctgagatggacgagaagggcaacctgaccaccgccggctttgcctgctctcagtgtggccagcccctgttcgtgtacaagctggagcaggtgtctgagaagggcaaggcttacaccaactacttcggacggtgcaatgtggccgagcacgaaaagctgatcctgctggcccagctgaagcccgagaaggatagcgacgaagccgtgacatatagcctgggaaagtttgggcagagggccctggatttctacagcattcatgtgaccaaggagtccacccaccccgtgaagcccctggcccagatcgccggaaacagatacgcctccggacctgtgggaaaggccctgagcgacgcatgtatgggcacaatcgcctccttcctgtctaagtaccaggacatcatcatcgaacaccagaaggtggtgaagggcaaccagaagagactggagagcctgcgggagctggccggcaaggaaaacctggaataccctagcgtgaccctgccacctcagcctcacaccaaggagggcgttgatgcctacaacgaagtgatcgcccgggtgcgaatgtgggtgaacctgaacctgtggcagaagctgaagctaagcagagatgatgccaagcctctgctgagactgaagggattcccttcctttcctctggtcgagagacaggccaacgaagtggactggtgggacatggtgtgtaacgtgaagaagctgatcaacgagaaaaaggaggatggcaaggtgttttggcagaatctggctggctacaagagacaggaagccctgagaccatacctgagcagcgaggaagatcggaagaagggaaagaaattcgctcggtaccagctgggcgacctgctgctgcacctggaaaagaagcacggcgaggactggggaaaggtgtacgacgaggcctgggagcggattgacaagaaagtggaaggcctgagcaagcacatcaagctggaagaggaacggagaagcgaggacgcccagagcaaggccgccctgaccgactggctgcgggctaaggccagcttcgtgatcgagggcctgaaggaggccgacaaggacgagttctgcagatgcgagctgaagctgcagaagtggtacggggacctgcggggaaagcccttcgccatcgaagccgagaacagcatcctggacatcagcggcttcagcaagcagtacaactgtgccttcatctggcagaaggacggcgtgaagaagctgaacctgtacctgatcatcaactacttcaagggcggcaagctgcggttcaagaagatcaaacctgaagccttcgaagccaacagattctacaccgtgatcaacaaaaagagcggcgagatcgtgcccatggaggtgaacttcaacttcgacgaccccaacctgatcatcctgcctctggcctttggcaagagacagggcagagaattcatctggaacgacctgctgtccctggaaaccggcagcctgaagctggccaacggaagagtgatcgagaagacactgtacaacagaagaacccggcaggatgagcctgccctgttcgtggccctgaccttcgagcggcgggaggtcctggactcctccaatatcaaaccaatgaacctgatcggcgtggcaagaggcgaaaacatccccgccgtgatcgccctgaccgaccccgagggctgcccactgagccggtttaaggatagcctgggaaacccaacccacatcctgagaatcggcgagagctataaggagaagcagcggaccatccaggccaagaaggaggtggagcagcggagagccggcggctacagccggaagtacgccagcaaagccaagaatctggcagacgatatggtgagaaacaccgctagagatctgctgtactacgccgtgacccaggatgccatgctgatcttcgccaacctgagccggggcttcggccggcagggcaagcggaccttcatggccgagagacagtacacacggatggaggactggctgaccgccaagctggcctacgagggcctgagcaagacctacctgtccaagacactggcccagtacacctccaagacatgcagcaactgtgggtttaccatcaccagcgccgactacgacagggtgctggagaagctgaagaagacagcaacaggctggatgaccacaattaacggcaaggagctgaaggtggagggccagattacctactacaacagatacaagagacagaacgtagtcaaggacctgtccgtcgagctggatagactgagcgaagaatctgtgaacaacgacatctcctcctggacaaagggcagaagcggagaagctctgagcctcctgaagaaaagattctcccatagacccgtgcaggagaagttcgtgtgcctgaactgcggcttcgagacacacgcagccgagcaagccgccctgaacatcgccagatcctggctgttcctgcggagccaggagtacaagaaataccagacaaacaagacaaccggcaacaccgataagagagccttcgtcgagacctggcagtccttttaccggaagaagcttaaggaggtgtggaaacctgccgtgcggtctggcggatctggcggaggctccacaagcttccaggaggccgtgaccttcaaggacgtggccgtggtgttcagcgaggaggagctgggcctgctggaccccgcccagaggaagctgtacagggacgtgatgctggagaacttcaggaacctggtgagcgtgggccacagcagcagcaagcccgacatgatcagccagctggagagggaggagaagctgtgcgtgaaggagatccacaccgagaggggcggcaggaaccccaacgaggccgagaccagccccaagaaaaagagaaaagtctaagctgccttctgcggggcttgccttctggccatgcccttcttctctcccttgcacctgtacctcttggtctttgaataaagcctgagtaggaaggctagcaaaaaaaaaaaaaaaaaaaaaaaaaaaaaaaaaaaaaaaaaaaaaaaaaaaaaaaaaaaaaaaaaaaaaaaaaaaaaaaa

SEQ ID NO: 6390 - RNA, 5797 nt, synthetic construct
  source 1..5797: mol_type = other RNA
aggaaataagagagaaaagaagagtaagaagaaatataagagccaccatggcccctaagaagaagcgtaaagtgagccggatggaacgcctcgtctacgaggtgcggcagaagtgcagaaacatcgaggacatctgcatctcctgcggatctctgaacgtgaccctggagcacccactgttcatcggcggcatgtgccagaactgtaaaaactgttttctggagtgtgcctatcaatacgacgatgacggctaccagagctactgcaccatctgttgcggcggaagagaggtgctgatgtgtggaaataacaactgctgccggtgcttctgcgtggaatgcgtggacctgctggtgggccccggcgccgcccaggccgctattaaggaagatccttggaactgctacatgtgcggccacaagggcacatacggcctgctgagacggagagaggactggcctagcagactgcagatgttcttcgccaataaccacgaccaggagttcgacccccctaaggtgtaccctcccgtccccgccgagaagagaaagcccatccgggtcctgagcctgttcgatggcatcgccaccggtctgctggtgctgaaggacctgggcatccaggtggataggtacattgcctccgaggtgtgcgaggactccatcaccgtgggaatggtgcgtcatcagggcaagatcatgtacgtgggcgacgtgcggagcgtgacacagaagcatatccaggagtggggccctttcgacctggtgatcggcggcagcccttgcaatgacctgagcatcgtgaacccagcccggaagggcctgtacgagggaaccggcagactgttcttcgagttttacagactgctgcacgacgcccggcctaaggaaggcgacgaccggcccttcttttggctgttcgagaatgtggtggccatgggagtcagcgacaagcgggatattagccggttcctggagagcaaccccgtgatgatcgatgccaaggaagtgagcgccgcccaccgggccagatacttctggggcaatctgcctggcatgaacagacccctggccagcaccgtgaacgacaagctggagctgcaggagtgcctggagcacggccggatcgccaagttcagcaaggtgagaaccatcaccacccgaagcaacagcatcaaacaaggcaaggaccagcactttcctgtgttcatgaacgagaaggaggacatcctgtggtgtaccgagatggagagagtgttcgggttcccagtccactacacagatgtcagcaacatgtctagactggccagacagagactgctgggaagaagctggtccgtccctgtgatcagacacctgttcgcccctctgaaggagtacttcgcctgcgtgagcagcggcaacagcaacgccaacagccggggccccagcttctctagcggcctggtgccactgtccctgagagggagccacatgggccccatggagatctacaaaaccgtgagcgcctggaagcggcagcctgtgcgcgtgctgagcctgtttcggaatatcgataaagtcctgaaaagcctgggattcctggagagcggctctggctccggcggtggcaccctgaagtacgtggaggatgtgacaaacgtggtcagacgggatgtggagaagtggggccccttcgatctggtgtacggcagcacccaacccctgggcagctcttgtgaccggtgccctggctggtacatgtttcagttccaccggatcctgcagtacgccctgccgagacaggagtcccagcggccattcttttggattttcatggacaacttgctgctgaccgaggatgaccaggaaactaccactcggttcctgcagaccgaagccgtgaccctgcaggacgtgagaggccgggactaccagaacgccatgcgggtgtggtccaacatccctggactgaaaagcaagcacgcacctctgacccctaaagaagaggagtacctgcaggcccaggtgcggagcagaagcaagctggacgcccctaaggtggatctgctggtgaagaattgcctcctgcccctgagagagtacttcaagtatttcagccagaatagtctgcccctgggcggcccaagcagcggcgcccctcctcccagcggcggcagcccagccggctccccaacctctaccgaggagggcacctctgagtccgccacccccgagagcggccctggcacctccaccgagcccagcgagggcagcgcacccggcagccctgccggcagccccacctccacagaggagggaaccagcaccgagcccagcgaaggcagcgccccaggcaccagcaccgagcctagtgagggcggctctggcggcggcagcgcccaggagattaaacggatcaacaagatcagaagaagacttgtgaaagacagcaacaccaagaaggccggcaagacaggccccatgaaaaccctgctggttagagtgatgacacccgatctgagagagcggctggaaaacctgagaaagaagcctgaaaatatcccccagcccatcagcaatacatctagagccaacctgaataagctgctgaccgattacaccgaaatgaagaaggcgatcctgcatgtgtactgggaagagttccagaaggaccctgtgggcctgatgagccgggtggcccagcctgccagcaagaagatcgatcagaacaagctgaaacctgagatggacgagaagggcaacctgaccaccgccggctttgcctgctctcagtgtggccagcccctgttcgtgtacaagctggagcaggtgtctgagaagggcaaggcttacaccaactacttcggacggtgcaatgtggccgagcacgaaaagctgatcctgctggcccagctgaagcccgagaaggatagcgacgaagccgtgacatatagcctgggaaagtttgggcagagggccctggatttctacagcattcatgtgaccaaggagtccacccaccccgtgaagcccctggcccagatcgccggaaacagatacgcctccggacctgtgggaaaggccctgagcgacgcatgtatgggcacaatcgcctccttcctgtctaagtaccaggacatcatcatcgaacaccagaaggtggtgaagggcaaccagaagagactggagagcctgcgggagctggccggcaaggaaaacctggaataccctagcgtgaccctgccacctcagcctcacaccaaggagggcgttgatgcctacaacgaagtgatcgcccgggtgcgaatgtgggtgaacctgaacctgtggcagaagctgaagctaagcagagatgatgccaagcctctgctgagactgaagggattcccttcctttcctctggtcgagagacaggccaacgaagtggactggtgggacatggtgtgtaacgtgaagaagctgatcaacgagaaaaaggaggatggcaaggtgttttggcagaatctggctggctacaagagacaggaagccctgagaccatacctgagcagcgaggaagatcggaagaagggaaagaaattcgctcggtaccagctgggcgacctgctgctgcacctggaaaagaagcacggcgaggactggggaaaggtgtacgacgaggcctgggagcggattgacaagaaagtggaaggcctgagcaagcacatcaagctggaagaggaacggagaagcgaggacgcccagagcaaggccgccctgaccgactggctgcgggctaaggccagcttcgtgatcgagggcctgaaggaggccgacaaggacgagttctgcagatgcgagctgaagctgcagaagtggtacggggacctgcggggaaagcccttcgccatcgaagccgagaacagcatcctggacatcagcggcttcagcaagcagtacaactgtgccttcatctggcagaaggacggcgtgaagaagctgaacctgtacctgatcatcaactacttcaagggcggcaagctgcggttcaagaagatcaaacctgaagccttcgaagccaacagattctacaccgtgatcaacaaaaagagcggcgagatcgtgcccatggaggtgaacttcaacttcgacgaccccaacctgatcatcctgcctctggcctttggcaagagacagggcagagaattcatctggaacgacctgctgtccctggaaaccggcagcctgaagctggccaacggaagagtgatcgagaagacactgtacaacagaagaacccggcaggatgagcctgccctgttcgtggccctgaccttcgagcggcgggaggtcctggactcctccaatatcaaaccaatgaacctgatcggcgtggcaagaggcgaaaacatccccgccgtgatcgccctgaccgaccccgagggctgcccactgagccggtttaaggatagcctgggaaacccaacccacatcctgagaatcggcgagagctataaggagaagcagcggaccatccaggccaagaaggaggtggagcagcggagagccggcggctacagccggaagtacgccagcaaagccaagaatctggcagacgatatggtgagaaacaccgctagagatctgctgtactacgccgtgacccaggatgccatgctgatcttcgccaacctgagccggggcttcggccggcagggcaagcggaccttcatggccgagagacagtacacacggatggaggactggctgaccgccaagctggcctacgagggcctgagcaagacctacctgtccaagacactggcccagtacacctccaagacatgcagcaactgtgggtttaccatcaccagcgccgactacgacagggtgctggagaagctgaagaagacagcaacaggctggatgaccacaattaacggcaaggagctgaaggtggagggccagattacctactacaacagatacaagagacagaacgtagtcaaggacctgtccgtcgagctggatagactgagcgaagaatctgtgaacaacgacatctcctcctggacaaagggcagaagcggagaagctctgagcctcctgaagaaaagattctcccatagacccgtgcaggagaagttcgtgtgcctgaactgcggcttcgagacacacgcagccgagcaagccgccctgaacatcgccagatcctggctgttcctgcggagccaggagtacaagaaataccagacaaacaagacaaccggcaacaccgataagagagccttcgtcgagacctggcagtccttttaccggaagaagcttaaggaggtgtggaaacctgccgtgcggtctggcggatctggcggaggctccacaagcctgcaggtgagcgtgagcttcgaggacgtgaccgtgaacttcagcagggaggagtggcagaggctggaccccgcccagaggaggctgtacagggacgtgaccctggagaactacagccacctgaggagcgtgggctaccaggtgcccaagcccgaggtgatcttcaagctggagcagggcgagggcccctggaccctggagggcgagaccccccaccagagctgcagcggcgaggacatcggcaccagccccaagaaaaagagaaaagtctaagctgccttctgcggggcttgccttctggccatgcccttcttctctcccttgcacctgtacctcttggtctttgaataaagcctgagtaggaaggctagcaaaaaaaaaaaaaaaaaaaaaaaaaaaaaaaaaaaaaaaaaaaaaaaaaaaaaaaaaaaaaaaaaaaaaaaaaaaaaaaa

SEQ ID NO: 6391 - RNA, 5797 nt, synthetic construct
  source 1..5797: mol_type = other RNA
aggaaataagagagaaaagaagagtaagaagaaatataagagccaccatggcccctaagaagaagcgtaaagtgagccggatggaacgcctcgtctacgaggtgcggcagaagtgcagaaacatcgaggacatctgcatctcctgcggatctctgaacgtgaccctggagcacccactgttcatcggcggcatgtgccagaactgtaaaaactgttttctggagtgtgcctatcaatacgacgatgacggctaccagagctactgcaccatctgttgcggcggaagagaggtgctgatgtgtggaaataacaactgctgccggtgcttctgcgtggaatgcgtggacctgctggtgggccccggcgccgcccaggccgctattaaggaagatccttggaactgctacatgtgcggccacaagggcacatacggcctgctgagacggagagaggactggcctagcagactgcagatgttcttcgccaataaccacgaccaggagttcgacccccctaaggtgtaccctcccgtccccgccgagaagagaaagcccatccgggtcctgagcctgttcgatggcatcgccaccggtctgctggtgctgaaggacctgggcatccaggtggataggtacattgcctccgaggtgtgcgaggactccatcaccgtgggaatggtgcgtcatcagggcaagatcatgtacgtgggcgacgtgcggagcgtgacacagaagcatatccaggagtggggccctttcgacctggtgatcggcggcagcccttgcaatgacctgagcatcgtgaacccagcccggaagggcctgtacgagggaaccggcagactgttcttcgagttttacagactgctgcacgacgcccggcctaaggaaggcgacgaccggcccttcttttggctgttcgagaatgtggtggccatgggagtcagcgacaagcgggatattagccggttcctggagagcaaccccgtgatgatcgatgccaaggaagtgagcgccgcccaccgggccagatacttctggggcaatctgcctggcatgaacagacccctggccagcaccgtgaacgacaagctggagctgcaggagtgcctggagcacggccggatcgccaagttcagcaaggtgagaaccatcaccacccgaagcaacagcatcaaacaaggcaaggaccagcactttcctgtgttcatgaacgagaaggaggacatcctgtggtgtaccgagatggagagagtgttcgggttcccagtccactacacagatgtcagcaacatgtctagactggccagacagagactgctgggaagaagctggtccgtccctgtgatcagacacctgttcgcccctctgaaggagtacttcgcctgcgtgagcagcggcaacagcaacgccaacagccggggccccagcttctctagcggcctggtgccactgtccctgagagggagccacatgggccccatggagatctacaaaaccgtgagcgcctggaagcggcagcctgtgcgcgtgctgagcctgtttcggaatatcgataaagtcctgaaaagcctgggattcctggagagcggctctggctccggcggtggcaccctgaagtacgtggaggatgtgacaaacgtggtcagacgggatgtggagaagtggggccccttcgatctggtgtacggcagcacccaacccctgggcagctcttgtgaccggtgccctggctggtacatgtttcagttccaccggatcctgcagtacgccctgccgagacaggagtcccagcggccattcttttggattttcatggacaacttgctgctgaccgaggatgaccaggaaactaccactcggttcctgcagaccgaagccgtgaccctgcaggacgtgagaggccgggactaccagaacgccatgcgggtgtggtccaacatccctggactgaaaagcaagcacgcacctctgacccctaaagaagaggagtacctgcaggcccaggtgcggagcagaagcaagctggacgcccctaaggtggatctgctggtgaagaattgcctcctgcccctgagagagtacttcaagtatttcagccagaatagtctgcccctgggcggcccaagcagcggcgcccctcctcccagcggcggcagcccagccggctccccaacctctaccgaggagggcacctctgagtccgccacccccgagagcggccctggcacctccaccgagcccagcgagggcagcgcacccggcagccctgccggcagccccacctccacagaggagggaaccagcaccgagcccagcgaaggcagcgccccaggcaccagcaccgagcctagtgagggcggctctggcggcggcagcgcccaggagattaaacggatcaacaagatcagaagaagacttgtgaaagacagcaacaccaagaaggccggcaagacaggccccatgaaaaccctgctggttagagtgatgacacccgatctgagagagcggctggaaaacctgagaaagaagcctgaaaatatcccccagcccatcagcaatacatctagagccaacctgaataagctgctgaccgattacaccgaaatgaagaaggcgatcctgcatgtgtactgggaagagttccagaaggaccctgtgggcctgatgagccgggtggcccagcctgccagcaagaagatcgatcagaacaagctgaaacctgagatggacgagaagggcaacctgaccaccgccggctttgcctgctctcagtgtggccagcccctgttcgtgtacaagctggagcaggtgtctgagaagggcaaggcttacaccaactacttcggacggtgcaatgtggccgagcacgaaaagctgatcctgctggcccagctgaagcccgagaaggatagcgacgaagccgtgacatatagcctgggaaagtttgggcagagggccctggatttctacagcattcatgtgaccaaggagtccacccaccccgtgaagcccctggcccagatcgccggaaacagatacgcctccggacctgtgggaaaggccctgagcgacgcatgtatgggcacaatcgcctccttcctgtctaagtaccaggacatcatcatcgaacaccagaaggtggtgaagggcaaccagaagagactggagagcctgcgggagctggccggcaaggaaaacctggaataccctagcgtgaccctgccacctcagcctcacaccaaggagggcgttgatgcctacaacgaagtgatcgcccgggtgcgaatgtgggtgaacctgaacctgtggcagaagctgaagctaagcagagatgatgccaagcctctgctgagactgaagggattcccttcctttcctctggtcgagagacaggccaacgaagtggactggtgggacatggtgtgtaacgtgaagaagctgatcaacgagaaaaaggaggatggcaaggtgttttggcagaatctggctggctacaagagacaggaagccctgagaccatacctgagcagcgaggaagatcggaagaagggaaagaaattcgctcggtaccagctgggcgacctgctgctgcacctggaaaagaagcacggcgaggactggggaaaggtgtacgacgaggcctgggagcggattgacaagaaagtggaaggcctgagcaagcacatcaagctggaagaggaacggagaagcgaggacgcccagagcaaggccgccctgaccgactggctgcgggctaaggccagcttcgtgatcgagggcctgaaggaggccgacaaggacgagttctgcagatgcgagctgaagctgcagaagtggtacggggacctgcggggaaagcccttcgccatcgaagccgagaacagcatcctggacatcagcggcttcagcaagcagtacaactgtgccttcatctggcagaaggacggcgtgaagaagctgaacctgtacctgatcatcaactacttcaagggcggcaagctgcggttcaagaagatcaaacctgaagccttcgaagccaacagattctacaccgtgatcaacaaaaagagcggcgagatcgtgcccatggaggtgaacttcaacttcgacgaccccaacctgatcatcctgcctctggcctttggcaagagacagggcagagaattcatctggaacgacctgctgtccctggaaaccggcagcctgaagctggccaacggaagagtgatcgagaagacactgtacaacagaagaacccggcaggatgagcctgccctgttcgtggccctgaccttcgagcggcgggaggtcctggactcctccaatatcaaaccaatgaacctgatcggcgtggcaagaggcgaaaacatccccgccgtgatcgccctgaccgaccccgagggctgcccactgagccggtttaaggatagcctgggaaacccaacccacatcctgagaatcggcgagagctataaggagaagcagcggaccatccaggccaagaaggaggtggagcagcggagagccggcggctacagccggaagtacgccagcaaagccaagaatctggcagacgatatggtgagaaacaccgctagagatctgctgtactacgccgtgacccaggatgccatgctgatcttcgccaacctgagccggggcttcggccggcagggcaagcggaccttcatggccgagagacagtacacacggatggaggactggctgaccgccaagctggcctacgagggcctgagcaagacctacctgtccaagacactggcccagtacacctccaagacatgcagcaactgtgggtttaccatcaccagcgccgactacgacagggtgctggagaagctgaagaagacagcaacaggctggatgaccacaattaacggcaaggagctgaaggtggagggccagattacctactacaacagatacaagagacagaacgtagtcaaggacctgtccgtcgagctggatagactgagcgaagaatctgtgaacaacgacatctcctcctggacaaagggcagaagcggagaagctctgagcctcctgaagaaaagattctcccatagacccgtgcaggagaagttcgtgtgcctgaactgcggcttcgagacacacgcagccgagcaagccgccctgaacatcgccagatcctggctgttcctgcggagccaggagtacaagaaataccagacaaacaagacaaccggcaacaccgataagagagccttcgtcgagacctggcagtccttttaccggaagaagcttaaggaggtgtggaaacctgccgtgcggtctggcggatctggcggaggctccacaagcgcccagggcctggtgaccttcagggacgtggccatcgagttcagccaggaggagtggaagtgcctggagcccgcccagaggaacctgtacagggacgtgaccctggagaacttcagcaacctggtgagcctgggcctgagcatcagcaagcccgacctgatcagcctgctggagcagggcagggagccctggatgatcgccaacgacatgaccggcccctggtgccccgagctggagagcaggaccagccccaagaaaaagagaaaagtctaagctgccttctgcggggcttgccttctggccatgcccttcttctctcccttgcacctgtacctcttggtctttgaataaagcctgagtaggaaggctagcaaaaaaaaaaaaaaaaaaaaaaaaaaaaaaaaaaaaaaaaaaaaaaaaaaaaaaaaaaaaaaaaaaaaaaaaaaaaaaaa

SEQ ID NO: 6392 - RNA, 5797 nt, synthetic construct
  source 1..5797: mol_type = other RNA
aggaaataagagagaaaagaagagtaagaagaaatataagagccaccatggcccctaagaagaagcgtaaagtgagccggatggaacgcctcgtctacgaggtgcggcagaagtgcagaaacatcgaggacatctgcatctcctgcggatctctgaacgtgaccctggagcacccactgttcatcggcggcatgtgccagaactgtaaaaactgttttctggagtgtgcctatcaatacgacgatgacggctaccagagctactgcaccatctgttgcggcggaagagaggtgctgatgtgtggaaataacaactgctgccggtgcttctgcgtggaatgcgtggacctgctggtgggccccggcgccgcccaggccgctattaaggaagatccttggaactgctacatgtgcggccacaagggcacatacggcctgctgagacggagagaggactggcctagcagactgcagatgttcttcgccaataaccacgaccaggagttcgacccccctaaggtgtaccctcccgtccccgccgagaagagaaagcccatccgggtcctgagcctgttcgatggcatcgccaccggtctgctggtgctgaaggacctgggcatccaggtggataggtacattgcctccgaggtgtgcgaggactccatcaccgtgggaatggtgcgtcatcagggcaagatcatgtacgtgggcgacgtgcggagcgtgacacagaagcatatccaggagtggggccctttcgacctggtgatcggcggcagcccttgcaatgacctgagcatcgtgaacccagcccggaagggcctgtacgagggaaccggcagactgttcttcgagttttacagactgctgcacgacgcccggcctaaggaaggcgacgaccggcccttcttttggctgttcgagaatgtggtggccatgggagtcagcgacaagcgggatattagccggttcctggagagcaaccccgtgatgatcgatgccaaggaagtgagcgccgcccaccgggccagatacttctggggcaatctgcctggcatgaacagacccctggccagcaccgtgaacgacaagctggagctgcaggagtgcctggagcacggccggatcgccaagttcagcaaggtgagaaccatcaccacccgaagcaacagcatcaaacaaggcaaggaccagcactttcctgtgttcatgaacgagaaggaggacatcctgtggtgtaccgagatggagagagtgttcgggttcccagtccactacacagatgtcagcaacatgtctagactggccagacagagactgctgggaagaagctggtccgtccctgtgatcagacacctgttcgcccctctgaaggagtacttcgcctgcgtgagcagcggcaacagcaacgccaacagccggggccccagcttctctagcggcctggtgccactgtccctgagagggagccacatgggccccatggagatctacaaaaccgtgagcgcctggaagcggcagcctgtgcgcgtgctgagcctgtttcggaatatcgataaagtcctgaaaagcctgggattcctggagagcggctctggctccggcggtggcaccctgaagtacgtggaggatgtgacaaacgtggtcagacgggatgtggagaagtggggccccttcgatctggtgtacggcagcacccaacccctgggcagctcttgtgaccggtgccctggctggtacatgtttcagttccaccggatcctgcagtacgccctgccgagacaggagtcccagcggccattcttttggattttcatggacaacttgctgctgaccgaggatgaccaggaaactaccactcggttcctgcagaccgaagccgtgaccctgcaggacgtgagaggccgggactaccagaacgccatgcgggtgtggtccaacatccctggactgaaaagcaagcacgcacctctgacccctaaagaagaggagtacctgcaggcccaggtgcggagcagaagcaagctggacgcccctaaggtggatctgctggtgaagaattgcctcctgcccctgagagagtacttcaagtatttcagccagaatagtctgcccctgggcggcccaagcagcggcgcccctcctcccagcggcggcagcccagccggctccccaacctctaccgaggagggcacctctgagtccgccacccccgagagcggccctggcacctccaccgagcccagcgagggcagcgcacccggcagccctgccggcagccccacctccacagaggagggaaccagcaccgagcccagcgaaggcagcgccccaggcaccagcaccgagcctagtgagggcggctctggcggcggcagcgcccaggagattaaacggatcaacaagatcagaagaagacttgtgaaagacagcaacaccaagaaggccggcaagacaggccccatgaaaaccctgctggttagagtgatgacacccgatctgagagagcggctggaaaacctgagaaagaagcctgaaaatatcccccagcccatcagcaatacatctagagccaacctgaataagctgctgaccgattacaccgaaatgaagaaggcgatcctgcatgtgtactgggaagagttccagaaggaccctgtgggcctgatgagccgggtggcccagcctgccagcaagaagatcgatcagaacaagctgaaacctgagatggacgagaagggcaacctgaccaccgccggctttgcctgctctcagtgtggccagcccctgttcgtgtacaagctggagcaggtgtctgagaagggcaaggcttacaccaactacttcggacggtgcaatgtggccgagcacgaaaagctgatcctgctggcccagctgaagcccgagaaggatagcgacgaagccgtgacatatagcctgggaaagtttgggcagagggccctggatttctacagcattcatgtgaccaaggagtccacccaccccgtgaagcccctggcccagatcgccggaaacagatacgcctccggacctgtgggaaaggccctgagcgacgcatgtatgggcacaatcgcctccttcctgtctaagtaccaggacatcatcatcgaacaccagaaggtggtgaagggcaaccagaagagactggagagcctgcgggagctggccggcaaggaaaacctggaataccctagcgtgaccctgccacctcagcctcacaccaaggagggcgttgatgcctacaacgaagtgatcgcccgggtgcgaatgtgggtgaacctgaacctgtggcagaagctgaagctaagcagagatgatgccaagcctctgctgagactgaagggattcccttcctttcctctggtcgagagacaggccaacgaagtggactggtgggacatggtgtgtaacgtgaagaagctgatcaacgagaaaaaggaggatggcaaggtgttttggcagaatctggctggctacaagagacaggaagccctgagaccatacctgagcagcgaggaagatcggaagaagggaaagaaattcgctcggtaccagctgggcgacctgctgctgcacctggaaaagaagcacggcgaggactggggaaaggtgtacgacgaggcctgggagcggattgacaagaaagtggaaggcctgagcaagcacatcaagctggaagaggaacggagaagcgaggacgcccagagcaaggccgccctgaccgactggctgcgggctaaggccagcttcgtgatcgagggcctgaaggaggccgacaaggacgagttctgcagatgcgagctgaagctgcagaagtggtacggggacctgcggggaaagcccttcgccatcgaagccgagaacagcatcctggacatcagcggcttcagcaagcagtacaactgtgccttcatctggcagaaggacggcgtgaagaagctgaacctgtacctgatcatcaactacttcaagggcggcaagctgcggttcaagaagatcaaacctgaagccttcgaagccaacagattctacaccgtgatcaacaaaaagagcggcgagatcgtgcccatggaggtgaacttcaacttcgacgaccccaacctgatcatcctgcctctggcctttggcaagagacagggcagagaattcatctggaacgacctgctgtccctggaaaccggcagcctgaagctggccaacggaagagtgatcgagaagacactgtacaacagaagaacccggcaggatgagcctgccctgttcgtggccctgaccttcgagcggcgggaggtcctggactcctccaatatcaaaccaatgaacctgatcggcgtggcaagaggcgaaaacatccccgccgtgatcgccctgaccgaccccgagggctgcccactgagccggtttaaggatagcctgggaaacccaacccacatcctgagaatcggcgagagctataaggagaagcagcggaccatccaggccaagaaggaggtggagcagcggagagccggcggctacagccggaagtacgccagcaaagccaagaatctggcagacgatatggtgagaaacaccgctagagatctgctgtactacgccgtgacccaggatgccatgctgatcttcgccaacctgagccggggcttcggccggcagggcaagcggaccttcatggccgagagacagtacacacggatggaggactggctgaccgccaagctggcctacgagggcctgagcaagacctacctgtccaagacactggcccagtacacctccaagacatgcagcaactgtgggtttaccatcaccagcgccgactacgacagggtgctggagaagctgaagaagacagcaacaggctggatgaccacaattaacggcaaggagctgaaggtggagggccagattacctactacaacagatacaagagacagaacgtagtcaaggacctgtccgtcgagctggatagactgagcgaagaatctgtgaacaacgacatctcctcctggacaaagggcagaagcggagaagctctgagcctcctgaagaaaagattctcccatagacccgtgcaggagaagttcgtgtgcctgaactgcggcttcgagacacacgcagccgagcaagccgccctgaacatcgccagatcctggctgttcctgcggagccaggagtacaagaaataccagacaaacaagacaaccggcaacaccgataagagagccttcgtcgagacctggcagtccttttaccggaagaagcttaaggaggtgtggaaacctgccgtgcggtctggcggatctggcggaggctccacaagcgcccacgtgagcctgagcttcagggacgtggccatcgacctgagccaggaggagtgggagtgcctggaccccgtgcagagggccctgtacagggacgtgatgctggagaactacagcaacctggtgagcctgggctgcagcagccccaagcccgacgtgatcaccctgctggagcaggagaaggagccctggaccgtgatgagggagggcaccaggagctggtacaccgacctggagagcaagaccagccccaagaaaaagagaaaagtctaagctgccttctgcggggcttgccttctggccatgcccttcttctctcccttgcacctgtacctcttggtctttgaataaagcctgagtaggaaggctagcaaaaaaaaaaaaaaaaaaaaaaaaaaaaaaaaaaaaaaaaaaaaaaaaaaaaaaaaaaaaaaaaaaaaaaaaaaaaaaaa

SEQ ID NO: 6393 - RNA, 5797 nt, synthetic construct
  source 1..5797: mol_type = other RNA
aggaaataagagagaaaagaagagtaagaagaaatataagagccaccatggcccctaagaagaagcgtaaagtgagccggatggaacgcctcgtctacgaggtgcggcagaagtgcagaaacatcgaggacatctgcatctcctgcggatctctgaacgtgaccctggagcacccactgttcatcggcggcatgtgccagaactgtaaaaactgttttctggagtgtgcctatcaatacgacgatgacggctaccagagctactgcaccatctgttgcggcggaagagaggtgctgatgtgtggaaataacaactgctgccggtgcttctgcgtggaatgcgtggacctgctggtgggccccggcgccgcccaggccgctattaaggaagatccttggaactgctacatgtgcggccacaagggcacatacggcctgctgagacggagagaggactggcctagcagactgcagatgttcttcgccaataaccacgaccaggagttcgacccccctaaggtgtaccctcccgtccccgccgagaagagaaagcccatccgggtcctgagcctgttcgatggcatcgccaccggtctgctggtgctgaaggacctgggcatccaggtggataggtacattgcctccgaggtgtgcgaggactccatcaccgtgggaatggtgcgtcatcagggcaagatcatgtacgtgggcgacgtgcggagcgtgacacagaagcatatccaggagtggggccctttcgacctggtgatcggcggcagcccttgcaatgacctgagcatcgtgaacccagcccggaagggcctgtacgagggaaccggcagactgttcttcgagttttacagactgctgcacgacgcccggcctaaggaaggcgacgaccggcccttcttttggctgttcgagaatgtggtggccatgggagtcagcgacaagcgggatattagccggttcctggagagcaaccccgtgatgatcgatgccaaggaagtgagcgccgcccaccgggccagatacttctggggcaatctgcctggcatgaacagacccctggccagcaccgtgaacgacaagctggagctgcaggagtgcctggagcacggccggatcgccaagttcagcaaggtgagaaccatcaccacccgaagcaacagcatcaaacaaggcaaggaccagcactttcctgtgttcatgaacgagaaggaggacatcctgtggtgtaccgagatggagagagtgttcgggttcccagtccactacacagatgtcagcaacatgtctagactggccagacagagactgctgggaagaagctggtccgtccctgtgatcagacacctgttcgcccctctgaaggagtacttcgcctgcgtgagcagcggcaacagcaacgccaacagccggggccccagcttctctagcggcctggtgccactgtccctgagagggagccacatgggccccatggagatctacaaaaccgtgagcgcctggaagcggcagcctgtgcgcgtgctgagcctgtttcggaatatcgataaagtcctgaaaagcctgggattcctggagagcggctctggctccggcggtggcaccctgaagtacgtggaggatgtgacaaacgtggtcagacgggatgtggagaagtggggccccttcgatctggtgtacggcagcacccaacccctgggcagctcttgtgaccggtgccctggctggtacatgtttcagttccaccggatcctgcagtacgccctgccgagacaggagtcccagcggccattcttttggattttcatggacaacttgctgctgaccgaggatgaccaggaaactaccactcggttcctgcagaccgaagccgtgaccctgcaggacgtgagaggccgggactaccagaacgccatgcgggtgtggtccaacatccctggactgaaaagcaagcacgcacctctgacccctaaagaagaggagtacctgcaggcccaggtgcggagcagaagcaagctggacgcccctaaggtggatctgctggtgaagaattgcctcctgcccctgagagagtacttcaagtatttcagccagaatagtctgcccctgggcggcccaagcagcggcgcccctcctcccagcggcggcagcccagccggctccccaacctctaccgaggagggcacctctgagtccgccacccccgagagcggccctggcacctccaccgagcccagcgagggcagcgcacccggcagccctgccggcagccccacctccacagaggagggaaccagcaccgagcccagcgaaggcagcgccccaggcaccagcaccgagcctagtgagggcggctctggcggcggcagcgcccaggagattaaacggatcaacaagatcagaagaagacttgtgaaagacagcaacaccaagaaggccggcaagacaggccccatgaaaaccctgctggttagagtgatgacacccgatctgagagagcggctggaaaacctgagaaagaagcctgaaaatatcccccagcccatcagcaatacatctagagccaacctgaataagctgctgaccgattacaccgaaatgaagaaggcgatcctgcatgtgtactgggaagagttccagaaggaccctgtgggcctgatgagccgggtggcccagcctgccagcaagaagatcgatcagaacaagctgaaacctgagatggacgagaagggcaacctgaccaccgccggctttgcctgctctcagtgtggccagcccctgttcgtgtacaagctggagcaggtgtctgagaagggcaaggcttacaccaactacttcggacggtgcaatgtggccgagcacgaaaagctgatcctgctggcccagctgaagcccgagaaggatagcgacgaagccgtgacatatagcctgggaaagtttgggcagagggccctggatttctacagcattcatgtgaccaaggagtccacccaccccgtgaagcccctggcccagatcgccggaaacagatacgcctccggacctgtgggaaaggccctgagcgacgcatgtatgggcacaatcgcctccttcctgtctaagtaccaggacatcatcatcgaacaccagaaggtggtgaagggcaaccagaagagactggagagcctgcgggagctggccggcaaggaaaacctggaataccctagcgtgaccctgccacctcagcctcacaccaaggagggcgttgatgcctacaacgaagtgatcgcccgggtgcgaatgtgggtgaacctgaacctgtggcagaagctgaagctaagcagagatgatgccaagcctctgctgagactgaagggattcccttcctttcctctggtcgagagacaggccaacgaagtggactggtgggacatggtgtgtaacgtgaagaagctgatcaacgagaaaaaggaggatggcaaggtgttttggcagaatctggctggctacaagagacaggaagccctgagaccatacctgagcagcgaggaagatcggaagaagggaaagaaattcgctcggtaccagctgggcgacctgctgctgcacctggaaaagaagcacggcgaggactggggaaaggtgtacgacgaggcctgggagcggattgacaagaaagtggaaggcctgagcaagcacatcaagctggaagaggaacggagaagcgaggacgcccagagcaaggccgccctgaccgactggctgcgggctaaggccagcttcgtgatcgagggcctgaaggaggccgacaaggacgagttctgcagatgcgagctgaagctgcagaagtggtacggggacctgcggggaaagcccttcgccatcgaagccgagaacagcatcctggacatcagcggcttcagcaagcagtacaactgtgccttcatctggcagaaggacggcgtgaagaagctgaacctgtacctgatcatcaactacttcaagggcggcaagctgcggttcaagaagatcaaacctgaagccttcgaagccaacagattctacaccgtgatcaacaaaaagagcggcgagatcgtgcccatggaggtgaacttcaacttcgacgaccccaacctgatcatcctgcctctggcctttggcaagagacagggcagagaattcatctggaacgacctgctgtccctggaaaccggcagcctgaagctggccaacggaagagtgatcgagaagacactgtacaacagaagaacccggcaggatgagcctgccctgttcgtggccctgaccttcgagcggcgggaggtcctggactcctccaatatcaaaccaatgaacctgatcggcgtggcaagaggcgaaaacatccccgccgtgatcgccctgaccgaccccgagggctgcccactgagccggtttaaggatagcctgggaaacccaacccacatcctgagaatcggcgagagctataaggagaagcagcggaccatccaggccaagaaggaggtggagcagcggagagccggcggctacagccggaagtacgccagcaaagccaagaatctggcagacgatatggtgagaaacaccgctagagatctgctgtactacgccgtgacccaggatgccatgctgatcttcgccaacctgagccggggcttcggccggcagggcaagcggaccttcatggccgagagacagtacacacggatggaggactggctgaccgccaagctggcctacgagggcctgagcaagacctacctgtccaagacactggcccagtacacctccaagacatgcagcaactgtgggtttaccatcaccagcgccgactacgacagggtgctggagaagctgaagaagacagcaacaggctggatgaccacaattaacggcaaggagctgaaggtggagggccagattacctactacaacagatacaagagacagaacgtagtcaaggacctgtccgtcgagctggatagactgagcgaagaatctgtgaacaacgacatctcctcctggacaaagggcagaagcggagaagctctgagcctcctgaagaaaagattctcccatagacccgtgcaggagaagttcgtgtgcctgaactgcggcttcgagacacacgcagccgagcaagccgccctgaacatcgccagatcctggctgttcctgcggagccaggagtacaagaaataccagacaaacaagacaaccggcaacaccgataagagagccttcgtcgagacctggcagtccttttaccggaagaagcttaaggaggtgtggaaacctgccgtgcggtctggcggatctggcggaggctccacaagccaccagggcctgctgaccttcagggacgtggccgtggagttcagcctggaggagtggggcaggctgacccacacccagaggcagctgtacagggacgtgatgctggagaactacggccacctgctgttcctgggcctgatcgtgagcaagcccgacctggtgagcttcctggagcagaagaaggagccctggaacctgaagaggaagaagaccgtggccttccaccccgccatcagcagccacaccagccccaagaaaaagagaaaagtctaagctgccttctgcggggcttgccttctggccatgcccttcttctctcccttgcacctgtacctcttggtctttgaataaagcctgagtaggaaggctagcaaaaaaaaaaaaaaaaaaaaaaaaaaaaaaaaaaaaaaaaaaaaaaaaaaaaaaaaaaaaaaaaaaaaaaaaaaaaaaaa

SEQ ID NO: 6394 - RNA, 5797 nt, synthetic construct
  source 1..5797: mol_type = other RNA
aggaaataagagagaaaagaagagtaagaagaaatataagagccaccatggcccctaagaagaagcgtaaagtgagccggatggaacgcctcgtctacgaggtgcggcagaagtgcagaaacatcgaggacatctgcatctcctgcggatctctgaacgtgaccctggagcacccactgttcatcggcggcatgtgccagaactgtaaaaactgttttctggagtgtgcctatcaatacgacgatgacggctaccagagctactgcaccatctgttgcggcggaagagaggtgctgatgtgtggaaataacaactgctgccggtgcttctgcgtggaatgcgtggacctgctggtgggccccggcgccgcccaggccgctattaaggaagatccttggaactgctacatgtgcggccacaagggcacatacggcctgctgagacggagagaggactggcctagcagactgcagatgttcttcgccaataaccacgaccaggagttcgacccccctaaggtgtaccctcccgtccccgccgagaagagaaagcccatccgggtcctgagcctgttcgatggcatcgccaccggtctgctggtgctgaaggacctgggcatccaggtggataggtacattgcctccgaggtgtgcgaggactccatcaccgtgggaatggtgcgtcatcagggcaagatcatgtacgtgggcgacgtgcggagcgtgacacagaagcatatccaggagtggggccctttcgacctggtgatcggcggcagcccttgcaatgacctgagcatcgtgaacccagcccggaagggcctgtacgagggaaccggcagactgttcttcgagttttacagactgctgcacgacgcccggcctaaggaaggcgacgaccggcccttcttttggctgttcgagaatgtggtggccatgggagtcagcgacaagcgggatattagccggttcctggagagcaaccccgtgatgatcgatgccaaggaagtgagcgccgcccaccgggccagatacttctggggcaatctgcctggcatgaacagacccctggccagcaccgtgaacgacaagctggagctgcaggagtgcctggagcacggccggatcgccaagttcagcaaggtgagaaccatcaccacccgaagcaacagcatcaaacaaggcaaggaccagcactttcctgtgttcatgaacgagaaggaggacatcctgtggtgtaccgagatggagagagtgttcgggttcccagtccactacacagatgtcagcaacatgtctagactggccagacagagactgctgggaagaagctggtccgtccctgtgatcagacacctgttcgcccctctgaaggagtacttcgcctgcgtgagcagcggcaacagcaacgccaacagccggggccccagcttctctagcggcctggtgccactgtccctgagagggagccacatgggccccatggagatctacaaaaccgtgagcgcctggaagcggcagcctgtgcgcgtgctgagcctgtttcggaatatcgataaagtcctgaaaagcctgggattcctggagagcggctctggctccggcggtggcaccctgaagtacgtggaggatgtgacaaacgtggtcagacgggatgtggagaagtggggccccttcgatctggtgtacggcagcacccaacccctgggcagctcttgtgaccggtgccctggctggtacatgtttcagttccaccggatcctgcagtacgccctgccgagacaggagtcccagcggccattcttttggattttcatggacaacttgctgctgaccgaggatgaccaggaaactaccactcggttcctgcagaccgaagccgtgaccctgcaggacgtgagaggccgggactaccagaacgccatgcgggtgtggtccaacatccctggactgaaaagcaagcacgcacctctgacccctaaagaagaggagtacctgcaggcccaggtgcggagcagaagcaagctggacgcccctaaggtggatctgctggtgaagaattgcctcctgcccctgagagagtacttcaagtatttcagccagaatagtctgcccctgggcggcccaagcagcggcgcccctcctcccagcggcggcagcccagccggctccccaacctctaccgaggagggcacctctgagtccgccacccccgagagcggccctggcacctccaccgagcccagcgagggcagcgcacccggcagccctgccggcagccccacctccacagaggagggaaccagcaccgagcccagcgaaggcagcgccccaggcaccagcaccgagcctagtgagggcggctctggcggcggcagcgcccaggagattaaacggatcaacaagatcagaagaagacttgtgaaagacagcaacaccaagaaggccggcaagacaggccccatgaaaaccctgctggttagagtgatgacacccgatctgagagagcggctggaaaacctgagaaagaagcctgaaaatatcccccagcccatcagcaatacatctagagccaacctgaataagctgctgaccgattacaccgaaatgaagaaggcgatcctgcatgtgtactgggaagagttccagaaggaccctgtgggcctgatgagccgggtggcccagcctgccagcaagaagatcgatcagaacaagctgaaacctgagatggacgagaagggcaacctgaccaccgccggctttgcctgctctcagtgtggccagcccctgttcgtgtacaagctggagcaggtgtctgagaagggcaaggcttacaccaactacttcggacggtgcaatgtggccgagcacgaaaagctgatcctgctggcccagctgaagcccgagaaggatagcgacgaagccgtgacatatagcctgggaaagtttgggcagagggccctggatttctacagcattcatgtgaccaaggagtccacccaccccgtgaagcccctggcccagatcgccggaaacagatacgcctccggacctgtgggaaaggccctgagcgacgcatgtatgggcacaatcgcctccttcctgtctaagtaccaggacatcatcatcgaacaccagaaggtggtgaagggcaaccagaagagactggagagcctgcgggagctggccggcaaggaaaacctggaataccctagcgtgaccctgccacctcagcctcacaccaaggagggcgttgatgcctacaacgaagtgatcgcccgggtgcgaatgtgggtgaacctgaacctgtggcagaagctgaagctaagcagagatgatgccaagcctctgctgagactgaagggattcccttcctttcctctggtcgagagacaggccaacgaagtggactggtgggacatggtgtgtaacgtgaagaagctgatcaacgagaaaaaggaggatggcaaggtgttttggcagaatctggctggctacaagagacaggaagccctgagaccatacctgagcagcgaggaagatcggaagaagggaaagaaattcgctcggtaccagctgggcgacctgctgctgcacctggaaaagaagcacggcgaggactggggaaaggtgtacgacgaggcctgggagcggattgacaagaaagtggaaggcctgagcaagcacatcaagctggaagaggaacggagaagcgaggacgcccagagcaaggccgccctgaccgactggctgcgggctaaggccagcttcgtgatcgagggcctgaaggaggccgacaaggacgagttctgcagatgcgagctgaagctgcagaagtggtacggggacctgcggggaaagcccttcgccatcgaagccgagaacagcatcctggacatcagcggcttcagcaagcagtacaactgtgccttcatctggcagaaggacggcgtgaagaagctgaacctgtacctgatcatcaactacttcaagggcggcaagctgcggttcaagaagatcaaacctgaagccttcgaagccaacagattctacaccgtgatcaacaaaaagagcggcgagatcgtgcccatggaggtgaacttcaacttcgacgaccccaacctgatcatcctgcctctggcctttggcaagagacagggcagagaattcatctggaacgacctgctgtccctggaaaccggcagcctgaagctggccaacggaagagtgatcgagaagacactgtacaacagaagaacccggcaggatgagcctgccctgttcgtggccctgaccttcgagcggcgggaggtcctggactcctccaatatcaaaccaatgaacctgatcggcgtggcaagaggcgaaaacatccccgccgtgatcgccctgaccgaccccgagggctgcccactgagccggtttaaggatagcctgggaaacccaacccacatcctgagaatcggcgagagctataaggagaagcagcggaccatccaggccaagaaggaggtggagcagcggagagccggcggctacagccggaagtacgccagcaaagccaagaatctggcagacgatatggtgagaaacaccgctagagatctgctgtactacgccgtgacccaggatgccatgctgatcttcgccaacctgagccggggcttcggccggcagggcaagcggaccttcatggccgagagacagtacacacggatggaggactggctgaccgccaagctggcctacgagggcctgagcaagacctacctgtccaagacactggcccagtacacctccaagacatgcagcaactgtgggtttaccatcaccagcgccgactacgacagggtgctggagaagctgaagaagacagcaacaggctggatgaccacaattaacggcaaggagctgaaggtggagggccagattacctactacaacagatacaagagacagaacgtagtcaaggacctgtccgtcgagctggatagactgagcgaagaatctgtgaacaacgacatctcctcctggacaaagggcagaagcggagaagctctgagcctcctgaagaaaagattctcccatagacccgtgcaggagaagttcgtgtgcctgaactgcggcttcgagacacacgcagccgagcaagccgccctgaacatcgccagatcctggctgttcctgcggagccaggagtacaagaaataccagacaaacaagacaaccggcaacaccgataagagagccttcgtcgagacctggcagtccttttaccggaagaagcttaaggaggtgtggaaacctgccgtgcggtctggcggatctggcggaggctccacaagcagcgtggagatgctgagcttcagggacgtggccatcgacttcagcgccggcgagctggagtgcctggagcccgcccagtgggacctgtacagggacgtgatgctggagaacttcagccacctggtgttcctgggcttcagcttcagcaagcccctgctggtgaggttcctggagaagaaccaggagctgaggaacgtgaagaggaaggccgccaccgtgcccaggggcaagaagccctacaagaccagccccaagaaaaagagaaaagtctaagctgccttctgcggggcttgccttctggccatgcccttcttctctcccttgcacctgtacctcttggtctttgaataaagcctgagtaggaaggctagcaaaaaaaaaaaaaaaaaaaaaaaaaaaaaaaaaaaaaaaaaaaaaaaaaaaaaaaaaaaaaaaaaaaaaaaaaaaaaaaa

SEQ ID NO: 6395 - RNA, 5797 nt, synthetic construct
  source 1..5797: mol_type = other RNA
aggaaataagagagaaaagaagagtaagaagaaatataagagccaccatggcccctaagaagaagcgtaaagtgagccggatggaacgcctcgtctacgaggtgcggcagaagtgcagaaacatcgaggacatctgcatctcctgcggatctctgaacgtgaccctggagcacccactgttcatcggcggcatgtgccagaactgtaaaaactgttttctggagtgtgcctatcaatacgacgatgacggctaccagagctactgcaccatctgttgcggcggaagagaggtgctgatgtgtggaaataacaactgctgccggtgcttctgcgtggaatgcgtggacctgctggtgggccccggcgccgcccaggccgctattaaggaagatccttggaactgctacatgtgcggccacaagggcacatacggcctgctgagacggagagaggactggcctagcagactgcagatgttcttcgccaataaccacgaccaggagttcgacccccctaaggtgtaccctcccgtccccgccgagaagagaaagcccatccgggtcctgagcctgttcgatggcatcgccaccggtctgctggtgctgaaggacctgggcatccaggtggataggtacattgcctccgaggtgtgcgaggactccatcaccgtgggaatggtgcgtcatcagggcaagatcatgtacgtgggcgacgtgcggagcgtgacacagaagcatatccaggagtggggccctttcgacctggtgatcggcggcagcccttgcaatgacctgagcatcgtgaacccagcccggaagggcctgtacgagggaaccggcagactgttcttcgagttttacagactgctgcacgacgcccggcctaaggaaggcgacgaccggcccttcttttggctgttcgagaatgtggtggccatgggagtcagcgacaagcgggatattagccggttcctggagagcaaccccgtgatgatcgatgccaaggaagtgagcgccgcccaccgggccagatacttctggggcaatctgcctggcatgaacagacccctggccagcaccgtgaacgacaagctggagctgcaggagtgcctggagcacggccggatcgccaagttcagcaaggtgagaaccatcaccacccgaagcaacagcatcaaacaaggcaaggaccagcactttcctgtgttcatgaacgagaaggaggacatcctgtggtgtaccgagatggagagagtgttcgggttcccagtccactacacagatgtcagcaacatgtctagactggccagacagagactgctgggaagaagctggtccgtccctgtgatcagacacctgttcgcccctctgaaggagtacttcgcctgcgtgagcagcggcaacagcaacgccaacagccggggccccagcttctctagcggcctggtgccactgtccctgagagggagccacatgggccccatggagatctacaaaaccgtgagcgcctggaagcggcagcctgtgcgcgtgctgagcctgtttcggaatatcgataaagtcctgaaaagcctgggattcctggagagcggctctggctccggcggtggcaccctgaagtacgtggaggatgtgacaaacgtggtcagacgggatgtggagaagtggggccccttcgatctggtgtacggcagcacccaacccctgggcagctcttgtgaccggtgccctggctggtacatgtttcagttccaccggatcctgcagtacgccctgccgagacaggagtcccagcggccattcttttggattttcatggacaacttgctgctgaccgaggatgaccaggaaactaccactcggttcctgcagaccgaagccgtgaccctgcaggacgtgagaggccgggactaccagaacgccatgcgggtgtggtccaacatccctggactgaaaagcaagcacgcacctctgacccctaaagaagaggagtacctgcaggcccaggtgcggagcagaagcaagctggacgcccctaaggtggatctgctggtgaagaattgcctcctgcccctgagagagtacttcaagtatttcagccagaatagtctgcccctgggcggcccaagcagcggcgcccctcctcccagcggcggcagcccagccggctccccaacctctaccgaggagggcacctctgagtccgccacccccgagagcggccctggcacctccaccgagcccagcgagggcagcgcacccggcagccctgccggcagccccacctccacagaggagggaaccagcaccgagcccagcgaaggcagcgccccaggcaccagcaccgagcctagtgagggcggctctggcggcggcagcgcccaggagattaaacggatcaacaagatcagaagaagacttgtgaaagacagcaacaccaagaaggccggcaagacaggccccatgaaaaccctgctggttagagtgatgacacccgatctgagagagcggctggaaaacctgagaaagaagcctgaaaatatcccccagcccatcagcaatacatctagagccaacctgaataagctgctgaccgattacaccgaaatgaagaaggcgatcctgcatgtgtactgggaagagttccagaaggaccctgtgggcctgatgagccgggtggcccagcctgccagcaagaagatcgatcagaacaagctgaaacctgagatggacgagaagggcaacctgaccaccgccggctttgcctgctctcagtgtggccagcccctgttcgtgtacaagctggagcaggtgtctgagaagggcaaggcttacaccaactacttcggacggtgcaatgtggccgagcacgaaaagctgatcctgctggcccagctgaagcccgagaaggatagcgacgaagccgtgacatatagcctgggaaagtttgggcagagggccctggatttctacagcattcatgtgaccaaggagtccacccaccccgtgaagcccctggcccagatcgccggaaacagatacgcctccggacctgtgggaaaggccctgagcgacgcatgtatgggcacaatcgcctccttcctgtctaagtaccaggacatcatcatcgaacaccagaaggtggtgaagggcaaccagaagagactggagagcctgcgggagctggccggcaaggaaaacctggaataccctagcgtgaccctgccacctcagcctcacaccaaggagggcgttgatgcctacaacgaagtgatcgcccgggtgcgaatgtgggtgaacctgaacctgtggcagaagctgaagctaagcagagatgatgccaagcctctgctgagactgaagggattcccttcctttcctctggtcgagagacaggccaacgaagtggactggtgggacatggtgtgtaacgtgaagaagctgatcaacgagaaaaaggaggatggcaaggtgttttggcagaatctggctggctacaagagacaggaagccctgagaccatacctgagcagcgaggaagatcggaagaagggaaagaaattcgctcggtaccagctgggcgacctgctgctgcacctggaaaagaagcacggcgaggactggggaaaggtgtacgacgaggcctgggagcggattgacaagaaagtggaaggcctgagcaagcacatcaagctggaagaggaacggagaagcgaggacgcccagagcaaggccgccctgaccgactggctgcgggctaaggccagcttcgtgatcgagggcctgaaggaggccgacaaggacgagttctgcagatgcgagctgaagctgcagaagtggtacggggacctgcggggaaagcccttcgccatcgaagccgagaacagcatcctggacatcagcggcttcagcaagcagtacaactgtgccttcatctggcagaaggacggcgtgaagaagctgaacctgtacctgatcatcaactacttcaagggcggcaagctgcggttcaagaagatcaaacctgaagccttcgaagccaacagattctacaccgtgatcaacaaaaagagcggcgagatcgtgcccatggaggtgaacttcaacttcgacgaccccaacctgatcatcctgcctctggcctttggcaagagacagggcagagaattcatctggaacgacctgctgtccctggaaaccggcagcctgaagctggccaacggaagagtgatcgagaagacactgtacaacagaagaacccggcaggatgagcctgccctgttcgtggccctgaccttcgagcggcgggaggtcctggactcctccaatatcaaaccaatgaacctgatcggcgtggcaagaggcgaaaacatccccgccgtgatcgccctgaccgaccccgagggctgcccactgagccggtttaaggatagcctgggaaacccaacccacatcctgagaatcggcgagagctataaggagaagcagcggaccatccaggccaagaaggaggtggagcagcggagagccggcggctacagccggaagtacgccagcaaagccaagaatctggcagacgatatggtgagaaacaccgctagagatctgctgtactacgccgtgacccaggatgccatgctgatcttcgccaacctgagccggggcttcggccggcagggcaagcggaccttcatggccgagagacagtacacacggatggaggactggctgaccgccaagctggcctacgagggcctgagcaagacctacctgtccaagacactggcccagtacacctccaagacatgcagcaactgtgggtttaccatcaccagcgccgactacgacagggtgctggagaagctgaagaagacagcaacaggctggatgaccacaattaacggcaaggagctgaaggtggagggccagattacctactacaacagatacaagagacagaacgtagtcaaggacctgtccgtcgagctggatagactgagcgaagaatctgtgaacaacgacatctcctcctggacaaagggcagaagcggagaagctctgagcctcctgaagaaaagattctcccatagacccgtgcaggagaagttcgtgtgcctgaactgcggcttcgagacacacgcagccgagcaagccgccctgaacatcgccagatcctggctgttcctgcggagccaggagtacaagaaataccagacaaacaagacaaccggcaacaccgataagagagccttcgtcgagacctggcagtccttttaccggaagaagcttaaggaggtgtggaaacctgccgtgcggtctggcggatctggcggaggctccacaagcagccaggagagcgtgagcttcgaggacgtggccgtgtacttcacccagaaccagtgggccagcctggacagcgcccagaggaccctgtacagggaggtgatgctggagaactacgccaacgtgaccagcctggccgccttccccttccccaagcccgacctgatcttccagctggagaggggcaaggcccccggcggcctggacccctggacccccatcaggaggaaggtgaggggcgtgtgcaccagccccaagaaaaagagaaaagtctaagctgccttctgcggggcttgccttctggccatgcccttcttctctcccttgcacctgtacctcttggtctttgaataaagcctgagtaggaaggctagcaaaaaaaaaaaaaaaaaaaaaaaaaaaaaaaaaaaaaaaaaaaaaaaaaaaaaaaaaaaaaaaaaaaaaaaaaaaaaaaa

SEQ ID NO: 6396 - RNA, 5797 nt, synthetic construct
  source 1..5797: mol_type = other RNA
aggaaataagagagaaaagaagagtaagaagaaatataagagccaccatggcccctaagaagaagcgtaaagtgagccggatggaacgcctcgtctacgaggtgcggcagaagtgcagaaacatcgaggacatctgcatctcctgcggatctctgaacgtgaccctggagcacccactgttcatcggcggcatgtgccagaactgtaaaaactgttttctggagtgtgcctatcaatacgacgatgacggctaccagagctactgcaccatctgttgcggcggaagagaggtgctgatgtgtggaaataacaactgctgccggtgcttctgcgtggaatgcgtggacctgctggtgggccccggcgccgcccaggccgctattaaggaagatccttggaactgctacatgtgcggccacaagggcacatacggcctgctgagacggagagaggactggcctagcagactgcagatgttcttcgccaataaccacgaccaggagttcgacccccctaaggtgtaccctcccgtccccgccgagaagagaaagcccatccgggtcctgagcctgttcgatggcatcgccaccggtctgctggtgctgaaggacctgggcatccaggtggataggtacattgcctccgaggtgtgcgaggactccatcaccgtgggaatggtgcgtcatcagggcaagatcatgtacgtgggcgacgtgcggagcgtgacacagaagcatatccaggagtggggccctttcgacctggtgatcggcggcagcccttgcaatgacctgagcatcgtgaacccagcccggaagggcctgtacgagggaaccggcagactgttcttcgagttttacagactgctgcacgacgcccggcctaaggaaggcgacgaccggcccttcttttggctgttcgagaatgtggtggccatgggagtcagcgacaagcgggatattagccggttcctggagagcaaccccgtgatgatcgatgccaaggaagtgagcgccgcccaccgggccagatacttctggggcaatctgcctggcatgaacagacccctggccagcaccgtgaacgacaagctggagctgcaggagtgcctggagcacggccggatcgccaagttcagcaaggtgagaaccatcaccacccgaagcaacagcatcaaacaaggcaaggaccagcactttcctgtgttcatgaacgagaaggaggacatcctgtggtgtaccgagatggagagagtgttcgggttcccagtccactacacagatgtcagcaacatgtctagactggccagacagagactgctgggaagaagctggtccgtccctgtgatcagacacctgttcgcccctctgaaggagtacttcgcctgcgtgagcagcggcaacagcaacgccaacagccggggccccagcttctctagcggcctggtgccactgtccctgagagggagccacatgggccccatggagatctacaaaaccgtgagcgcctggaagcggcagcctgtgcgcgtgctgagcctgtttcggaatatcgataaagtcctgaaaagcctgggattcctggagagcggctctggctccggcggtggcaccctgaagtacgtggaggatgtgacaaacgtggtcagacgggatgtggagaagtggggccccttcgatctggtgtacggcagcacccaacccctgggcagctcttgtgaccggtgccctggctggtacatgtttcagttccaccggatcctgcagtacgccctgccgagacaggagtcccagcggccattcttttggattttcatggacaacttgctgctgaccgaggatgaccaggaaactaccactcggttcctgcagaccgaagccgtgaccctgcaggacgtgagaggccgggactaccagaacgccatgcgggtgtggtccaacatccctggactgaaaagcaagcacgcacctctgacccctaaagaagaggagtacctgcaggcccaggtgcggagcagaagcaagctggacgcccctaaggtggatctgctggtgaagaattgcctcctgcccctgagagagtacttcaagtatttcagccagaatagtctgcccctgggcggcccaagcagcggcgcccctcctcccagcggcggcagcccagccggctccccaacctctaccgaggagggcacctctgagtccgccacccccgagagcggccctggcacctccaccgagcccagcgagggcagcgcacccggcagccctgccggcagccccacctccacagaggagggaaccagcaccgagcccagcgaaggcagcgccccaggcaccagcaccgagcctagtgagggcggctctggcggcggcagcgcccaggagattaaacggatcaacaagatcagaagaagacttgtgaaagacagcaacaccaagaaggccggcaagacaggccccatgaaaaccctgctggttagagtgatgacacccgatctgagagagcggctggaaaacctgagaaagaagcctgaaaatatcccccagcccatcagcaatacatctagagccaacctgaataagctgctgaccgattacaccgaaatgaagaaggcgatcctgcatgtgtactgggaagagttccagaaggaccctgtgggcctgatgagccgggtggcccagcctgccagcaagaagatcgatcagaacaagctgaaacctgagatggacgagaagggcaacctgaccaccgccggctttgcctgctctcagtgtggccagcccctgttcgtgtacaagctggagcaggtgtctgagaagggcaaggcttacaccaactacttcggacggtgcaatgtggccgagcacgaaaagctgatcctgctggcccagctgaagcccgagaaggatagcgacgaagccgtgacatatagcctgggaaagtttgggcagagggccctggatttctacagcattcatgtgaccaaggagtccacccaccccgtgaagcccctggcccagatcgccggaaacagatacgcctccggacctgtgggaaaggccctgagcgacgcatgtatgggcacaatcgcctccttcctgtctaagtaccaggacatcatcatcgaacaccagaaggtggtgaagggcaaccagaagagactggagagcctgcgggagctggccggcaaggaaaacctggaataccctagcgtgaccctgccacctcagcctcacaccaaggagggcgttgatgcctacaacgaagtgatcgcccgggtgcgaatgtgggtgaacctgaacctgtggcagaagctgaagctaagcagagatgatgccaagcctctgctgagactgaagggattcccttcctttcctctggtcgagagacaggccaacgaagtggactggtgggacatggtgtgtaacgtgaagaagctgatcaacgagaaaaaggaggatggcaaggtgttttggcagaatctggctggctacaagagacaggaagccctgagaccatacctgagcagcgaggaagatcggaagaagggaaagaaattcgctcggtaccagctgggcgacctgctgctgcacctggaaaagaagcacggcgaggactggggaaaggtgtacgacgaggcctgggagcggattgacaagaaagtggaaggcctgagcaagcacatcaagctggaagaggaacggagaagcgaggacgcccagagcaaggccgccctgaccgactggctgcgggctaaggccagcttcgtgatcgagggcctgaaggaggccgacaaggacgagttctgcagatgcgagctgaagctgcagaagtggtacggggacctgcggggaaagcccttcgccatcgaagccgagaacagcatcctggacatcagcggcttcagcaagcagtacaactgtgccttcatctggcagaaggacggcgtgaagaagctgaacctgtacctgatcatcaactacttcaagggcggcaagctgcggttcaagaagatcaaacctgaagccttcgaagccaacagattctacaccgtgatcaacaaaaagagcggcgagatcgtgcccatggaggtgaacttcaacttcgacgaccccaacctgatcatcctgcctctggcctttggcaagagacagggcagagaattcatctggaacgacctgctgtccctggaaaccggcagcctgaagctggccaacggaagagtgatcgagaagacactgtacaacagaagaacccggcaggatgagcctgccctgttcgtggccctgaccttcgagcggcgggaggtcctggactcctccaatatcaaaccaatgaacctgatcggcgtggcaagaggcgaaaacatccccgccgtgatcgccctgaccgaccccgagggctgcccactgagccggtttaaggatagcctgggaaacccaacccacatcctgagaatcggcgagagctataaggagaagcagcggaccatccaggccaagaaggaggtggagcagcggagagccggcggctacagccggaagtacgccagcaaagccaagaatctggcagacgatatggtgagaaacaccgctagagatctgctgtactacgccgtgacccaggatgccatgctgatcttcgccaacctgagccggggcttcggccggcagggcaagcggaccttcatggccgagagacagtacacacggatggaggactggctgaccgccaagctggcctacgagggcctgagcaagacctacctgtccaagacactggcccagtacacctccaagacatgcagcaactgtgggtttaccatcaccagcgccgactacgacagggtgctggagaagctgaagaagacagcaacaggctggatgaccacaattaacggcaaggagctgaaggtggagggccagattacctactacaacagatacaagagacagaacgtagtcaaggacctgtccgtcgagctggatagactgagcgaagaatctgtgaacaacgacatctcctcctggacaaagggcagaagcggagaagctctgagcctcctgaagaaaagattctcccatagacccgtgcaggagaagttcgtgtgcctgaactgcggcttcgagacacacgcagccgagcaagccgccctgaacatcgccagatcctggctgttcctgcggagccaggagtacaagaaataccagacaaacaagacaaccggcaacaccgataagagagccttcgtcgagacctggcagtccttttaccggaagaagcttaaggaggtgtggaaacctgccgtgcggtctggcggatctggcggaggctccacaagcgcccaggagagcgtgatgttcagcgacgtgagcatcgacttcagccaggaggagtgggagtacctgaacgacgaccagagggacctgtacagggaggtgatgctggagaactacagcaacctggtgagcatggccggccacagcatcagcaagcccgacgtgatcagcttcctggagcagggcaaggagccctggctggtggacagggagctgaccagggaccagtggcccgtgctggagagcaccagccccaagaaaaagagaaaagtctaagctgccttctgcggggcttgccttctggccatgcccttcttctctcccttgcacctgtacctcttggtctttgaataaagcctgagtaggaaggctagcaaaaaaaaaaaaaaaaaaaaaaaaaaaaaaaaaaaaaaaaaaaaaaaaaaaaaaaaaaaaaaaaaaaaaaaaaaaaaaaa

SEQ ID NO: 6397 - RNA, 5797 nt, synthetic construct
  source 1..5797: mol_type = other RNA
aggaaataagagagaaaagaagagtaagaagaaatataagagccaccatggcccctaagaagaagcgtaaagtgagccggatggaacgcctcgtctacgaggtgcggcagaagtgcagaaacatcgaggacatctgcatctcctgcggatctctgaacgtgaccctggagcacccactgttcatcggcggcatgtgccagaactgtaaaaactgttttctggagtgtgcctatcaatacgacgatgacggctaccagagctactgcaccatctgttgcggcggaagagaggtgctgatgtgtggaaataacaactgctgccggtgcttctgcgtggaatgcgtggacctgctggtgggccccggcgccgcccaggccgctattaaggaagatccttggaactgctacatgtgcggccacaagggcacatacggcctgctgagacggagagaggactggcctagcagactgcagatgttcttcgccaataaccacgaccaggagttcgacccccctaaggtgtaccctcccgtccccgccgagaagagaaagcccatccgggtcctgagcctgttcgatggcatcgccaccggtctgctggtgctgaaggacctgggcatccaggtggataggtacattgcctccgaggtgtgcgaggactccatcaccgtgggaatggtgcgtcatcagggcaagatcatgtacgtgggcgacgtgcggagcgtgacacagaagcatatccaggagtggggccctttcgacctggtgatcggcggcagcccttgcaatgacctgagcatcgtgaacccagcccggaagggcctgtacgagggaaccggcagactgttcttcgagttttacagactgctgcacgacgcccggcctaaggaaggcgacgaccggcccttcttttggctgttcgagaatgtggtggccatgggagtcagcgacaagcgggatattagccggttcctggagagcaaccccgtgatgatcgatgccaaggaagtgagcgccgcccaccgggccagatacttctggggcaatctgcctggcatgaacagacccctggccagcaccgtgaacgacaagctggagctgcaggagtgcctggagcacggccggatcgccaagttcagcaaggtgagaaccatcaccacccgaagcaacagcatcaaacaaggcaaggaccagcactttcctgtgttcatgaacgagaaggaggacatcctgtggtgtaccgagatggagagagtgttcgggttcccagtccactacacagatgtcagcaacatgtctagactggccagacagagactgctgggaagaagctggtccgtccctgtgatcagacacctgttcgcccctctgaaggagtacttcgcctgcgtgagcagcggcaacagcaacgccaacagccggggccccagcttctctagcggcctggtgccactgtccctgagagggagccacatgggccccatggagatctacaaaaccgtgagcgcctggaagcggcagcctgtgcgcgtgctgagcctgtttcggaatatcgataaagtcctgaaaagcctgggattcctggagagcggctctggctccggcggtggcaccctgaagtacgtggaggatgtgacaaacgtggtcagacgggatgtggagaagtggggccccttcgatctggtgtacggcagcacccaacccctgggcagctcttgtgaccggtgccctggctggtacatgtttcagttccaccggatcctgcagtacgccctgccgagacaggagtcccagcggccattcttttggattttcatggacaacttgctgctgaccgaggatgaccaggaaactaccactcggttcctgcagaccgaagccgtgaccctgcaggacgtgagaggccgggactaccagaacgccatgcgggtgtggtccaacatccctggactgaaaagcaagcacgcacctctgacccctaaagaagaggagtacctgcaggcccaggtgcggagcagaagcaagctggacgcccctaaggtggatctgctggtgaagaattgcctcctgcccctgagagagtacttcaagtatttcagccagaatagtctgcccctgggcggcccaagcagcggcgcccctcctcccagcggcggcagcccagccggctccccaacctctaccgaggagggcacctctgagtccgccacccccgagagcggccctggcacctccaccgagcccagcgagggcagcgcacccggcagccctgccggcagccccacctccacagaggagggaaccagcaccgagcccagcgaaggcagcgccccaggcaccagcaccgagcctagtgagggcggctctggcggcggcagcgcccaggagattaaacggatcaacaagatcagaagaagacttgtgaaagacagcaacaccaagaaggccggcaagacaggccccatgaaaaccctgctggttagagtgatgacacccgatctgagagagcggctggaaaacctgagaaagaagcctgaaaatatcccccagcccatcagcaatacatctagagccaacctgaataagctgctgaccgattacaccgaaatgaagaaggcgatcctgcatgtgtactgggaagagttccagaaggaccctgtgggcctgatgagccgggtggcccagcctgccagcaagaagatcgatcagaacaagctgaaacctgagatggacgagaagggcaacctgaccaccgccggctttgcctgctctcagtgtggccagcccctgttcgtgtacaagctggagcaggtgtctgagaagggcaaggcttacaccaactacttcggacggtgcaatgtggccgagcacgaaaagctgatcctgctggcccagctgaagcccgagaaggatagcgacgaagccgtgacatatagcctgggaaagtttgggcagagggccctggatttctacagcattcatgtgaccaaggagtccacccaccccgtgaagcccctggcccagatcgccggaaacagatacgcctccggacctgtgggaaaggccctgagcgacgcatgtatgggcacaatcgcctccttcctgtctaagtaccaggacatcatcatcgaacaccagaaggtggtgaagggcaaccagaagagactggagagcctgcgggagctggccggcaaggaaaacctggaataccctagcgtgaccctgccacctcagcctcacaccaaggagggcgttgatgcctacaacgaagtgatcgcccgggtgcgaatgtgggtgaacctgaacctgtggcagaagctgaagctaagcagagatgatgccaagcctctgctgagactgaagggattcccttcctttcctctggtcgagagacaggccaacgaagtggactggtgggacatggtgtgtaacgtgaagaagctgatcaacgagaaaaaggaggatggcaaggtgttttggcagaatctggctggctacaagagacaggaagccctgagaccatacctgagcagcgaggaagatcggaagaagggaaagaaattcgctcggtaccagctgggcgacctgctgctgcacctggaaaagaagcacggcgaggactggggaaaggtgtacgacgaggcctgggagcggattgacaagaaagtggaaggcctgagcaagcacatcaagctggaagaggaacggagaagcgaggacgcccagagcaaggccgccctgaccgactggctgcgggctaaggccagcttcgtgatcgagggcctgaaggaggccgacaaggacgagttctgcagatgcgagctgaagctgcagaagtggtacggggacctgcggggaaagcccttcgccatcgaagccgagaacagcatcctggacatcagcggcttcagcaagcagtacaactgtgccttcatctggcagaaggacggcgtgaagaagctgaacctgtacctgatcatcaactacttcaagggcggcaagctgcggttcaagaagatcaaacctgaagccttcgaagccaacagattctacaccgtgatcaacaaaaagagcggcgagatcgtgcccatggaggtgaacttcaacttcgacgaccccaacctgatcatcctgcctctggcctttggcaagagacagggcagagaattcatctggaacgacctgctgtccctggaaaccggcagcctgaagctggccaacggaagagtgatcgagaagacactgtacaacagaagaacccggcaggatgagcctgccctgttcgtggccctgaccttcgagcggcgggaggtcctggactcctccaatatcaaaccaatgaacctgatcggcgtggcaagaggcgaaaacatccccgccgtgatcgccctgaccgaccccgagggctgcccactgagccggtttaaggatagcctgggaaacccaacccacatcctgagaatcggcgagagctataaggagaagcagcggaccatccaggccaagaaggaggtggagcagcggagagccggcggctacagccggaagtacgccagcaaagccaagaatctggcagacgatatggtgagaaacaccgctagagatctgctgtactacgccgtgacccaggatgccatgctgatcttcgccaacctgagccggggcttcggccggcagggcaagcggaccttcatggccgagagacagtacacacggatggaggactggctgaccgccaagctggcctacgagggcctgagcaagacctacctgtccaagacactggcccagtacacctccaagacatgcagcaactgtgggtttaccatcaccagcgccgactacgacagggtgctggagaagctgaagaagacagcaacaggctggatgaccacaattaacggcaaggagctgaaggtggagggccagattacctactacaacagatacaagagacagaacgtagtcaaggacctgtccgtcgagctggatagactgagcgaagaatctgtgaacaacgacatctcctcctggacaaagggcagaagcggagaagctctgagcctcctgaagaaaagattctcccatagacccgtgcaggagaagttcgtgtgcctgaactgcggcttcgagacacacgcagccgagcaagccgccctgaacatcgccagatcctggctgttcctgcggagccaggagtacaagaaataccagacaaacaagacaaccggcaacaccgataagagagccttcgtcgagacctggcagtccttttaccggaagaagcttaaggaggtgtggaaacctgccgtgcggtctggcggatctggcggaggctccacaagcagcaaggtgcccgtgaccttcggcgacctggccatctacttcagccaggaggagtgggagtggctgagccccatccagaaggacctgtacgaggacgtgatgctggagaactaccagaacctggtgagcctgggcctgagcttcaggaggcccaacgtgatcaccctgctggagaagggcaaggccccctgggtggtggagcccgtgaggaagaggaggggcctggacagcggcttcaagtgcaccagccccaagaaaaagagaaaagtctaagctgccttctgcggggcttgccttctggccatgcccttcttctctcccttgcacctgtacctcttggtctttgaataaagcctgagtaggaaggctagcaaaaaaaaaaaaaaaaaaaaaaaaaaaaaaaaaaaaaaaaaaaaaaaaaaaaaaaaaaaaaaaaaaaaaaaaaaaaaaaa

SEQ ID NO: 6398 - RNA, 5797 nt, synthetic construct
  source 1..5797: mol_type = other RNA
aggaaataagagagaaaagaagagtaagaagaaatataagagccaccatggcccctaagaagaagcgtaaagtgagccggatggaacgcctcgtctacgaggtgcggcagaagtgcagaaacatcgaggacatctgcatctcctgcggatctctgaacgtgaccctggagcacccactgttcatcggcggcatgtgccagaactgtaaaaactgttttctggagtgtgcctatcaatacgacgatgacggctaccagagctactgcaccatctgttgcggcggaagagaggtgctgatgtgtggaaataacaactgctgccggtgcttctgcgtggaatgcgtggacctgctggtgggccccggcgccgcccaggccgctattaaggaagatccttggaactgctacatgtgcggccacaagggcacatacggcctgctgagacggagagaggactggcctagcagactgcagatgttcttcgccaataaccacgaccaggagttcgacccccctaaggtgtaccctcccgtccccgccgagaagagaaagcccatccgggtcctgagcctgttcgatggcatcgccaccggtctgctggtgctgaaggacctgggcatccaggtggataggtacattgcctccgaggtgtgcgaggactccatcaccgtgggaatggtgcgtcatcagggcaagatcatgtacgtgggcgacgtgcggagcgtgacacagaagcatatccaggagtggggccctttcgacctggtgatcggcggcagcccttgcaatgacctgagcatcgtgaacccagcccggaagggcctgtacgagggaaccggcagactgttcttcgagttttacagactgctgcacgacgcccggcctaaggaaggcgacgaccggcccttcttttggctgttcgagaatgtggtggccatgggagtcagcgacaagcgggatattagccggttcctggagagcaaccccgtgatgatcgatgccaaggaagtgagcgccgcccaccgggccagatacttctggggcaatctgcctggcatgaacagacccctggccagcaccgtgaacgacaagctggagctgcaggagtgcctggagcacggccggatcgccaagttcagcaaggtgagaaccatcaccacccgaagcaacagcatcaaacaaggcaaggaccagcactttcctgtgttcatgaacgagaaggaggacatcctgtggtgtaccgagatggagagagtgttcgggttcccagtccactacacagatgtcagcaacatgtctagactggccagacagagactgctgggaagaagctggtccgtccctgtgatcagacacctgttcgcccctctgaaggagtacttcgcctgcgtgagcagcggcaacagcaacgccaacagccggggccccagcttctctagcggcctggtgccactgtccctgagagggagccacatgggccccatggagatctacaaaaccgtgagcgcctggaagcggcagcctgtgcgcgtgctgagcctgtttcggaatatcgataaagtcctgaaaagcctgggattcctggagagcggctctggctccggcggtggcaccctgaagtacgtggaggatgtgacaaacgtggtcagacgggatgtggagaagtggggccccttcgatctggtgtacggcagcacccaacccctgggcagctcttgtgaccggtgccctggctggtacatgtttcagttccaccggatcctgcagtacgccctgccgagacaggagtcccagcggccattcttttggattttcatggacaacttgctgctgaccgaggatgaccaggaaactaccactcggttcctgcagaccgaagccgtgaccctgcaggacgtgagaggccgggactaccagaacgccatgcgggtgtggtccaacatccctggactgaaaagcaagcacgcacctctgacccctaaagaagaggagtacctgcaggcccaggtgcggagcagaagcaagctggacgcccctaaggtggatctgctggtgaagaattgcctcctgcccctgagagagtacttcaagtatttcagccagaatagtctgcccctgggcggcccaagcagcggcgcccctcctcccagcggcggcagcccagccggctccccaacctctaccgaggagggcacctctgagtccgccacccccgagagcggccctggcacctccaccgagcccagcgagggcagcgcacccggcagccctgccggcagccccacctccacagaggagggaaccagcaccgagcccagcgaaggcagcgccccaggcaccagcaccgagcctagtgagggcggctctggcggcggcagcgcccaggagattaaacggatcaacaagatcagaagaagacttgtgaaagacagcaacaccaagaaggccggcaagacaggccccatgaaaaccctgctggttagagtgatgacacccgatctgagagagcggctggaaaacctgagaaagaagcctgaaaatatcccccagcccatcagcaatacatctagagccaacctgaataagctgctgaccgattacaccgaaatgaagaaggcgatcctgcatgtgtactgggaagagttccagaaggaccctgtgggcctgatgagccgggtggcccagcctgccagcaagaagatcgatcagaacaagctgaaacctgagatggacgagaagggcaacctgaccaccgccggctttgcctgctctcagtgtggccagcccctgttcgtgtacaagctggagcaggtgtctgagaagggcaaggcttacaccaactacttcggacggtgcaatgtggccgagcacgaaaagctgatcctgctggcccagctgaagcccgagaaggatagcgacgaagccgtgacatatagcctgggaaagtttgggcagagggccctggatttctacagcattcatgtgaccaaggagtccacccaccccgtgaagcccctggcccagatcgccggaaacagatacgcctccggacctgtgggaaaggccctgagcgacgcatgtatgggcacaatcgcctccttcctgtctaagtaccaggacatcatcatcgaacaccagaaggtggtgaagggcaaccagaagagactggagagcctgcgggagctggccggcaaggaaaacctggaataccctagcgtgaccctgccacctcagcctcacaccaaggagggcgttgatgcctacaacgaagtgatcgcccgggtgcgaatgtgggtgaacctgaacctgtggcagaagctgaagctaagcagagatgatgccaagcctctgctgagactgaagggattcccttcctttcctctggtcgagagacaggccaacgaagtggactggtgggacatggtgtgtaacgtgaagaagctgatcaacgagaaaaaggaggatggcaaggtgttttggcagaatctggctggctacaagagacaggaagccctgagaccatacctgagcagcgaggaagatcggaagaagggaaagaaattcgctcggtaccagctgggcgacctgctgctgcacctggaaaagaagcacggcgaggactggggaaaggtgtacgacgaggcctgggagcggattgacaagaaagtggaaggcctgagcaagcacatcaagctggaagaggaacggagaagcgaggacgcccagagcaaggccgccctgaccgactggctgcgggctaaggccagcttcgtgatcgagggcctgaaggaggccgacaaggacgagttctgcagatgcgagctgaagctgcagaagtggtacggggacctgcggggaaagcccttcgccatcgaagccgagaacagcatcctggacatcagcggcttcagcaagcagtacaactgtgccttcatctggcagaaggacggcgtgaagaagctgaacctgtacctgatcatcaactacttcaagggcggcaagctgcggttcaagaagatcaaacctgaagccttcgaagccaacagattctacaccgtgatcaacaaaaagagcggcgagatcgtgcccatggaggtgaacttcaacttcgacgaccccaacctgatcatcctgcctctggcctttggcaagagacagggcagagaattcatctggaacgacctgctgtccctggaaaccggcagcctgaagctggccaacggaagagtgatcgagaagacactgtacaacagaagaacccggcaggatgagcctgccctgttcgtggccctgaccttcgagcggcgggaggtcctggactcctccaatatcaaaccaatgaacctgatcggcgtggcaagaggcgaaaacatccccgccgtgatcgccctgaccgaccccgagggctgcccactgagccggtttaaggatagcctgggaaacccaacccacatcctgagaatcggcgagagctataaggagaagcagcggaccatccaggccaagaaggaggtggagcagcggagagccggcggctacagccggaagtacgccagcaaagccaagaatctggcagacgatatggtgagaaacaccgctagagatctgctgtactacgccgtgacccaggatgccatgctgatcttcgccaacctgagccggggcttcggccggcagggcaagcggaccttcatggccgagagacagtacacacggatggaggactggctgaccgccaagctggcctacgagggcctgagcaagacctacctgtccaagacactggcccagtacacctccaagacatgcagcaactgtgggtttaccatcaccagcgccgactacgacagggtgctggagaagctgaagaagacagcaacaggctggatgaccacaattaacggcaaggagctgaaggtggagggccagattacctactacaacagatacaagagacagaacgtagtcaaggacctgtccgtcgagctggatagactgagcgaagaatctgtgaacaacgacatctcctcctggacaaagggcagaagcggagaagctctgagcctcctgaagaaaagattctcccatagacccgtgcaggagaagttcgtgtgcctgaactgcggcttcgagacacacgcagccgagcaagccgccctgaacatcgccagatcctggctgttcctgcggagccaggagtacaagaaataccagacaaacaagacaaccggcaacaccgataagagagccttcgtcgagacctggcagtccttttaccggaagaagcttaaggaggtgtggaaacctgccgtgcggtctggcggatctggcggaggctccacaagctaccagaggcccgtgagcttcaaggacgtggtggtgggcttcacccaggaggagtggcacaggctgaaccccgcccagagggccctgtacagggacgtgatgctggagacctacagcaacctggtgagcgtgggctacgagggcaccaagccctacgtgatcctgaggctggagcaggaggaggccccctggatctgcgaggccgcctgccccggctgccactgcagggagaacatctggcagaccagccccaagaaaaagagaaaagtctaagctgccttctgcggggcttgccttctggccatgcccttcttctctcccttgcacctgtacctcttggtctttgaataaagcctgagtaggaaggctagcaaaaaaaaaaaaaaaaaaaaaaaaaaaaaaaaaaaaaaaaaaaaaaaaaaaaaaaaaaaaaaaaaaaaaaaaaaaaaaaa

SEQ ID NO: 6399 - RNA, 5797 nt, synthetic construct
  source 1..5797: mol_type = other RNA
aggaaataagagagaaaagaagagtaagaagaaatataagagccaccatggcccctaagaagaagcgtaaagtgagccggatggaacgcctcgtctacgaggtgcggcagaagtgcagaaacatcgaggacatctgcatctcctgcggatctctgaacgtgaccctggagcacccactgttcatcggcggcatgtgccagaactgtaaaaactgttttctggagtgtgcctatcaatacgacgatgacggctaccagagctactgcaccatctgttgcggcggaagagaggtgctgatgtgtggaaataacaactgctgccggtgcttctgcgtggaatgcgtggacctgctggtgggccccggcgccgcccaggccgctattaaggaagatccttggaactgctacatgtgcggccacaagggcacatacggcctgctgagacggagagaggactggcctagcagactgcagatgttcttcgccaataaccacgaccaggagttcgacccccctaaggtgtaccctcccgtccccgccgagaagagaaagcccatccgggtcctgagcctgttcgatggcatcgccaccggtctgctggtgctgaaggacctgggcatccaggtggataggtacattgcctccgaggtgtgcgaggactccatcaccgtgggaatggtgcgtcatcagggcaagatcatgtacgtgggcgacgtgcggagcgtgacacagaagcatatccaggagtggggccctttcgacctggtgatcggcggcagcccttgcaatgacctgagcatcgtgaacccagcccggaagggcctgtacgagggaaccggcagactgttcttcgagttttacagactgctgcacgacgcccggcctaaggaaggcgacgaccggcccttcttttggctgttcgagaatgtggtggccatgggagtcagcgacaagcgggatattagccggttcctggagagcaaccccgtgatgatcgatgccaaggaagtgagcgccgcccaccgggccagatacttctggggcaatctgcctggcatgaacagacccctggccagcaccgtgaacgacaagctggagctgcaggagtgcctggagcacggccggatcgccaagttcagcaaggtgagaaccatcaccacccgaagcaacagcatcaaacaaggcaaggaccagcactttcctgtgttcatgaacgagaaggaggacatcctgtggtgtaccgagatggagagagtgttcgggttcccagtccactacacagatgtcagcaacatgtctagactggccagacagagactgctgggaagaagctggtccgtccctgtgatcagacacctgttcgcccctctgaaggagtacttcgcctgcgtgagcagcggcaacagcaacgccaacagccggggccccagcttctctagcggcctggtgccactgtccctgagagggagccacatgggccccatggagatctacaaaaccgtgagcgcctggaagcggcagcctgtgcgcgtgctgagcctgtttcggaatatcgataaagtcctgaaaagcctgggattcctggagagcggctctggctccggcggtggcaccctgaagtacgtggaggatgtgacaaacgtggtcagacgggatgtggagaagtggggccccttcgatctggtgtacggcagcacccaacccctgggcagctcttgtgaccggtgccctggctggtacatgtttcagttccaccggatcctgcagtacgccctgccgagacaggagtcccagcggccattcttttggattttcatggacaacttgctgctgaccgaggatgaccaggaaactaccactcggttcctgcagaccgaagccgtgaccctgcaggacgtgagaggccgggactaccagaacgccatgcgggtgtggtccaacatccctggactgaaaagcaagcacgcacctctgacccctaaagaagaggagtacctgcaggcccaggtgcggagcagaagcaagctggacgcccctaaggtggatctgctggtgaagaattgcctcctgcccctgagagagtacttcaagtatttcagccagaatagtctgcccctgggcggcccaagcagcggcgcccctcctcccagcggcggcagcccagccggctccccaacctctaccgaggagggcacctctgagtccgccacccccgagagcggccctggcacctccaccgagcccagcgagggcagcgcacccggcagccctgccggcagccccacctccacagaggagggaaccagcaccgagcccagcgaaggcagcgccccaggcaccagcaccgagcctagtgagggcggctctggcggcggcagcgcccaggagattaaacggatcaacaagatcagaagaagacttgtgaaagacagcaacaccaagaaggccggcaagacaggccccatgaaaaccctgctggttagagtgatgacacccgatctgagagagcggctggaaaacctgagaaagaagcctgaaaatatcccccagcccatcagcaatacatctagagccaacctgaataagctgctgaccgattacaccgaaatgaagaaggcgatcctgcatgtgtactgggaagagttccagaaggaccctgtgggcctgatgagccgggtggcccagcctgccagcaagaagatcgatcagaacaagctgaaacctgagatggacgagaagggcaacctgaccaccgccggctttgcctgctctcagtgtggccagcccctgttcgtgtacaagctggagcaggtgtctgagaagggcaaggcttacaccaactacttcggacggtgcaatgtggccgagcacgaaaagctgatcctgctggcccagctgaagcccgagaaggatagcgacgaagccgtgacatatagcctgggaaagtttgggcagagggccctggatttctacagcattcatgtgaccaaggagtccacccaccccgtgaagcccctggcccagatcgccggaaacagatacgcctccggacctgtgggaaaggccctgagcgacgcatgtatgggcacaatcgcctccttcctgtctaagtaccaggacatcatcatcgaacaccagaaggtggtgaagggcaaccagaagagactggagagcctgcgggagctggccggcaaggaaaacctggaataccctagcgtgaccctgccacctcagcctcacaccaaggagggcgttgatgcctacaacgaagtgatcgcccgggtgcgaatgtgggtgaacctgaacctgtggcagaagctgaagctaagcagagatgatgccaagcctctgctgagactgaagggattcccttcctttcctctggtcgagagacaggccaacgaagtggactggtgggacatggtgtgtaacgtgaagaagctgatcaacgagaaaaaggaggatggcaaggtgttttggcagaatctggctggctacaagagacaggaagccctgagaccatacctgagcagcgaggaagatcggaagaagggaaagaaattcgctcggtaccagctgggcgacctgctgctgcacctggaaaagaagcacggcgaggactggggaaaggtgtacgacgaggcctgggagcggattgacaagaaagtggaaggcctgagcaagcacatcaagctggaagaggaacggagaagcgaggacgcccagagcaaggccgccctgaccgactggctgcgggctaaggccagcttcgtgatcgagggcctgaaggaggccgacaaggacgagttctgcagatgcgagctgaagctgcagaagtggtacggggacctgcggggaaagcccttcgccatcgaagccgagaacagcatcctggacatcagcggcttcagcaagcagtacaactgtgccttcatctggcagaaggacggcgtgaagaagctgaacctgtacctgatcatcaactacttcaagggcggcaagctgcggttcaagaagatcaaacctgaagccttcgaagccaacagattctacaccgtgatcaacaaaaagagcggcgagatcgtgcccatggaggtgaacttcaacttcgacgaccccaacctgatcatcctgcctctggcctttggcaagagacagggcagagaattcatctggaacgacctgctgtccctggaaaccggcagcctgaagctggccaacggaagagtgatcgagaagacactgtacaacagaagaacccggcaggatgagcctgccctgttcgtggccctgaccttcgagcggcgggaggtcctggactcctccaatatcaaaccaatgaacctgatcggcgtggcaagaggcgaaaacatccccgccgtgatcgccctgaccgaccccgagggctgcccactgagccggtttaaggatagcctgggaaacccaacccacatcctgagaatcggcgagagctataaggagaagcagcggaccatccaggccaagaaggaggtggagcagcggagagccggcggctacagccggaagtacgccagcaaagccaagaatctggcagacgatatggtgagaaacaccgctagagatctgctgtactacgccgtgacccaggatgccatgctgatcttcgccaacctgagccggggcttcggccggcagggcaagcggaccttcatggccgagagacagtacacacggatggaggactggctgaccgccaagctggcctacgagggcctgagcaagacctacctgtccaagacactggcccagtacacctccaagacatgcagcaactgtgggtttaccatcaccagcgccgactacgacagggtgctggagaagctgaagaagacagcaacaggctggatgaccacaattaacggcaaggagctgaaggtggagggccagattacctactacaacagatacaagagacagaacgtagtcaaggacctgtccgtcgagctggatagactgagcgaagaatctgtgaacaacgacatctcctcctggacaaagggcagaagcggagaagctctgagcctcctgaagaaaagattctcccatagacccgtgcaggagaagttcgtgtgcctgaactgcggcttcgagacacacgcagccgagcaagccgccctgaacatcgccagatcctggctgttcctgcggagccaggagtacaagaaataccagacaaacaagacaaccggcaacaccgataagagagccttcgtcgagacctggcagtccttttaccggaagaagcttaaggaggtgtggaaacctgccgtgcggtctggcggatctggcggaggctccacaagcatgaccttcgaggacgtggccgtggagttcaccaggtgggagtggggccagctggaccccacccagaaggacgtgtacagggaggtgatgctggagaacttcaagaacctggccagcctgggcttccccatgagcaagccctacgtgatctgcaggctggaggagggcgaggagccctgcatcctggagagggagatcagcaccggcgcccccgccgactgggagaggaggaggcaggccaagaccagccccaagaaaaagagaaaagtctaagctgccttctgcggggcttgccttctggccatgcccttcttctctcccttgcacctgtacctcttggtctttgaataaagcctgagtaggaaggctagcaaaaaaaaaaaaaaaaaaaaaaaaaaaaaaaaaaaaaaaaaaaaaaaaaaaaaaaaaaaaaaaaaaaaaaaaaaaaaaaa

SEQ ID NO: 6400 - RNA, 5797 nt, synthetic construct
  source 1..5797: mol_type = other RNA
aggaaataagagagaaaagaagagtaagaagaaatataagagccaccatggcccctaagaagaagcgtaaagtgagccggatggaacgcctcgtctacgaggtgcggcagaagtgcagaaacatcgaggacatctgcatctcctgcggatctctgaacgtgaccctggagcacccactgttcatcggcggcatgtgccagaactgtaaaaactgttttctggagtgtgcctatcaatacgacgatgacggctaccagagctactgcaccatctgttgcggcggaagagaggtgctgatgtgtggaaataacaactgctgccggtgcttctgcgtggaatgcgtggacctgctggtgggccccggcgccgcccaggccgctattaaggaagatccttggaactgctacatgtgcggccacaagggcacatacggcctgctgagacggagagaggactggcctagcagactgcagatgttcttcgccaataaccacgaccaggagttcgacccccctaaggtgtaccctcccgtccccgccgagaagagaaagcccatccgggtcctgagcctgttcgatggcatcgccaccggtctgctggtgctgaaggacctgggcatccaggtggataggtacattgcctccgaggtgtgcgaggactccatcaccgtgggaatggtgcgtcatcagggcaagatcatgtacgtgggcgacgtgcggagcgtgacacagaagcatatccaggagtggggccctttcgacctggtgatcggcggcagcccttgcaatgacctgagcatcgtgaacccagcccggaagggcctgtacgagggaaccggcagactgttcttcgagttttacagactgctgcacgacgcccggcctaaggaaggcgacgaccggcccttcttttggctgttcgagaatgtggtggccatgggagtcagcgacaagcgggatattagccggttcctggagagcaaccccgtgatgatcgatgccaaggaagtgagcgccgcccaccgggccagatacttctggggcaatctgcctggcatgaacagacccctggccagcaccgtgaacgacaagctggagctgcaggagtgcctggagcacggccggatcgccaagttcagcaaggtgagaaccatcaccacccgaagcaacagcatcaaacaaggcaaggaccagcactttcctgtgttcatgaacgagaaggaggacatcctgtggtgtaccgagatggagagagtgttcgggttcccagtccactacacagatgtcagcaacatgtctagactggccagacagagactgctgggaagaagctggtccgtccctgtgatcagacacctgttcgcccctctgaaggagtacttcgcctgcgtgagcagcggcaacagcaacgccaacagccggggccccagcttctctagcggcctggtgccactgtccctgagagggagccacatgggccccatggagatctacaaaaccgtgagcgcctggaagcggcagcctgtgcgcgtgctgagcctgtttcggaatatcgataaagtcctgaaaagcctgggattcctggagagcggctctggctccggcggtggcaccctgaagtacgtggaggatgtgacaaacgtggtcagacgggatgtggagaagtggggccccttcgatctggtgtacggcagcacccaacccctgggcagctcttgtgaccggtgccctggctggtacatgtttcagttccaccggatcctgcagtacgccctgccgagacaggagtcccagcggccattcttttggattttcatggacaacttgctgctgaccgaggatgaccaggaaactaccactcggttcctgcagaccgaagccgtgaccctgcaggacgtgagaggccgggactaccagaacgccatgcgggtgtggtccaacatccctggactgaaaagcaagcacgcacctctgacccctaaagaagaggagtacctgcaggcccaggtgcggagcagaagcaagctggacgcccctaaggtggatctgctggtgaagaattgcctcctgcccctgagagagtacttcaagtatttcagccagaatagtctgcccctgggcggcccaagcagcggcgcccctcctcccagcggcggcagcccagccggctccccaacctctaccgaggagggcacctctgagtccgccacccccgagagcggccctggcacctccaccgagcccagcgagggcagcgcacccggcagccctgccggcagccccacctccacagaggagggaaccagcaccgagcccagcgaaggcagcgccccaggcaccagcaccgagcctagtgagggcggctctggcggcggcagcgcccaggagattaaacggatcaacaagatcagaagaagacttgtgaaagacagcaacaccaagaaggccggcaagacaggccccatgaaaaccctgctggttagagtgatgacacccgatctgagagagcggctggaaaacctgagaaagaagcctgaaaatatcccccagcccatcagcaatacatctagagccaacctgaataagctgctgaccgattacaccgaaatgaagaaggcgatcctgcatgtgtactgggaagagttccagaaggaccctgtgggcctgatgagccgggtggcccagcctgccagcaagaagatcgatcagaacaagctgaaacctgagatggacgagaagggcaacctgaccaccgccggctttgcctgctctcagtgtggccagcccctgttcgtgtacaagctggagcaggtgtctgagaagggcaaggcttacaccaactacttcggacggtgcaatgtggccgagcacgaaaagctgatcctgctggcccagctgaagcccgagaaggatagcgacgaagccgtgacatatagcctgggaaagtttgggcagagggccctggatttctacagcattcatgtgaccaaggagtccacccaccccgtgaagcccctggcccagatcgccggaaacagatacgcctccggacctgtgggaaaggccctgagcgacgcatgtatgggcacaatcgcctccttcctgtctaagtaccaggacatcatcatcgaacaccagaaggtggtgaagggcaaccagaagagactggagagcctgcgggagctggccggcaaggaaaacctggaataccctagcgtgaccctgccacctcagcctcacaccaaggagggcgttgatgcctacaacgaagtgatcgcccgggtgcgaatgtgggtgaacctgaacctgtggcagaagctgaagctaagcagagatgatgccaagcctctgctgagactgaagggattcccttcctttcctctggtcgagagacaggccaacgaagtggactggtgggacatggtgtgtaacgtgaagaagctgatcaacgagaaaaaggaggatggcaaggtgttttggcagaatctggctggctacaagagacaggaagccctgagaccatacctgagcagcgaggaagatcggaagaagggaaagaaattcgctcggtaccagctgggcgacctgctgctgcacctggaaaagaagcacggcgaggactggggaaaggtgtacgacgaggcctgggagcggattgacaagaaagtggaaggcctgagcaagcacatcaagctggaagaggaacggagaagcgaggacgcccagagcaaggccgccctgaccgactggctgcgggctaaggccagcttcgtgatcgagggcctgaaggaggccgacaaggacgagttctgcagatgcgagctgaagctgcagaagtggtacggggacctgcggggaaagcccttcgccatcgaagccgagaacagcatcctggacatcagcggcttcagcaagcagtacaactgtgccttcatctggcagaaggacggcgtgaagaagctgaacctgtacctgatcatcaactacttcaagggcggcaagctgcggttcaagaagatcaaacctgaagccttcgaagccaacagattctacaccgtgatcaacaaaaagagcggcgagatcgtgcccatggaggtgaacttcaacttcgacgaccccaacctgatcatcctgcctctggcctttggcaagagacagggcagagaattcatctggaacgacctgctgtccctggaaaccggcagcctgaagctggccaacggaagagtgatcgagaagacactgtacaacagaagaacccggcaggatgagcctgccctgttcgtggccctgaccttcgagcggcgggaggtcctggactcctccaatatcaaaccaatgaacctgatcggcgtggcaagaggcgaaaacatccccgccgtgatcgccctgaccgaccccgagggctgcccactgagccggtttaaggatagcctgggaaacccaacccacatcctgagaatcggcgagagctataaggagaagcagcggaccatccaggccaagaaggaggtggagcagcggagagccggcggctacagccggaagtacgccagcaaagccaagaatctggcagacgatatggtgagaaacaccgctagagatctgctgtactacgccgtgacccaggatgccatgctgatcttcgccaacctgagccggggcttcggccggcagggcaagcggaccttcatggccgagagacagtacacacggatggaggactggctgaccgccaagctggcctacgagggcctgagcaagacctacctgtccaagacactggcccagtacacctccaagacatgcagcaactgtgggtttaccatcaccagcgccgactacgacagggtgctggagaagctgaagaagacagcaacaggctggatgaccacaattaacggcaaggagctgaaggtggagggccagattacctactacaacagatacaagagacagaacgtagtcaaggacctgtccgtcgagctggatagactgagcgaagaatctgtgaacaacgacatctcctcctggacaaagggcagaagcggagaagctctgagcctcctgaagaaaagattctcccatagacccgtgcaggagaagttcgtgtgcctgaactgcggcttcgagacacacgcagccgagcaagccgccctgaacatcgccagatcctggctgttcctgcggagccaggagtacaagaaataccagacaaacaagacaaccggcaacaccgataagagagccttcgtcgagacctggcagtccttttaccggaagaagcttaaggaggtgtggaaacctgccgtgcggtctggcggatctggcggaggctccacaagcagctacgagggcagcgtgagcttcagggacgtggccatcgacttcagcagggaggagtggaggcacctggacctgagccagaggaacctgtacagggacgtgatgctggagacctacagccacctgctgagcgtgggctaccaggtgcccgaggccgaggtggtgatgctggagcagggcaaggagccctgggccctgcagggcgagaggcccaggcacagctgccccggcgagaagctgtggaccagccccaagaaaaagagaaaagtctaagctgccttctgcggggcttgccttctggccatgcccttcttctctcccttgcacctgtacctcttggtctttgaataaagcctgagtaggaaggctagcaaaaaaaaaaaaaaaaaaaaaaaaaaaaaaaaaaaaaaaaaaaaaaaaaaaaaaaaaaaaaaaaaaaaaaaaaaaaaaaa

SEQ ID NO: 6401 - RNA, 5797 nt, synthetic construct
  source 1..5797: mol_type = other RNA
aggaaataagagagaaaagaagagtaagaagaaatataagagccaccatggcccctaagaagaagcgtaaagtgagccggatggaacgcctcgtctacgaggtgcggcagaagtgcagaaacatcgaggacatctgcatctcctgcggatctctgaacgtgaccctggagcacccactgttcatcggcggcatgtgccagaactgtaaaaactgttttctggagtgtgcctatcaatacgacgatgacggctaccagagctactgcaccatctgttgcggcggaagagaggtgctgatgtgtggaaataacaactgctgccggtgcttctgcgtggaatgcgtggacctgctggtgggccccggcgccgcccaggccgctattaaggaagatccttggaactgctacatgtgcggccacaagggcacatacggcctgctgagacggagagaggactggcctagcagactgcagatgttcttcgccaataaccacgaccaggagttcgacccccctaaggtgtaccctcccgtccccgccgagaagagaaagcccatccgggtcctgagcctgttcgatggcatcgccaccggtctgctggtgctgaaggacctgggcatccaggtggataggtacattgcctccgaggtgtgcgaggactccatcaccgtgggaatggtgcgtcatcagggcaagatcatgtacgtgggcgacgtgcggagcgtgacacagaagcatatccaggagtggggccctttcgacctggtgatcggcggcagcccttgcaatgacctgagcatcgtgaacccagcccggaagggcctgtacgagggaaccggcagactgttcttcgagttttacagactgctgcacgacgcccggcctaaggaaggcgacgaccggcccttcttttggctgttcgagaatgtggtggccatgggagtcagcgacaagcgggatattagccggttcctggagagcaaccccgtgatgatcgatgccaaggaagtgagcgccgcccaccgggccagatacttctggggcaatctgcctggcatgaacagacccctggccagcaccgtgaacgacaagctggagctgcaggagtgcctggagcacggccggatcgccaagttcagcaaggtgagaaccatcaccacccgaagcaacagcatcaaacaaggcaaggaccagcactttcctgtgttcatgaacgagaaggaggacatcctgtggtgtaccgagatggagagagtgttcgggttcccagtccactacacagatgtcagcaacatgtctagactggccagacagagactgctgggaagaagctggtccgtccctgtgatcagacacctgttcgcccctctgaaggagtacttcgcctgcgtgagcagcggcaacagcaacgccaacagccggggccccagcttctctagcggcctggtgccactgtccctgagagggagccacatgggccccatggagatctacaaaaccgtgagcgcctggaagcggcagcctgtgcgcgtgctgagcctgtttcggaatatcgataaagtcctgaaaagcctgggattcctggagagcggctctggctccggcggtggcaccctgaagtacgtggaggatgtgacaaacgtggtcagacgggatgtggagaagtggggccccttcgatctggtgtacggcagcacccaacccctgggcagctcttgtgaccggtgccctggctggtacatgtttcagttccaccggatcctgcagtacgccctgccgagacaggagtcccagcggccattcttttggattttcatggacaacttgctgctgaccgaggatgaccaggaaactaccactcggttcctgcagaccgaagccgtgaccctgcaggacgtgagaggccgggactaccagaacgccatgcgggtgtggtccaacatccctggactgaaaagcaagcacgcacctctgacccctaaagaagaggagtacctgcaggcccaggtgcggagcagaagcaagctggacgcccctaaggtggatctgctggtgaagaattgcctcctgcccctgagagagtacttcaagtatttcagccagaatagtctgcccctgggcggcccaagcagcggcgcccctcctcccagcggcggcagcccagccggctccccaacctctaccgaggagggcacctctgagtccgccacccccgagagcggccctggcacctccaccgagcccagcgagggcagcgcacccggcagccctgccggcagccccacctccacagaggagggaaccagcaccgagcccagcgaaggcagcgccccaggcaccagcaccgagcctagtgagggcggctctggcggcggcagcgcccaggagattaaacggatcaacaagatcagaagaagacttgtgaaagacagcaacaccaagaaggccggcaagacaggccccatgaaaaccctgctggttagagtgatgacacccgatctgagagagcggctggaaaacctgagaaagaagcctgaaaatatcccccagcccatcagcaatacatctagagccaacctgaataagctgctgaccgattacaccgaaatgaagaaggcgatcctgcatgtgtactgggaagagttccagaaggaccctgtgggcctgatgagccgggtggcccagcctgccagcaagaagatcgatcagaacaagctgaaacctgagatggacgagaagggcaacctgaccaccgccggctttgcctgctctcagtgtggccagcccctgttcgtgtacaagctggagcaggtgtctgagaagggcaaggcttacaccaactacttcggacggtgcaatgtggccgagcacgaaaagctgatcctgctggcccagctgaagcccgagaaggatagcgacgaagccgtgacatatagcctgggaaagtttgggcagagggccctggatttctacagcattcatgtgaccaaggagtccacccaccccgtgaagcccctggcccagatcgccggaaacagatacgcctccggacctgtgggaaaggccctgagcgacgcatgtatgggcacaatcgcctccttcctgtctaagtaccaggacatcatcatcgaacaccagaaggtggtgaagggcaaccagaagagactggagagcctgcgggagctggccggcaaggaaaacctggaataccctagcgtgaccctgccacctcagcctcacaccaaggagggcgttgatgcctacaacgaagtgatcgcccgggtgcgaatgtgggtgaacctgaacctgtggcagaagctgaagctaagcagagatgatgccaagcctctgctgagactgaagggattcccttcctttcctctggtcgagagacaggccaacgaagtggactggtgggacatggtgtgtaacgtgaagaagctgatcaacgagaaaaaggaggatggcaaggtgttttggcagaatctggctggctacaagagacaggaagccctgagaccatacctgagcagcgaggaagatcggaagaagggaaagaaattcgctcggtaccagctgggcgacctgctgctgcacctggaaaagaagcacggcgaggactggggaaaggtgtacgacgaggcctgggagcggattgacaagaaagtggaaggcctgagcaagcacatcaagctggaagaggaacggagaagcgaggacgcccagagcaaggccgccctgaccgactggctgcgggctaaggccagcttcgtgatcgagggcctgaaggaggccgacaaggacgagttctgcagatgcgagctgaagctgcagaagtggtacggggacctgcggggaaagcccttcgccatcgaagccgagaacagcatcctggacatcagcggcttcagcaagcagtacaactgtgccttcatctggcagaaggacggcgtgaagaagctgaacctgtacctgatcatcaactacttcaagggcggcaagctgcggttcaagaagatcaaacctgaagccttcgaagccaacagattctacaccgtgatcaacaaaaagagcggcgagatcgtgcccatggaggtgaacttcaacttcgacgaccccaacctgatcatcctgcctctggcctttggcaagagacagggcagagaattcatctggaacgacctgctgtccctggaaaccggcagcctgaagctggccaacggaagagtgatcgagaagacactgtacaacagaagaacccggcaggatgagcctgccctgttcgtggccctgaccttcgagcggcgggaggtcctggactcctccaatatcaaaccaatgaacctgatcggcgtggcaagaggcgaaaacatccccgccgtgatcgccctgaccgaccccgagggctgcccactgagccggtttaaggatagcctgggaaacccaacccacatcctgagaatcggcgagagctataaggagaagcagcggaccatccaggccaagaaggaggtggagcagcggagagccggcggctacagccggaagtacgccagcaaagccaagaatctggcagacgatatggtgagaaacaccgctagagatctgctgtactacgccgtgacccaggatgccatgctgatcttcgccaacctgagccggggcttcggccggcagggcaagcggaccttcatggccgagagacagtacacacggatggaggactggctgaccgccaagctggcctacgagggcctgagcaagacctacctgtccaagacactggcccagtacacctccaagacatgcagcaactgtgggtttaccatcaccagcgccgactacgacagggtgctggagaagctgaagaagacagcaacaggctggatgaccacaattaacggcaaggagctgaaggtggagggccagattacctactacaacagatacaagagacagaacgtagtcaaggacctgtccgtcgagctggatagactgagcgaagaatctgtgaacaacgacatctcctcctggacaaagggcagaagcggagaagctctgagcctcctgaagaaaagattctcccatagacccgtgcaggagaagttcgtgtgcctgaactgcggcttcgagacacacgcagccgagcaagccgccctgaacatcgccagatcctggctgttcctgcggagccaggagtacaagaaataccagacaaacaagacaaccggcaacaccgataagagagccttcgtcgagacctggcagtccttttaccggaagaagcttaaggaggtgtggaaacctgccgtgcggtctggcggatctggcggaggctccacaagcttccagaccctgctggccttcgaggacgtggccgtgttcttcagcgaggaggagtgggagctgctggacgagctgcagaaggaggtgtacaagaacaccatgagggagaactacgagaccctgctgagcctgggcctgaccaacatgaagcccgagatcatcgccaagatcgacgccggcgaggcccccagcgtgcagaacgccagctacctggagaagaggggcaagaagagcgccgccggcaccagccccaagaaaaagagaaaagtctaagctgccttctgcggggcttgccttctggccatgcccttcttctctcccttgcacctgtacctcttggtctttgaataaagcctgagtaggaaggctagcaaaaaaaaaaaaaaaaaaaaaaaaaaaaaaaaaaaaaaaaaaaaaaaaaaaaaaaaaaaaaaaaaaaaaaaaaaaaaaaa

SEQ ID NO: 6402 - RNA, 5797 nt, synthetic construct
  source 1..5797: mol_type = other RNA
aggaaataagagagaaaagaagagtaagaagaaatataagagccaccatggcccctaagaagaagcgtaaagtgagccggatggaacgcctcgtctacgaggtgcggcagaagtgcagaaacatcgaggacatctgcatctcctgcggatctctgaacgtgaccctggagcacccactgttcatcggcggcatgtgccagaactgtaaaaactgttttctggagtgtgcctatcaatacgacgatgacggctaccagagctactgcaccatctgttgcggcggaagagaggtgctgatgtgtggaaataacaactgctgccggtgcttctgcgtggaatgcgtggacctgctggtgggccccggcgccgcccaggccgctattaaggaagatccttggaactgctacatgtgcggccacaagggcacatacggcctgctgagacggagagaggactggcctagcagactgcagatgttcttcgccaataaccacgaccaggagttcgacccccctaaggtgtaccctcccgtccccgccgagaagagaaagcccatccgggtcctgagcctgttcgatggcatcgccaccggtctgctggtgctgaaggacctgggcatccaggtggataggtacattgcctccgaggtgtgcgaggactccatcaccgtgggaatggtgcgtcatcagggcaagatcatgtacgtgggcgacgtgcggagcgtgacacagaagcatatccaggagtggggccctttcgacctggtgatcggcggcagcccttgcaatgacctgagcatcgtgaacccagcccggaagggcctgtacgagggaaccggcagactgttcttcgagttttacagactgctgcacgacgcccggcctaaggaaggcgacgaccggcccttcttttggctgttcgagaatgtggtggccatgggagtcagcgacaagcgggatattagccggttcctggagagcaaccccgtgatgatcgatgccaaggaagtgagcgccgcccaccgggccagatacttctggggcaatctgcctggcatgaacagacccctggccagcaccgtgaacgacaagctggagctgcaggagtgcctggagcacggccggatcgccaagttcagcaaggtgagaaccatcaccacccgaagcaacagcatcaaacaaggcaaggaccagcactttcctgtgttcatgaacgagaaggaggacatcctgtggtgtaccgagatggagagagtgttcgggttcccagtccactacacagatgtcagcaacatgtctagactggccagacagagactgctgggaagaagctggtccgtccctgtgatcagacacctgttcgcccctctgaaggagtacttcgcctgcgtgagcagcggcaacagcaacgccaacagccggggccccagcttctctagcggcctggtgccactgtccctgagagggagccacatgggccccatggagatctacaaaaccgtgagcgcctggaagcggcagcctgtgcgcgtgctgagcctgtttcggaatatcgataaagtcctgaaaagcctgggattcctggagagcggctctggctccggcggtggcaccctgaagtacgtggaggatgtgacaaacgtggtcagacgggatgtggagaagtggggccccttcgatctggtgtacggcagcacccaacccctgggcagctcttgtgaccggtgccctggctggtacatgtttcagttccaccggatcctgcagtacgccctgccgagacaggagtcccagcggccattcttttggattttcatggacaacttgctgctgaccgaggatgaccaggaaactaccactcggttcctgcagaccgaagccgtgaccctgcaggacgtgagaggccgggactaccagaacgccatgcgggtgtggtccaacatccctggactgaaaagcaagcacgcacctctgacccctaaagaagaggagtacctgcaggcccaggtgcggagcagaagcaagctggacgcccctaaggtggatctgctggtgaagaattgcctcctgcccctgagagagtacttcaagtatttcagccagaatagtctgcccctgggcggcccaagcagcggcgcccctcctcccagcggcggcagcccagccggctccccaacctctaccgaggagggcacctctgagtccgccacccccgagagcggccctggcacctccaccgagcccagcgagggcagcgcacccggcagccctgccggcagccccacctccacagaggagggaaccagcaccgagcccagcgaaggcagcgccccaggcaccagcaccgagcctagtgagggcggctctggcggcggcagcgcccaggagattaaacggatcaacaagatcagaagaagacttgtgaaagacagcaacaccaagaaggccggcaagacaggccccatgaaaaccctgctggttagagtgatgacacccgatctgagagagcggctggaaaacctgagaaagaagcctgaaaatatcccccagcccatcagcaatacatctagagccaacctgaataagctgctgaccgattacaccgaaatgaagaaggcgatcctgcatgtgtactgggaagagttccagaaggaccctgtgggcctgatgagccgggtggcccagcctgccagcaagaagatcgatcagaacaagctgaaacctgagatggacgagaagggcaacctgaccaccgccggctttgcctgctctcagtgtggccagcccctgttcgtgtacaagctggagcaggtgtctgagaagggcaaggcttacaccaactacttcggacggtgcaatgtggccgagcacgaaaagctgatcctgctggcccagctgaagcccgagaaggatagcgacgaagccgtgacatatagcctgggaaagtttgggcagagggccctggatttctacagcattcatgtgaccaaggagtccacccaccccgtgaagcccctggcccagatcgccggaaacagatacgcctccggacctgtgggaaaggccctgagcgacgcatgtatgggcacaatcgcctccttcctgtctaagtaccaggacatcatcatcgaacaccagaaggtggtgaagggcaaccagaagagactggagagcctgcgggagctggccggcaaggaaaacctggaataccctagcgtgaccctgccacctcagcctcacaccaaggagggcgttgatgcctacaacgaagtgatcgcccgggtgcgaatgtgggtgaacctgaacctgtggcagaagctgaagctaagcagagatgatgccaagcctctgctgagactgaagggattcccttcctttcctctggtcgagagacaggccaacgaagtggactggtgggacatggtgtgtaacgtgaagaagctgatcaacgagaaaaaggaggatggcaaggtgttttggcagaatctggctggctacaagagacaggaagccctgagaccatacctgagcagcgaggaagatcggaagaagggaaagaaattcgctcggtaccagctgggcgacctgctgctgcacctggaaaagaagcacggcgaggactggggaaaggtgtacgacgaggcctgggagcggattgacaagaaagtggaaggcctgagcaagcacatcaagctggaagaggaacggagaagcgaggacgcccagagcaaggccgccctgaccgactggctgcgggctaaggccagcttcgtgatcgagggcctgaaggaggccgacaaggacgagttctgcagatgcgagctgaagctgcagaagtggtacggggacctgcggggaaagcccttcgccatcgaagccgagaacagcatcctggacatcagcggcttcagcaagcagtacaactgtgccttcatctggcagaaggacggcgtgaagaagctgaacctgtacctgatcatcaactacttcaagggcggcaagctgcggttcaagaagatcaaacctgaagccttcgaagccaacagattctacaccgtgatcaacaaaaagagcggcgagatcgtgcccatggaggtgaacttcaacttcgacgaccccaacctgatcatcctgcctctggcctttggcaagagacagggcagagaattcatctggaacgacctgctgtccctggaaaccggcagcctgaagctggccaacggaagagtgatcgagaagacactgtacaacagaagaacccggcaggatgagcctgccctgttcgtggccctgaccttcgagcggcgggaggtcctggactcctccaatatcaaaccaatgaacctgatcggcgtggcaagaggcgaaaacatccccgccgtgatcgccctgaccgaccccgagggctgcccactgagccggtttaaggatagcctgggaaacccaacccacatcctgagaatcggcgagagctataaggagaagcagcggaccatccaggccaagaaggaggtggagcagcggagagccggcggctacagccggaagtacgccagcaaagccaagaatctggcagacgatatggtgagaaacaccgctagagatctgctgtactacgccgtgacccaggatgccatgctgatcttcgccaacctgagccggggcttcggccggcagggcaagcggaccttcatggccgagagacagtacacacggatggaggactggctgaccgccaagctggcctacgagggcctgagcaagacctacctgtccaagacactggcccagtacacctccaagacatgcagcaactgtgggtttaccatcaccagcgccgactacgacagggtgctggagaagctgaagaagacagcaacaggctggatgaccacaattaacggcaaggagctgaaggtggagggccagattacctactacaacagatacaagagacagaacgtagtcaaggacctgtccgtcgagctggatagactgagcgaagaatctgtgaacaacgacatctcctcctggacaaagggcagaagcggagaagctctgagcctcctgaagaaaagattctcccatagacccgtgcaggagaagttcgtgtgcctgaactgcggcttcgagacacacgcagccgagcaagccgccctgaacatcgccagatcctggctgttcctgcggagccaggagtacaagaaataccagacaaacaagacaaccggcaacaccgataagagagccttcgtcgagacctggcagtccttttaccggaagaagcttaaggaggtgtggaaacctgccgtgcggtctggcggatctggcggaggctccacaagccaccaggagagcctgaccttcaaggacgtggccgtgaacttcacccaggaggagtggcaccacgtggacgccgcccagaggaggctgtacaaggacgtgatgctggagaactacagccacctggtgagcctgggctaccaggtgagcaagcccgaggtgatcttcaagctggagcagggcgaggagccctggatcgccgagggcgagatccagaggcccgtgtgccccgactggaagaccaggaccagccccaagaaaaagagaaaagtctaagctgccttctgcggggcttgccttctggccatgcccttcttctctcccttgcacctgtacctcttggtctttgaataaagcctgagtaggaaggctagcaaaaaaaaaaaaaaaaaaaaaaaaaaaaaaaaaaaaaaaaaaaaaaaaaaaaaaaaaaaaaaaaaaaaaaaaaaaaaaaa

SEQ ID NO: 6403 - RNA, 5797 nt, synthetic construct
  source 1..5797: mol_type = other RNA
aggaaataagagagaaaagaagagtaagaagaaatataagagccaccatggcccctaagaagaagcgtaaagtgagccggatggaacgcctcgtctacgaggtgcggcagaagtgcagaaacatcgaggacatctgcatctcctgcggatctctgaacgtgaccctggagcacccactgttcatcggcggcatgtgccagaactgtaaaaactgttttctggagtgtgcctatcaatacgacgatgacggctaccagagctactgcaccatctgttgcggcggaagagaggtgctgatgtgtggaaataacaactgctgccggtgcttctgcgtggaatgcgtggacctgctggtgggccccggcgccgcccaggccgctattaaggaagatccttggaactgctacatgtgcggccacaagggcacatacggcctgctgagacggagagaggactggcctagcagactgcagatgttcttcgccaataaccacgaccaggagttcgacccccctaaggtgtaccctcccgtccccgccgagaagagaaagcccatccgggtcctgagcctgttcgatggcatcgccaccggtctgctggtgctgaaggacctgggcatccaggtggataggtacattgcctccgaggtgtgcgaggactccatcaccgtgggaatggtgcgtcatcagggcaagatcatgtacgtgggcgacgtgcggagcgtgacacagaagcatatccaggagtggggccctttcgacctggtgatcggcggcagcccttgcaatgacctgagcatcgtgaacccagcccggaagggcctgtacgagggaaccggcagactgttcttcgagttttacagactgctgcacgacgcccggcctaaggaaggcgacgaccggcccttcttttggctgttcgagaatgtggtggccatgggagtcagcgacaagcgggatattagccggttcctggagagcaaccccgtgatgatcgatgccaaggaagtgagcgccgcccaccgggccagatacttctggggcaatctgcctggcatgaacagacccctggccagcaccgtgaacgacaagctggagctgcaggagtgcctggagcacggccggatcgccaagttcagcaaggtgagaaccatcaccacccgaagcaacagcatcaaacaaggcaaggaccagcactttcctgtgttcatgaacgagaaggaggacatcctgtggtgtaccgagatggagagagtgttcgggttcccagtccactacacagatgtcagcaacatgtctagactggccagacagagactgctgggaagaagctggtccgtccctgtgatcagacacctgttcgcccctctgaaggagtacttcgcctgcgtgagcagcggcaacagcaacgccaacagccggggccccagcttctctagcggcctggtgccactgtccctgagagggagccacatgggccccatggagatctacaaaaccgtgagcgcctggaagcggcagcctgtgcgcgtgctgagcctgtttcggaatatcgataaagtcctgaaaagcctgggattcctggagagcggctctggctccggcggtggcaccctgaagtacgtggaggatgtgacaaacgtggtcagacgggatgtggagaagtggggccccttcgatctggtgtacggcagcacccaacccctgggcagctcttgtgaccggtgccctggctggtacatgtttcagttccaccggatcctgcagtacgccctgccgagacaggagtcccagcggccattcttttggattttcatggacaacttgctgctgaccgaggatgaccaggaaactaccactcggttcctgcagaccgaagccgtgaccctgcaggacgtgagaggccgggactaccagaacgccatgcgggtgtggtccaacatccctggactgaaaagcaagcacgcacctctgacccctaaagaagaggagtacctgcaggcccaggtgcggagcagaagcaagctggacgcccctaaggtggatctgctggtgaagaattgcctcctgcccctgagagagtacttcaagtatttcagccagaatagtctgcccctgggcggcccaagcagcggcgcccctcctcccagcggcggcagcccagccggctccccaacctctaccgaggagggcacctctgagtccgccacccccgagagcggccctggcacctccaccgagcccagcgagggcagcgcacccggcagccctgccggcagccccacctccacagaggagggaaccagcaccgagcccagcgaaggcagcgccccaggcaccagcaccgagcctagtgagggcggctctggcggcggcagcgcccaggagattaaacggatcaacaagatcagaagaagacttgtgaaagacagcaacaccaagaaggccggcaagacaggccccatgaaaaccctgctggttagagtgatgacacccgatctgagagagcggctggaaaacctgagaaagaagcctgaaaatatcccccagcccatcagcaatacatctagagccaacctgaataagctgctgaccgattacaccgaaatgaagaaggcgatcctgcatgtgtactgggaagagttccagaaggaccctgtgggcctgatgagccgggtggcccagcctgccagcaagaagatcgatcagaacaagctgaaacctgagatggacgagaagggcaacctgaccaccgccggctttgcctgctctcagtgtggccagcccctgttcgtgtacaagctggagcaggtgtctgagaagggcaaggcttacaccaactacttcggacggtgcaatgtggccgagcacgaaaagctgatcctgctggcccagctgaagcccgagaaggatagcgacgaagccgtgacatatagcctgggaaagtttgggcagagggccctggatttctacagcattcatgtgaccaaggagtccacccaccccgtgaagcccctggcccagatcgccggaaacagatacgcctccggacctgtgggaaaggccctgagcgacgcatgtatgggcacaatcgcctccttcctgtctaagtaccaggacatcatcatcgaacaccagaaggtggtgaagggcaaccagaagagactggagagcctgcgggagctggccggcaaggaaaacctggaataccctagcgtgaccctgccacctcagcctcacaccaaggagggcgttgatgcctacaacgaagtgatcgcccgggtgcgaatgtgggtgaacctgaacctgtggcagaagctgaagctaagcagagatgatgccaagcctctgctgagactgaagggattcccttcctttcctctggtcgagagacaggccaacgaagtggactggtgggacatggtgtgtaacgtgaagaagctgatcaacgagaaaaaggaggatggcaaggtgttttggcagaatctggctggctacaagagacaggaagccctgagaccatacctgagcagcgaggaagatcggaagaagggaaagaaattcgctcggtaccagctgggcgacctgctgctgcacctggaaaagaagcacggcgaggactggggaaaggtgtacgacgaggcctgggagcggattgacaagaaagtggaaggcctgagcaagcacatcaagctggaagaggaacggagaagcgaggacgcccagagcaaggccgccctgaccgactggctgcgggctaaggccagcttcgtgatcgagggcctgaaggaggccgacaaggacgagttctgcagatgcgagctgaagctgcagaagtggtacggggacctgcggggaaagcccttcgccatcgaagccgagaacagcatcctggacatcagcggcttcagcaagcagtacaactgtgccttcatctggcagaaggacggcgtgaagaagctgaacctgtacctgatcatcaactacttcaagggcggcaagctgcggttcaagaagatcaaacctgaagccttcgaagccaacagattctacaccgtgatcaacaaaaagagcggcgagatcgtgcccatggaggtgaacttcaacttcgacgaccccaacctgatcatcctgcctctggcctttggcaagagacagggcagagaattcatctggaacgacctgctgtccctggaaaccggcagcctgaagctggccaacggaagagtgatcgagaagacactgtacaacagaagaacccggcaggatgagcctgccctgttcgtggccctgaccttcgagcggcgggaggtcctggactcctccaatatcaaaccaatgaacctgatcggcgtggcaagaggcgaaaacatccccgccgtgatcgccctgaccgaccccgagggctgcccactgagccggtttaaggatagcctgggaaacccaacccacatcctgagaatcggcgagagctataaggagaagcagcggaccatccaggccaagaaggaggtggagcagcggagagccggcggctacagccggaagtacgccagcaaagccaagaatctggcagacgatatggtgagaaacaccgctagagatctgctgtactacgccgtgacccaggatgccatgctgatcttcgccaacctgagccggggcttcggccggcagggcaagcggaccttcatggccgagagacagtacacacggatggaggactggctgaccgccaagctggcctacgagggcctgagcaagacctacctgtccaagacactggcccagtacacctccaagacatgcagcaactgtgggtttaccatcaccagcgccgactacgacagggtgctggagaagctgaagaagacagcaacaggctggatgaccacaattaacggcaaggagctgaaggtggagggccagattacctactacaacagatacaagagacagaacgtagtcaaggacctgtccgtcgagctggatagactgagcgaagaatctgtgaacaacgacatctcctcctggacaaagggcagaagcggagaagctctgagcctcctgaagaaaagattctcccatagacccgtgcaggagaagttcgtgtgcctgaactgcggcttcgagacacacgcagccgagcaagccgccctgaacatcgccagatcctggctgttcctgcggagccaggagtacaagaaataccagacaaacaagacaaccggcaacaccgataagagagccttcgtcgagacctggcagtccttttaccggaagaagcttaaggaggtgtggaaacctgccgtgcggtctggcggatctggcggaggctccacaagcaagcccggcgccgtgagcttcgccgacgtggccgtgtacttcagcagggaggagtggggctgcctgaggcccgcccagagggccctgtacagggacgtgatgagggagacctacggccacctgggcgccctgggcgtgggcggcagcaagcccgccctgatcagctgggtggaggagaaggccgagctgtgggaccccgccgcccaggaccccgaggtggccaagtgccccaccgaggccgacaccagccccaagaaaaagagaaaagtctaagctgccttctgcggggcttgccttctggccatgcccttcttctctcccttgcacctgtacctcttggtctttgaataaagcctgagtaggaaggctagcaaaaaaaaaaaaaaaaaaaaaaaaaaaaaaaaaaaaaaaaaaaaaaaaaaaaaaaaaaaaaaaaaaaaaaaaaaaaaaaa

SEQ ID NO: 6404 - RNA, 5797 nt, synthetic construct
  source 1..5797: mol_type = other RNA
aggaaataagagagaaaagaagagtaagaagaaatataagagccaccatggcccctaagaagaagcgtaaagtgagccggatggaacgcctcgtctacgaggtgcggcagaagtgcagaaacatcgaggacatctgcatctcctgcggatctctgaacgtgaccctggagcacccactgttcatcggcggcatgtgccagaactgtaaaaactgttttctggagtgtgcctatcaatacgacgatgacggctaccagagctactgcaccatctgttgcggcggaagagaggtgctgatgtgtggaaataacaactgctgccggtgcttctgcgtggaatgcgtggacctgctggtgggccccggcgccgcccaggccgctattaaggaagatccttggaactgctacatgtgcggccacaagggcacatacggcctgctgagacggagagaggactggcctagcagactgcagatgttcttcgccaataaccacgaccaggagttcgacccccctaaggtgtaccctcccgtccccgccgagaagagaaagcccatccgggtcctgagcctgttcgatggcatcgccaccggtctgctggtgctgaaggacctgggcatccaggtggataggtacattgcctccgaggtgtgcgaggactccatcaccgtgggaatggtgcgtcatcagggcaagatcatgtacgtgggcgacgtgcggagcgtgacacagaagcatatccaggagtggggccctttcgacctggtgatcggcggcagcccttgcaatgacctgagcatcgtgaacccagcccggaagggcctgtacgagggaaccggcagactgttcttcgagttttacagactgctgcacgacgcccggcctaaggaaggcgacgaccggcccttcttttggctgttcgagaatgtggtggccatgggagtcagcgacaagcgggatattagccggttcctggagagcaaccccgtgatgatcgatgccaaggaagtgagcgccgcccaccgggccagatacttctggggcaatctgcctggcatgaacagacccctggccagcaccgtgaacgacaagctggagctgcaggagtgcctggagcacggccggatcgccaagttcagcaaggtgagaaccatcaccacccgaagcaacagcatcaaacaaggcaaggaccagcactttcctgtgttcatgaacgagaaggaggacatcctgtggtgtaccgagatggagagagtgttcgggttcccagtccactacacagatgtcagcaacatgtctagactggccagacagagactgctgggaagaagctggtccgtccctgtgatcagacacctgttcgcccctctgaaggagtacttcgcctgcgtgagcagcggcaacagcaacgccaacagccggggccccagcttctctagcggcctggtgccactgtccctgagagggagccacatgggccccatggagatctacaaaaccgtgagcgcctggaagcggcagcctgtgcgcgtgctgagcctgtttcggaatatcgataaagtcctgaaaagcctgggattcctggagagcggctctggctccggcggtggcaccctgaagtacgtggaggatgtgacaaacgtggtcagacgggatgtggagaagtggggccccttcgatctggtgtacggcagcacccaacccctgggcagctcttgtgaccggtgccctggctggtacatgtttcagttccaccggatcctgcagtacgccctgccgagacaggagtcccagcggccattcttttggattttcatggacaacttgctgctgaccgaggatgaccaggaaactaccactcggttcctgcagaccgaagccgtgaccctgcaggacgtgagaggccgggactaccagaacgccatgcgggtgtggtccaacatccctggactgaaaagcaagcacgcacctctgacccctaaagaagaggagtacctgcaggcccaggtgcggagcagaagcaagctggacgcccctaaggtggatctgctggtgaagaattgcctcctgcccctgagagagtacttcaagtatttcagccagaatagtctgcccctgggcggcccaagcagcggcgcccctcctcccagcggcggcagcccagccggctccccaacctctaccgaggagggcacctctgagtccgccacccccgagagcggccctggcacctccaccgagcccagcgagggcagcgcacccggcagccctgccggcagccccacctccacagaggagggaaccagcaccgagcccagcgaaggcagcgccccaggcaccagcaccgagcctagtgagggcggctctggcggcggcagcgcccaggagattaaacggatcaacaagatcagaagaagacttgtgaaagacagcaacaccaagaaggccggcaagacaggccccatgaaaaccctgctggttagagtgatgacacccgatctgagagagcggctggaaaacctgagaaagaagcctgaaaatatcccccagcccatcagcaatacatctagagccaacctgaataagctgctgaccgattacaccgaaatgaagaaggcgatcctgcatgtgtactgggaagagttccagaaggaccctgtgggcctgatgagccgggtggcccagcctgccagcaagaagatcgatcagaacaagctgaaacctgagatggacgagaagggcaacctgaccaccgccggctttgcctgctctcagtgtggccagcccctgttcgtgtacaagctggagcaggtgtctgagaagggcaaggcttacaccaactacttcggacggtgcaatgtggccgagcacgaaaagctgatcctgctggcccagctgaagcccgagaaggatagcgacgaagccgtgacatatagcctgggaaagtttgggcagagggccctggatttctacagcattcatgtgaccaaggagtccacccaccccgtgaagcccctggcccagatcgccggaaacagatacgcctccggacctgtgggaaaggccctgagcgacgcatgtatgggcacaatcgcctccttcctgtctaagtaccaggacatcatcatcgaacaccagaaggtggtgaagggcaaccagaagagactggagagcctgcgggagctggccggcaaggaaaacctggaataccctagcgtgaccctgccacctcagcctcacaccaaggagggcgttgatgcctacaacgaagtgatcgcccgggtgcgaatgtgggtgaacctgaacctgtggcagaagctgaagctaagcagagatgatgccaagcctctgctgagactgaagggattcccttcctttcctctggtcgagagacaggccaacgaagtggactggtgggacatggtgtgtaacgtgaagaagctgatcaacgagaaaaaggaggatggcaaggtgttttggcagaatctggctggctacaagagacaggaagccctgagaccatacctgagcagcgaggaagatcggaagaagggaaagaaattcgctcggtaccagctgggcgacctgctgctgcacctggaaaagaagcacggcgaggactggggaaaggtgtacgacgaggcctgggagcggattgacaagaaagtggaaggcctgagcaagcacatcaagctggaagaggaacggagaagcgaggacgcccagagcaaggccgccctgaccgactggctgcgggctaaggccagcttcgtgatcgagggcctgaaggaggccgacaaggacgagttctgcagatgcgagctgaagctgcagaagtggtacggggacctgcggggaaagcccttcgccatcgaagccgagaacagcatcctggacatcagcggcttcagcaagcagtacaactgtgccttcatctggcagaaggacggcgtgaagaagctgaacctgtacctgatcatcaactacttcaagggcggcaagctgcggttcaagaagatcaaacctgaagccttcgaagccaacagattctacaccgtgatcaacaaaaagagcggcgagatcgtgcccatggaggtgaacttcaacttcgacgaccccaacctgatcatcctgcctctggcctttggcaagagacagggcagagaattcatctggaacgacctgctgtccctggaaaccggcagcctgaagctggccaacggaagagtgatcgagaagacactgtacaacagaagaacccggcaggatgagcctgccctgttcgtggccctgaccttcgagcggcgggaggtcctggactcctccaatatcaaaccaatgaacctgatcggcgtggcaagaggcgaaaacatccccgccgtgatcgccctgaccgaccccgagggctgcccactgagccggtttaaggatagcctgggaaacccaacccacatcctgagaatcggcgagagctataaggagaagcagcggaccatccaggccaagaaggaggtggagcagcggagagccggcggctacagccggaagtacgccagcaaagccaagaatctggcagacgatatggtgagaaacaccgctagagatctgctgtactacgccgtgacccaggatgccatgctgatcttcgccaacctgagccggggcttcggccggcagggcaagcggaccttcatggccgagagacagtacacacggatggaggactggctgaccgccaagctggcctacgagggcctgagcaagacctacctgtccaagacactggcccagtacacctccaagacatgcagcaactgtgggtttaccatcaccagcgccgactacgacagggtgctggagaagctgaagaagacagcaacaggctggatgaccacaattaacggcaaggagctgaaggtggagggccagattacctactacaacagatacaagagacagaacgtagtcaaggacctgtccgtcgagctggatagactgagcgaagaatctgtgaacaacgacatctcctcctggacaaagggcagaagcggagaagctctgagcctcctgaagaaaagattctcccatagacccgtgcaggagaagttcgtgtgcctgaactgcggcttcgagacacacgcagccgagcaagccgccctgaacatcgccagatcctggctgttcctgcggagccaggagtacaagaaataccagacaaacaagacaaccggcaacaccgataagagagccttcgtcgagacctggcagtccttttaccggaagaagcttaaggaggtgtggaaacctgccgtgcggtctggcggatctggcggaggctccacaagcgcccacatgagcctgagcttcagggacgtggccatcgacctgagccaggaggagtgggagtgcctggaccccgtgcagagggccctgtacagggacgtgatgctggagaactacagcaacctggtgagcctgggctgcagcacccccaagcccgacatgatcaccctgctggagcaggagaaggagccctggatgatcatgagggagggcaccggcagctggttcaccggcctggagagcaagaccagccccaagaaaaagagaaaagtctaagctgccttctgcggggcttgccttctggccatgcccttcttctctcccttgcacctgtacctcttggtctttgaataaagcctgagtaggaaggctagcaaaaaaaaaaaaaaaaaaaaaaaaaaaaaaaaaaaaaaaaaaaaaaaaaaaaaaaaaaaaaaaaaaaaaaaaaaaaaaaa

SEQ ID NO: 6405 - RNA, 5797 nt, synthetic construct
  source 1..5797: mol_type = other RNA
aggaaataagagagaaaagaagagtaagaagaaatataagagccaccatggcccctaagaagaagcgtaaagtgagccggatggaacgcctcgtctacgaggtgcggcagaagtgcagaaacatcgaggacatctgcatctcctgcggatctctgaacgtgaccctggagcacccactgttcatcggcggcatgtgccagaactgtaaaaactgttttctggagtgtgcctatcaatacgacgatgacggctaccagagctactgcaccatctgttgcggcggaagagaggtgctgatgtgtggaaataacaactgctgccggtgcttctgcgtggaatgcgtggacctgctggtgggccccggcgccgcccaggccgctattaaggaagatccttggaactgctacatgtgcggccacaagggcacatacggcctgctgagacggagagaggactggcctagcagactgcagatgttcttcgccaataaccacgaccaggagttcgacccccctaaggtgtaccctcccgtccccgccgagaagagaaagcccatccgggtcctgagcctgttcgatggcatcgccaccggtctgctggtgctgaaggacctgggcatccaggtggataggtacattgcctccgaggtgtgcgaggactccatcaccgtgggaatggtgcgtcatcagggcaagatcatgtacgtgggcgacgtgcggagcgtgacacagaagcatatccaggagtggggccctttcgacctggtgatcggcggcagcccttgcaatgacctgagcatcgtgaacccagcccggaagggcctgtacgagggaaccggcagactgttcttcgagttttacagactgctgcacgacgcccggcctaaggaaggcgacgaccggcccttcttttggctgttcgagaatgtggtggccatgggagtcagcgacaagcgggatattagccggttcctggagagcaaccccgtgatgatcgatgccaaggaagtgagcgccgcccaccgggccagatacttctggggcaatctgcctggcatgaacagacccctggccagcaccgtgaacgacaagctggagctgcaggagtgcctggagcacggccggatcgccaagttcagcaaggtgagaaccatcaccacccgaagcaacagcatcaaacaaggcaaggaccagcactttcctgtgttcatgaacgagaaggaggacatcctgtggtgtaccgagatggagagagtgttcgggttcccagtccactacacagatgtcagcaacatgtctagactggccagacagagactgctgggaagaagctggtccgtccctgtgatcagacacctgttcgcccctctgaaggagtacttcgcctgcgtgagcagcggcaacagcaacgccaacagccggggccccagcttctctagcggcctggtgccactgtccctgagagggagccacatgggccccatggagatctacaaaaccgtgagcgcctggaagcggcagcctgtgcgcgtgctgagcctgtttcggaatatcgataaagtcctgaaaagcctgggattcctggagagcggctctggctccggcggtggcaccctgaagtacgtggaggatgtgacaaacgtggtcagacgggatgtggagaagtggggccccttcgatctggtgtacggcagcacccaacccctgggcagctcttgtgaccggtgccctggctggtacatgtttcagttccaccggatcctgcagtacgccctgccgagacaggagtcccagcggccattcttttggattttcatggacaacttgctgctgaccgaggatgaccaggaaactaccactcggttcctgcagaccgaagccgtgaccctgcaggacgtgagaggccgggactaccagaacgccatgcgggtgtggtccaacatccctggactgaaaagcaagcacgcacctctgacccctaaagaagaggagtacctgcaggcccaggtgcggagcagaagcaagctggacgcccctaaggtggatctgctggtgaagaattgcctcctgcccctgagagagtacttcaagtatttcagccagaatagtctgcccctgggcggcccaagcagcggcgcccctcctcccagcggcggcagcccagccggctccccaacctctaccgaggagggcacctctgagtccgccacccccgagagcggccctggcacctccaccgagcccagcgagggcagcgcacccggcagccctgccggcagccccacctccacagaggagggaaccagcaccgagcccagcgaaggcagcgccccaggcaccagcaccgagcctagtgagggcggctctggcggcggcagcgcccaggagattaaacggatcaacaagatcagaagaagacttgtgaaagacagcaacaccaagaaggccggcaagacaggccccatgaaaaccctgctggttagagtgatgacacccgatctgagagagcggctggaaaacctgagaaagaagcctgaaaatatcccccagcccatcagcaatacatctagagccaacctgaataagctgctgaccgattacaccgaaatgaagaaggcgatcctgcatgtgtactgggaagagttccagaaggaccctgtgggcctgatgagccgggtggcccagcctgccagcaagaagatcgatcagaacaagctgaaacctgagatggacgagaagggcaacctgaccaccgccggctttgcctgctctcagtgtggccagcccctgttcgtgtacaagctggagcaggtgtctgagaagggcaaggcttacaccaactacttcggacggtgcaatgtggccgagcacgaaaagctgatcctgctggcccagctgaagcccgagaaggatagcgacgaagccgtgacatatagcctgggaaagtttgggcagagggccctggatttctacagcattcatgtgaccaaggagtccacccaccccgtgaagcccctggcccagatcgccggaaacagatacgcctccggacctgtgggaaaggccctgagcgacgcatgtatgggcacaatcgcctccttcctgtctaagtaccaggacatcatcatcgaacaccagaaggtggtgaagggcaaccagaagagactggagagcctgcgggagctggccggcaaggaaaacctggaataccctagcgtgaccctgccacctcagcctcacaccaaggagggcgttgatgcctacaacgaagtgatcgcccgggtgcgaatgtgggtgaacctgaacctgtggcagaagctgaagctaagcagagatgatgccaagcctctgctgagactgaagggattcccttcctttcctctggtcgagagacaggccaacgaagtggactggtgggacatggtgtgtaacgtgaagaagctgatcaacgagaaaaaggaggatggcaaggtgttttggcagaatctggctggctacaagagacaggaagccctgagaccatacctgagcagcgaggaagatcggaagaagggaaagaaattcgctcggtaccagctgggcgacctgctgctgcacctggaaaagaagcacggcgaggactggggaaaggtgtacgacgaggcctgggagcggattgacaagaaagtggaaggcctgagcaagcacatcaagctggaagaggaacggagaagcgaggacgcccagagcaaggccgccctgaccgactggctgcgggctaaggccagcttcgtgatcgagggcctgaaggaggccgacaaggacgagttctgcagatgcgagctgaagctgcagaagtggtacggggacctgcggggaaagcccttcgccatcgaagccgagaacagcatcctggacatcagcggcttcagcaagcagtacaactgtgccttcatctggcagaaggacggcgtgaagaagctgaacctgtacctgatcatcaactacttcaagggcggcaagctgcggttcaagaagatcaaacctgaagccttcgaagccaacagattctacaccgtgatcaacaaaaagagcggcgagatcgtgcccatggaggtgaacttcaacttcgacgaccccaacctgatcatcctgcctctggcctttggcaagagacagggcagagaattcatctggaacgacctgctgtccctggaaaccggcagcctgaagctggccaacggaagagtgatcgagaagacactgtacaacagaagaacccggcaggatgagcctgccctgttcgtggccctgaccttcgagcggcgggaggtcctggactcctccaatatcaaaccaatgaacctgatcggcgtggcaagaggcgaaaacatccccgccgtgatcgccctgaccgaccccgagggctgcccactgagccggtttaaggatagcctgggaaacccaacccacatcctgagaatcggcgagagctataaggagaagcagcggaccatccaggccaagaaggaggtggagcagcggagagccggcggctacagccggaagtacgccagcaaagccaagaatctggcagacgatatggtgagaaacaccgctagagatctgctgtactacgccgtgacccaggatgccatgctgatcttcgccaacctgagccggggcttcggccggcagggcaagcggaccttcatggccgagagacagtacacacggatggaggactggctgaccgccaagctggcctacgagggcctgagcaagacctacctgtccaagacactggcccagtacacctccaagacatgcagcaactgtgggtttaccatcaccagcgccgactacgacagggtgctggagaagctgaagaagacagcaacaggctggatgaccacaattaacggcaaggagctgaaggtggagggccagattacctactacaacagatacaagagacagaacgtagtcaaggacctgtccgtcgagctggatagactgagcgaagaatctgtgaacaacgacatctcctcctggacaaagggcagaagcggagaagctctgagcctcctgaagaaaagattctcccatagacccgtgcaggagaagttcgtgtgcctgaactgcggcttcgagacacacgcagccgagcaagccgccctgaacatcgccagatcctggctgttcctgcggagccaggagtacaagaaataccagacaaacaagacaaccggcaacaccgataagagagccttcgtcgagacctggcagtccttttaccggaagaagcttaaggaggtgtggaaacctgccgtgcggtctggcggatctggcggaggctccacaagcccccaggagcccgtgaccttcgaggacgtggccgtgctgttcacccccgaggagtggatgttcctggacagcgcccagaggagcctgtacagggacgtgatgctggagaactacaggaacctggccagcgtgggcgaccagctgggcaagttcagcagcttcagccacctggagcagggcgaggagtggtggcccaccgagaggagggtgttccccggcagctgccccgagcccagcctgcccaccagccccaagaaaaagagaaaagtctaagctgccttctgcggggcttgccttctggccatgcccttcttctctcccttgcacctgtacctcttggtctttgaataaagcctgagtaggaaggctagcaaaaaaaaaaaaaaaaaaaaaaaaaaaaaaaaaaaaaaaaaaaaaaaaaaaaaaaaaaaaaaaaaaaaaaaaaaaaaaaa

SEQ ID NO: 6406 - RNA, 5797 nt, synthetic construct
  source 1..5797: mol_type = other RNA
aggaaataagagagaaaagaagagtaagaagaaatataagagccaccatggcccctaagaagaagcgtaaagtgagccggatggaacgcctcgtctacgaggtgcggcagaagtgcagaaacatcgaggacatctgcatctcctgcggatctctgaacgtgaccctggagcacccactgttcatcggcggcatgtgccagaactgtaaaaactgttttctggagtgtgcctatcaatacgacgatgacggctaccagagctactgcaccatctgttgcggcggaagagaggtgctgatgtgtggaaataacaactgctgccggtgcttctgcgtggaatgcgtggacctgctggtgggccccggcgccgcccaggccgctattaaggaagatccttggaactgctacatgtgcggccacaagggcacatacggcctgctgagacggagagaggactggcctagcagactgcagatgttcttcgccaataaccacgaccaggagttcgacccccctaaggtgtaccctcccgtccccgccgagaagagaaagcccatccgggtcctgagcctgttcgatggcatcgccaccggtctgctggtgctgaaggacctgggcatccaggtggataggtacattgcctccgaggtgtgcgaggactccatcaccgtgggaatggtgcgtcatcagggcaagatcatgtacgtgggcgacgtgcggagcgtgacacagaagcatatccaggagtggggccctttcgacctggtgatcggcggcagcccttgcaatgacctgagcatcgtgaacccagcccggaagggcctgtacgagggaaccggcagactgttcttcgagttttacagactgctgcacgacgcccggcctaaggaaggcgacgaccggcccttcttttggctgttcgagaatgtggtggccatgggagtcagcgacaagcgggatattagccggttcctggagagcaaccccgtgatgatcgatgccaaggaagtgagcgccgcccaccgggccagatacttctggggcaatctgcctggcatgaacagacccctggccagcaccgtgaacgacaagctggagctgcaggagtgcctggagcacggccggatcgccaagttcagcaaggtgagaaccatcaccacccgaagcaacagcatcaaacaaggcaaggaccagcactttcctgtgttcatgaacgagaaggaggacatcctgtggtgtaccgagatggagagagtgttcgggttcccagtccactacacagatgtcagcaacatgtctagactggccagacagagactgctgggaagaagctggtccgtccctgtgatcagacacctgttcgcccctctgaaggagtacttcgcctgcgtgagcagcggcaacagcaacgccaacagccggggccccagcttctctagcggcctggtgccactgtccctgagagggagccacatgggccccatggagatctacaaaaccgtgagcgcctggaagcggcagcctgtgcgcgtgctgagcctgtttcggaatatcgataaagtcctgaaaagcctgggattcctggagagcggctctggctccggcggtggcaccctgaagtacgtggaggatgtgacaaacgtggtcagacgggatgtggagaagtggggccccttcgatctggtgtacggcagcacccaacccctgggcagctcttgtgaccggtgccctggctggtacatgtttcagttccaccggatcctgcagtacgccctgccgagacaggagtcccagcggccattcttttggattttcatggacaacttgctgctgaccgaggatgaccaggaaactaccactcggttcctgcagaccgaagccgtgaccctgcaggacgtgagaggccgggactaccagaacgccatgcgggtgtggtccaacatccctggactgaaaagcaagcacgcacctctgacccctaaagaagaggagtacctgcaggcccaggtgcggagcagaagcaagctggacgcccctaaggtggatctgctggtgaagaattgcctcctgcccctgagagagtacttcaagtatttcagccagaatagtctgcccctgggcggcccaagcagcggcgcccctcctcccagcggcggcagcccagccggctccccaacctctaccgaggagggcacctctgagtccgccacccccgagagcggccctggcacctccaccgagcccagcgagggcagcgcacccggcagccctgccggcagccccacctccacagaggagggaaccagcaccgagcccagcgaaggcagcgccccaggcaccagcaccgagcctagtgagggcggctctggcggcggcagcgcccaggagattaaacggatcaacaagatcagaagaagacttgtgaaagacagcaacaccaagaaggccggcaagacaggccccatgaaaaccctgctggttagagtgatgacacccgatctgagagagcggctggaaaacctgagaaagaagcctgaaaatatcccccagcccatcagcaatacatctagagccaacctgaataagctgctgaccgattacaccgaaatgaagaaggcgatcctgcatgtgtactgggaagagttccagaaggaccctgtgggcctgatgagccgggtggcccagcctgccagcaagaagatcgatcagaacaagctgaaacctgagatggacgagaagggcaacctgaccaccgccggctttgcctgctctcagtgtggccagcccctgttcgtgtacaagctggagcaggtgtctgagaagggcaaggcttacaccaactacttcggacggtgcaatgtggccgagcacgaaaagctgatcctgctggcccagctgaagcccgagaaggatagcgacgaagccgtgacatatagcctgggaaagtttgggcagagggccctggatttctacagcattcatgtgaccaaggagtccacccaccccgtgaagcccctggcccagatcgccggaaacagatacgcctccggacctgtgggaaaggccctgagcgacgcatgtatgggcacaatcgcctccttcctgtctaagtaccaggacatcatcatcgaacaccagaaggtggtgaagggcaaccagaagagactggagagcctgcgggagctggccggcaaggaaaacctggaataccctagcgtgaccctgccacctcagcctcacaccaaggagggcgttgatgcctacaacgaagtgatcgcccgggtgcgaatgtgggtgaacctgaacctgtggcagaagctgaagctaagcagagatgatgccaagcctctgctgagactgaagggattcccttcctttcctctggtcgagagacaggccaacgaagtggactggtgggacatggtgtgtaacgtgaagaagctgatcaacgagaaaaaggaggatggcaaggtgttttggcagaatctggctggctacaagagacaggaagccctgagaccatacctgagcagcgaggaagatcggaagaagggaaagaaattcgctcggtaccagctgggcgacctgctgctgcacctggaaaagaagcacggcgaggactggggaaaggtgtacgacgaggcctgggagcggattgacaagaaagtggaaggcctgagcaagcacatcaagctggaagaggaacggagaagcgaggacgcccagagcaaggccgccctgaccgactggctgcgggctaaggccagcttcgtgatcgagggcctgaaggaggccgacaaggacgagttctgcagatgcgagctgaagctgcagaagtggtacggggacctgcggggaaagcccttcgccatcgaagccgagaacagcatcctggacatcagcggcttcagcaagcagtacaactgtgccttcatctggcagaaggacggcgtgaagaagctgaacctgtacctgatcatcaactacttcaagggcggcaagctgcggttcaagaagatcaaacctgaagccttcgaagccaacagattctacaccgtgatcaacaaaaagagcggcgagatcgtgcccatggaggtgaacttcaacttcgacgaccccaacctgatcatcctgcctctggcctttggcaagagacagggcagagaattcatctggaacgacctgctgtccctggaaaccggcagcctgaagctggccaacggaagagtgatcgagaagacactgtacaacagaagaacccggcaggatgagcctgccctgttcgtggccctgaccttcgagcggcgggaggtcctggactcctccaatatcaaaccaatgaacctgatcggcgtggcaagaggcgaaaacatccccgccgtgatcgccctgaccgaccccgagggctgcccactgagccggtttaaggatagcctgggaaacccaacccacatcctgagaatcggcgagagctataaggagaagcagcggaccatccaggccaagaaggaggtggagcagcggagagccggcggctacagccggaagtacgccagcaaagccaagaatctggcagacgatatggtgagaaacaccgctagagatctgctgtactacgccgtgacccaggatgccatgctgatcttcgccaacctgagccggggcttcggccggcagggcaagcggaccttcatggccgagagacagtacacacggatggaggactggctgaccgccaagctggcctacgagggcctgagcaagacctacctgtccaagacactggcccagtacacctccaagacatgcagcaactgtgggtttaccatcaccagcgccgactacgacagggtgctggagaagctgaagaagacagcaacaggctggatgaccacaattaacggcaaggagctgaaggtggagggccagattacctactacaacagatacaagagacagaacgtagtcaaggacctgtccgtcgagctggatagactgagcgaagaatctgtgaacaacgacatctcctcctggacaaagggcagaagcggagaagctctgagcctcctgaagaaaagattctcccatagacccgtgcaggagaagttcgtgtgcctgaactgcggcttcgagacacacgcagccgagcaagccgccctgaacatcgccagatcctggctgttcctgcggagccaggagtacaagaaataccagacaaacaagacaaccggcaacaccgataagagagccttcgtcgagacctggcagtccttttaccggaagaagcttaaggaggtgtggaaacctgccgtgcggtctggcggatctggcggaggctccacaagctggcaggagcccgtgaccttcgaggacgtggccgtgtacctgagccacgccgagtgggacgccatggcccccgagcagagggagctgtactgcagcgtgatgctggacaactaccagctgctggccagcctgggctaccccggccccaagcccgacatcgtgtacaggctggagaggggcgaggagccctggggctgcgccccccagagccccctgagctgggacggccccaggagccccagcaccagccccaagaaaaagagaaaagtctaagctgccttctgcggggcttgccttctggccatgcccttcttctctcccttgcacctgtacctcttggtctttgaataaagcctgagtaggaaggctagcaaaaaaaaaaaaaaaaaaaaaaaaaaaaaaaaaaaaaaaaaaaaaaaaaaaaaaaaaaaaaaaaaaaaaaaaaaaaaaaa

SEQ ID NO: 6407 - RNA, 5797 nt, synthetic construct
  source 1..5797: mol_type = other RNA
aggaaataagagagaaaagaagagtaagaagaaatataagagccaccatggcccctaagaagaagcgtaaagtgagccggatggaacgcctcgtctacgaggtgcggcagaagtgcagaaacatcgaggacatctgcatctcctgcggatctctgaacgtgaccctggagcacccactgttcatcggcggcatgtgccagaactgtaaaaactgttttctggagtgtgcctatcaatacgacgatgacggctaccagagctactgcaccatctgttgcggcggaagagaggtgctgatgtgtggaaataacaactgctgccggtgcttctgcgtggaatgcgtggacctgctggtgggccccggcgccgcccaggccgctattaaggaagatccttggaactgctacatgtgcggccacaagggcacatacggcctgctgagacggagagaggactggcctagcagactgcagatgttcttcgccaataaccacgaccaggagttcgacccccctaaggtgtaccctcccgtccccgccgagaagagaaagcccatccgggtcctgagcctgttcgatggcatcgccaccggtctgctggtgctgaaggacctgggcatccaggtggataggtacattgcctccgaggtgtgcgaggactccatcaccgtgggaatggtgcgtcatcagggcaagatcatgtacgtgggcgacgtgcggagcgtgacacagaagcatatccaggagtggggccctttcgacctggtgatcggcggcagcccttgcaatgacctgagcatcgtgaacccagcccggaagggcctgtacgagggaaccggcagactgttcttcgagttttacagactgctgcacgacgcccggcctaaggaaggcgacgaccggcccttcttttggctgttcgagaatgtggtggccatgggagtcagcgacaagcgggatattagccggttcctggagagcaaccccgtgatgatcgatgccaaggaagtgagcgccgcccaccgggccagatacttctggggcaatctgcctggcatgaacagacccctggccagcaccgtgaacgacaagctggagctgcaggagtgcctggagcacggccggatcgccaagttcagcaaggtgagaaccatcaccacccgaagcaacagcatcaaacaaggcaaggaccagcactttcctgtgttcatgaacgagaaggaggacatcctgtggtgtaccgagatggagagagtgttcgggttcccagtccactacacagatgtcagcaacatgtctagactggccagacagagactgctgggaagaagctggtccgtccctgtgatcagacacctgttcgcccctctgaaggagtacttcgcctgcgtgagcagcggcaacagcaacgccaacagccggggccccagcttctctagcggcctggtgccactgtccctgagagggagccacatgggccccatggagatctacaaaaccgtgagcgcctggaagcggcagcctgtgcgcgtgctgagcctgtttcggaatatcgataaagtcctgaaaagcctgggattcctggagagcggctctggctccggcggtggcaccctgaagtacgtggaggatgtgacaaacgtggtcagacgggatgtggagaagtggggccccttcgatctggtgtacggcagcacccaacccctgggcagctcttgtgaccggtgccctggctggtacatgtttcagttccaccggatcctgcagtacgccctgccgagacaggagtcccagcggccattcttttggattttcatggacaacttgctgctgaccgaggatgaccaggaaactaccactcggttcctgcagaccgaagccgtgaccctgcaggacgtgagaggccgggactaccagaacgccatgcgggtgtggtccaacatccctggactgaaaagcaagcacgcacctctgacccctaaagaagaggagtacctgcaggcccaggtgcggagcagaagcaagctggacgcccctaaggtggatctgctggtgaagaattgcctcctgcccctgagagagtacttcaagtatttcagccagaatagtctgcccctgggcggcccaagcagcggcgcccctcctcccagcggcggcagcccagccggctccccaacctctaccgaggagggcacctctgagtccgccacccccgagagcggccctggcacctccaccgagcccagcgagggcagcgcacccggcagccctgccggcagccccacctccacagaggagggaaccagcaccgagcccagcgaaggcagcgccccaggcaccagcaccgagcctagtgagggcggctctggcggcggcagcgcccaggagattaaacggatcaacaagatcagaagaagacttgtgaaagacagcaacaccaagaaggccggcaagacaggccccatgaaaaccctgctggttagagtgatgacacccgatctgagagagcggctggaaaacctgagaaagaagcctgaaaatatcccccagcccatcagcaatacatctagagccaacctgaataagctgctgaccgattacaccgaaatgaagaaggcgatcctgcatgtgtactgggaagagttccagaaggaccctgtgggcctgatgagccgggtggcccagcctgccagcaagaagatcgatcagaacaagctgaaacctgagatggacgagaagggcaacctgaccaccgccggctttgcctgctctcagtgtggccagcccctgttcgtgtacaagctggagcaggtgtctgagaagggcaaggcttacaccaactacttcggacggtgcaatgtggccgagcacgaaaagctgatcctgctggcccagctgaagcccgagaaggatagcgacgaagccgtgacatatagcctgggaaagtttgggcagagggccctggatttctacagcattcatgtgaccaaggagtccacccaccccgtgaagcccctggcccagatcgccggaaacagatacgcctccggacctgtgggaaaggccctgagcgacgcatgtatgggcacaatcgcctccttcctgtctaagtaccaggacatcatcatcgaacaccagaaggtggtgaagggcaaccagaagagactggagagcctgcgggagctggccggcaaggaaaacctggaataccctagcgtgaccctgccacctcagcctcacaccaaggagggcgttgatgcctacaacgaagtgatcgcccgggtgcgaatgtgggtgaacctgaacctgtggcagaagctgaagctaagcagagatgatgccaagcctctgctgagactgaagggattcccttcctttcctctggtcgagagacaggccaacgaagtggactggtgggacatggtgtgtaacgtgaagaagctgatcaacgagaaaaaggaggatggcaaggtgttttggcagaatctggctggctacaagagacaggaagccctgagaccatacctgagcagcgaggaagatcggaagaagggaaagaaattcgctcggtaccagctgggcgacctgctgctgcacctggaaaagaagcacggcgaggactggggaaaggtgtacgacgaggcctgggagcggattgacaagaaagtggaaggcctgagcaagcacatcaagctggaagaggaacggagaagcgaggacgcccagagcaaggccgccctgaccgactggctgcgggctaaggccagcttcgtgatcgagggcctgaaggaggccgacaaggacgagttctgcagatgcgagctgaagctgcagaagtggtacggggacctgcggggaaagcccttcgccatcgaagccgagaacagcatcctggacatcagcggcttcagcaagcagtacaactgtgccttcatctggcagaaggacggcgtgaagaagctgaacctgtacctgatcatcaactacttcaagggcggcaagctgcggttcaagaagatcaaacctgaagccttcgaagccaacagattctacaccgtgatcaacaaaaagagcggcgagatcgtgcccatggaggtgaacttcaacttcgacgaccccaacctgatcatcctgcctctggcctttggcaagagacagggcagagaattcatctggaacgacctgctgtccctggaaaccggcagcctgaagctggccaacggaagagtgatcgagaagacactgtacaacagaagaacccggcaggatgagcctgccctgttcgtggccctgaccttcgagcggcgggaggtcctggactcctccaatatcaaaccaatgaacctgatcggcgtggcaagaggcgaaaacatccccgccgtgatcgccctgaccgaccccgagggctgcccactgagccggtttaaggatagcctgggaaacccaacccacatcctgagaatcggcgagagctataaggagaagcagcggaccatccaggccaagaaggaggtggagcagcggagagccggcggctacagccggaagtacgccagcaaagccaagaatctggcagacgatatggtgagaaacaccgctagagatctgctgtactacgccgtgacccaggatgccatgctgatcttcgccaacctgagccggggcttcggccggcagggcaagcggaccttcatggccgagagacagtacacacggatggaggactggctgaccgccaagctggcctacgagggcctgagcaagacctacctgtccaagacactggcccagtacacctccaagacatgcagcaactgtgggtttaccatcaccagcgccgactacgacagggtgctggagaagctgaagaagacagcaacaggctggatgaccacaattaacggcaaggagctgaaggtggagggccagattacctactacaacagatacaagagacagaacgtagtcaaggacctgtccgtcgagctggatagactgagcgaagaatctgtgaacaacgacatctcctcctggacaaagggcagaagcggagaagctctgagcctcctgaagaaaagattctcccatagacccgtgcaggagaagttcgtgtgcctgaactgcggcttcgagacacacgcagccgagcaagccgccctgaacatcgccagatcctggctgttcctgcggagccaggagtacaagaaataccagacaaacaagacaaccggcaacaccgataagagagccttcgtcgagacctggcagtccttttaccggaagaagcttaaggaggtgtggaaacctgccgtgcggtctggcggatctggcggaggctccacaagcggcaaggccctgctgagcttcgaggacgtggccatgtacttcaccagggaggagtggaaccacctggactgggcccagaaggacctgtacagggacgtgatgctggagaactacatgaacatggtgctgctgggcttccagttccccaagcccgaggtgatctgccagctggagaactgggacgagccctggatcctggacctgcccagggccggcaacaggaaggccagcagcagcgcctgcaccagccccaagaaaaagagaaaagtctaagctgccttctgcggggcttgccttctggccatgcccttcttctctcccttgcacctgtacctcttggtctttgaataaagcctgagtaggaaggctagcaaaaaaaaaaaaaaaaaaaaaaaaaaaaaaaaaaaaaaaaaaaaaaaaaaaaaaaaaaaaaaaaaaaaaaaaaaaaaaaa

SEQ ID NO: 6408 - RNA, 5797 nt, synthetic construct
  source 1..5797: mol_type = other RNA
aggaaataagagagaaaagaagagtaagaagaaatataagagccaccatggcccctaagaagaagcgtaaagtgagccggatggaacgcctcgtctacgaggtgcggcagaagtgcagaaacatcgaggacatctgcatctcctgcggatctctgaacgtgaccctggagcacccactgttcatcggcggcatgtgccagaactgtaaaaactgttttctggagtgtgcctatcaatacgacgatgacggctaccagagctactgcaccatctgttgcggcggaagagaggtgctgatgtgtggaaataacaactgctgccggtgcttctgcgtggaatgcgtggacctgctggtgggccccggcgccgcccaggccgctattaaggaagatccttggaactgctacatgtgcggccacaagggcacatacggcctgctgagacggagagaggactggcctagcagactgcagatgttcttcgccaataaccacgaccaggagttcgacccccctaaggtgtaccctcccgtccccgccgagaagagaaagcccatccgggtcctgagcctgttcgatggcatcgccaccggtctgctggtgctgaaggacctgggcatccaggtggataggtacattgcctccgaggtgtgcgaggactccatcaccgtgggaatggtgcgtcatcagggcaagatcatgtacgtgggcgacgtgcggagcgtgacacagaagcatatccaggagtggggccctttcgacctggtgatcggcggcagcccttgcaatgacctgagcatcgtgaacccagcccggaagggcctgtacgagggaaccggcagactgttcttcgagttttacagactgctgcacgacgcccggcctaaggaaggcgacgaccggcccttcttttggctgttcgagaatgtggtggccatgggagtcagcgacaagcgggatattagccggttcctggagagcaaccccgtgatgatcgatgccaaggaagtgagcgccgcccaccgggccagatacttctggggcaatctgcctggcatgaacagacccctggccagcaccgtgaacgacaagctggagctgcaggagtgcctggagcacggccggatcgccaagttcagcaaggtgagaaccatcaccacccgaagcaacagcatcaaacaaggcaaggaccagcactttcctgtgttcatgaacgagaaggaggacatcctgtggtgtaccgagatggagagagtgttcgggttcccagtccactacacagatgtcagcaacatgtctagactggccagacagagactgctgggaagaagctggtccgtccctgtgatcagacacctgttcgcccctctgaaggagtacttcgcctgcgtgagcagcggcaacagcaacgccaacagccggggccccagcttctctagcggcctggtgccactgtccctgagagggagccacatgggccccatggagatctacaaaaccgtgagcgcctggaagcggcagcctgtgcgcgtgctgagcctgtttcggaatatcgataaagtcctgaaaagcctgggattcctggagagcggctctggctccggcggtggcaccctgaagtacgtggaggatgtgacaaacgtggtcagacgggatgtggagaagtggggccccttcgatctggtgtacggcagcacccaacccctgggcagctcttgtgaccggtgccctggctggtacatgtttcagttccaccggatcctgcagtacgccctgccgagacaggagtcccagcggccattcttttggattttcatggacaacttgctgctgaccgaggatgaccaggaaactaccactcggttcctgcagaccgaagccgtgaccctgcaggacgtgagaggccgggactaccagaacgccatgcgggtgtggtccaacatccctggactgaaaagcaagcacgcacctctgacccctaaagaagaggagtacctgcaggcccaggtgcggagcagaagcaagctggacgcccctaaggtggatctgctggtgaagaattgcctcctgcccctgagagagtacttcaagtatttcagccagaatagtctgcccctgggcggcccaagcagcggcgcccctcctcccagcggcggcagcccagccggctccccaacctctaccgaggagggcacctctgagtccgccacccccgagagcggccctggcacctccaccgagcccagcgagggcagcgcacccggcagccctgccggcagccccacctccacagaggagggaaccagcaccgagcccagcgaaggcagcgccccaggcaccagcaccgagcctagtgagggcggctctggcggcggcagcgcccaggagattaaacggatcaacaagatcagaagaagacttgtgaaagacagcaacaccaagaaggccggcaagacaggccccatgaaaaccctgctggttagagtgatgacacccgatctgagagagcggctggaaaacctgagaaagaagcctgaaaatatcccccagcccatcagcaatacatctagagccaacctgaataagctgctgaccgattacaccgaaatgaagaaggcgatcctgcatgtgtactgggaagagttccagaaggaccctgtgggcctgatgagccgggtggcccagcctgccagcaagaagatcgatcagaacaagctgaaacctgagatggacgagaagggcaacctgaccaccgccggctttgcctgctctcagtgtggccagcccctgttcgtgtacaagctggagcaggtgtctgagaagggcaaggcttacaccaactacttcggacggtgcaatgtggccgagcacgaaaagctgatcctgctggcccagctgaagcccgagaaggatagcgacgaagccgtgacatatagcctgggaaagtttgggcagagggccctggatttctacagcattcatgtgaccaaggagtccacccaccccgtgaagcccctggcccagatcgccggaaacagatacgcctccggacctgtgggaaaggccctgagcgacgcatgtatgggcacaatcgcctccttcctgtctaagtaccaggacatcatcatcgaacaccagaaggtggtgaagggcaaccagaagagactggagagcctgcgggagctggccggcaaggaaaacctggaataccctagcgtgaccctgccacctcagcctcacaccaaggagggcgttgatgcctacaacgaagtgatcgcccgggtgcgaatgtgggtgaacctgaacctgtggcagaagctgaagctaagcagagatgatgccaagcctctgctgagactgaagggattcccttcctttcctctggtcgagagacaggccaacgaagtggactggtgggacatggtgtgtaacgtgaagaagctgatcaacgagaaaaaggaggatggcaaggtgttttggcagaatctggctggctacaagagacaggaagccctgagaccatacctgagcagcgaggaagatcggaagaagggaaagaaattcgctcggtaccagctgggcgacctgctgctgcacctggaaaagaagcacggcgaggactggggaaaggtgtacgacgaggcctgggagcggattgacaagaaagtggaaggcctgagcaagcacatcaagctggaagaggaacggagaagcgaggacgcccagagcaaggccgccctgaccgactggctgcgggctaaggccagcttcgtgatcgagggcctgaaggaggccgacaaggacgagttctgcagatgcgagctgaagctgcagaagtggtacggggacctgcggggaaagcccttcgccatcgaagccgagaacagcatcctggacatcagcggcttcagcaagcagtacaactgtgccttcatctggcagaaggacggcgtgaagaagctgaacctgtacctgatcatcaactacttcaagggcggcaagctgcggttcaagaagatcaaacctgaagccttcgaagccaacagattctacaccgtgatcaacaaaaagagcggcgagatcgtgcccatggaggtgaacttcaacttcgacgaccccaacctgatcatcctgcctctggcctttggcaagagacagggcagagaattcatctggaacgacctgctgtccctggaaaccggcagcctgaagctggccaacggaagagtgatcgagaagacactgtacaacagaagaacccggcaggatgagcctgccctgttcgtggccctgaccttcgagcggcgggaggtcctggactcctccaatatcaaaccaatgaacctgatcggcgtggcaagaggcgaaaacatccccgccgtgatcgccctgaccgaccccgagggctgcccactgagccggtttaaggatagcctgggaaacccaacccacatcctgagaatcggcgagagctataaggagaagcagcggaccatccaggccaagaaggaggtggagcagcggagagccggcggctacagccggaagtacgccagcaaagccaagaatctggcagacgatatggtgagaaacaccgctagagatctgctgtactacgccgtgacccaggatgccatgctgatcttcgccaacctgagccggggcttcggccggcagggcaagcggaccttcatggccgagagacagtacacacggatggaggactggctgaccgccaagctggcctacgagggcctgagcaagacctacctgtccaagacactggcccagtacacctccaagacatgcagcaactgtgggtttaccatcaccagcgccgactacgacagggtgctggagaagctgaagaagacagcaacaggctggatgaccacaattaacggcaaggagctgaaggtggagggccagattacctactacaacagatacaagagacagaacgtagtcaaggacctgtccgtcgagctggatagactgagcgaagaatctgtgaacaacgacatctcctcctggacaaagggcagaagcggagaagctctgagcctcctgaagaaaagattctcccatagacccgtgcaggagaagttcgtgtgcctgaactgcggcttcgagacacacgcagccgagcaagccgccctgaacatcgccagatcctggctgttcctgcggagccaggagtacaagaaataccagacaaacaagacaaccggcaacaccgataagagagccttcgtcgagacctggcagtccttttaccggaagaagcttaaggaggtgtggaaacctgccgtgcggtctggcggatctggcggaggctccacaagcacccaggtgagcgtgaccttcgacgacgtggccgtgaccttcacccaggaggagtggggccacctggaccccgcccagaggaccctgtacagggaggtgatgctggagacctgcaggctgctggtgagcctgggctgccccgtgcccaggcccgagctgatctacaggctggagcacggccaggagctgtggaccgtgaagagggacctgagcaggagcacctgcgccgtggacgagggcaagaccagccccaagaaaaagagaaaagtctaagctgccttctgcggggcttgccttctggccatgcccttcttctctcccttgcacctgtacctcttggtctttgaataaagcctgagtaggaaggctagcaaaaaaaaaaaaaaaaaaaaaaaaaaaaaaaaaaaaaaaaaaaaaaaaaaaaaaaaaaaaaaaaaaaaaaaaaaaaaaaa

SEQ ID NO: 6409 - RNA, 5797 nt, synthetic construct
  source 1..5797: mol_type = other RNA
aggaaataagagagaaaagaagagtaagaagaaatataagagccaccatggcccctaagaagaagcgtaaagtgagccggatggaacgcctcgtctacgaggtgcggcagaagtgcagaaacatcgaggacatctgcatctcctgcggatctctgaacgtgaccctggagcacccactgttcatcggcggcatgtgccagaactgtaaaaactgttttctggagtgtgcctatcaatacgacgatgacggctaccagagctactgcaccatctgttgcggcggaagagaggtgctgatgtgtggaaataacaactgctgccggtgcttctgcgtggaatgcgtggacctgctggtgggccccggcgccgcccaggccgctattaaggaagatccttggaactgctacatgtgcggccacaagggcacatacggcctgctgagacggagagaggactggcctagcagactgcagatgttcttcgccaataaccacgaccaggagttcgacccccctaaggtgtaccctcccgtccccgccgagaagagaaagcccatccgggtcctgagcctgttcgatggcatcgccaccggtctgctggtgctgaaggacctgggcatccaggtggataggtacattgcctccgaggtgtgcgaggactccatcaccgtgggaatggtgcgtcatcagggcaagatcatgtacgtgggcgacgtgcggagcgtgacacagaagcatatccaggagtggggccctttcgacctggtgatcggcggcagcccttgcaatgacctgagcatcgtgaacccagcccggaagggcctgtacgagggaaccggcagactgttcttcgagttttacagactgctgcacgacgcccggcctaaggaaggcgacgaccggcccttcttttggctgttcgagaatgtggtggccatgggagtcagcgacaagcgggatattagccggttcctggagagcaaccccgtgatgatcgatgccaaggaagtgagcgccgcccaccgggccagatacttctggggcaatctgcctggcatgaacagacccctggccagcaccgtgaacgacaagctggagctgcaggagtgcctggagcacggccggatcgccaagttcagcaaggtgagaaccatcaccacccgaagcaacagcatcaaacaaggcaaggaccagcactttcctgtgttcatgaacgagaaggaggacatcctgtggtgtaccgagatggagagagtgttcgggttcccagtccactacacagatgtcagcaacatgtctagactggccagacagagactgctgggaagaagctggtccgtccctgtgatcagacacctgttcgcccctctgaaggagtacttcgcctgcgtgagcagcggcaacagcaacgccaacagccggggccccagcttctctagcggcctggtgccactgtccctgagagggagccacatgggccccatggagatctacaaaaccgtgagcgcctggaagcggcagcctgtgcgcgtgctgagcctgtttcggaatatcgataaagtcctgaaaagcctgggattcctggagagcggctctggctccggcggtggcaccctgaagtacgtggaggatgtgacaaacgtggtcagacgggatgtggagaagtggggccccttcgatctggtgtacggcagcacccaacccctgggcagctcttgtgaccggtgccctggctggtacatgtttcagttccaccggatcctgcagtacgccctgccgagacaggagtcccagcggccattcttttggattttcatggacaacttgctgctgaccgaggatgaccaggaaactaccactcggttcctgcagaccgaagccgtgaccctgcaggacgtgagaggccgggactaccagaacgccatgcgggtgtggtccaacatccctggactgaaaagcaagcacgcacctctgacccctaaagaagaggagtacctgcaggcccaggtgcggagcagaagcaagctggacgcccctaaggtggatctgctggtgaagaattgcctcctgcccctgagagagtacttcaagtatttcagccagaatagtctgcccctgggcggcccaagcagcggcgcccctcctcccagcggcggcagcccagccggctccccaacctctaccgaggagggcacctctgagtccgccacccccgagagcggccctggcacctccaccgagcccagcgagggcagcgcacccggcagccctgccggcagccccacctccacagaggagggaaccagcaccgagcccagcgaaggcagcgccccaggcaccagcaccgagcctagtgagggcggctctggcggcggcagcgcccaggagattaaacggatcaacaagatcagaagaagacttgtgaaagacagcaacaccaagaaggccggcaagacaggccccatgaaaaccctgctggttagagtgatgacacccgatctgagagagcggctggaaaacctgagaaagaagcctgaaaatatcccccagcccatcagcaatacatctagagccaacctgaataagctgctgaccgattacaccgaaatgaagaaggcgatcctgcatgtgtactgggaagagttccagaaggaccctgtgggcctgatgagccgggtggcccagcctgccagcaagaagatcgatcagaacaagctgaaacctgagatggacgagaagggcaacctgaccaccgccggctttgcctgctctcagtgtggccagcccctgttcgtgtacaagctggagcaggtgtctgagaagggcaaggcttacaccaactacttcggacggtgcaatgtggccgagcacgaaaagctgatcctgctggcccagctgaagcccgagaaggatagcgacgaagccgtgacatatagcctgggaaagtttgggcagagggccctggatttctacagcattcatgtgaccaaggagtccacccaccccgtgaagcccctggcccagatcgccggaaacagatacgcctccggacctgtgggaaaggccctgagcgacgcatgtatgggcacaatcgcctccttcctgtctaagtaccaggacatcatcatcgaacaccagaaggtggtgaagggcaaccagaagagactggagagcctgcgggagctggccggcaaggaaaacctggaataccctagcgtgaccctgccacctcagcctcacaccaaggagggcgttgatgcctacaacgaagtgatcgcccgggtgcgaatgtgggtgaacctgaacctgtggcagaagctgaagctaagcagagatgatgccaagcctctgctgagactgaagggattcccttcctttcctctggtcgagagacaggccaacgaagtggactggtgggacatggtgtgtaacgtgaagaagctgatcaacgagaaaaaggaggatggcaaggtgttttggcagaatctggctggctacaagagacaggaagccctgagaccatacctgagcagcgaggaagatcggaagaagggaaagaaattcgctcggtaccagctgggcgacctgctgctgcacctggaaaagaagcacggcgaggactggggaaaggtgtacgacgaggcctgggagcggattgacaagaaagtggaaggcctgagcaagcacatcaagctggaagaggaacggagaagcgaggacgcccagagcaaggccgccctgaccgactggctgcgggctaaggccagcttcgtgatcgagggcctgaaggaggccgacaaggacgagttctgcagatgcgagctgaagctgcagaagtggtacggggacctgcggggaaagcccttcgccatcgaagccgagaacagcatcctggacatcagcggcttcagcaagcagtacaactgtgccttcatctggcagaaggacggcgtgaagaagctgaacctgtacctgatcatcaactacttcaagggcggcaagctgcggttcaagaagatcaaacctgaagccttcgaagccaacagattctacaccgtgatcaacaaaaagagcggcgagatcgtgcccatggaggtgaacttcaacttcgacgaccccaacctgatcatcctgcctctggcctttggcaagagacagggcagagaattcatctggaacgacctgctgtccctggaaaccggcagcctgaagctggccaacggaagagtgatcgagaagacactgtacaacagaagaacccggcaggatgagcctgccctgttcgtggccctgaccttcgagcggcgggaggtcctggactcctccaatatcaaaccaatgaacctgatcggcgtggcaagaggcgaaaacatccccgccgtgatcgccctgaccgaccccgagggctgcccactgagccggtttaaggatagcctgggaaacccaacccacatcctgagaatcggcgagagctataaggagaagcagcggaccatccaggccaagaaggaggtggagcagcggagagccggcggctacagccggaagtacgccagcaaagccaagaatctggcagacgatatggtgagaaacaccgctagagatctgctgtactacgccgtgacccaggatgccatgctgatcttcgccaacctgagccggggcttcggccggcagggcaagcggaccttcatggccgagagacagtacacacggatggaggactggctgaccgccaagctggcctacgagggcctgagcaagacctacctgtccaagacactggcccagtacacctccaagacatgcagcaactgtgggtttaccatcaccagcgccgactacgacagggtgctggagaagctgaagaagacagcaacaggctggatgaccacaattaacggcaaggagctgaaggtggagggccagattacctactacaacagatacaagagacagaacgtagtcaaggacctgtccgtcgagctggatagactgagcgaagaatctgtgaacaacgacatctcctcctggacaaagggcagaagcggagaagctctgagcctcctgaagaaaagattctcccatagacccgtgcaggagaagttcgtgtgcctgaactgcggcttcgagacacacgcagccgagcaagccgccctgaacatcgccagatcctggctgttcctgcggagccaggagtacaagaaataccagacaaacaagacaaccggcaacaccgataagagagccttcgtcgagacctggcagtccttttaccggaagaagcttaaggaggtgtggaaacctgccgtgcggtctggcggatctggcggaggctccacaagctaccagggcctggtgagcttcgaggacgtggccgtgaacttcacctgggaggagtggcaggacctggacgccgcccagaggaccctgtacagggacgtgatgctggagaactacagcagcctggtgagcctgggccactgcatcaccaagcccgaggtgatcatcaagctggagcagggcgccgccccctggaccgtgaaggagacccccgaccagggcagccccgacgtgcagatcgtggacaccagccccaagaaaaagagaaaagtctaagctgccttctgcggggcttgccttctggccatgcccttcttctctcccttgcacctgtacctcttggtctttgaataaagcctgagtaggaaggctagcaaaaaaaaaaaaaaaaaaaaaaaaaaaaaaaaaaaaaaaaaaaaaaaaaaaaaaaaaaaaaaaaaaaaaaaaaaaaaaaa

SEQ ID NO: 6410 - RNA, 5797 nt, synthetic construct
  source 1..5797: mol_type = other RNA
aggaaataagagagaaaagaagagtaagaagaaatataagagccaccatggcccctaagaagaagcgtaaagtgagccggatggaacgcctcgtctacgaggtgcggcagaagtgcagaaacatcgaggacatctgcatctcctgcggatctctgaacgtgaccctggagcacccactgttcatcggcggcatgtgccagaactgtaaaaactgttttctggagtgtgcctatcaatacgacgatgacggctaccagagctactgcaccatctgttgcggcggaagagaggtgctgatgtgtggaaataacaactgctgccggtgcttctgcgtggaatgcgtggacctgctggtgggccccggcgccgcccaggccgctattaaggaagatccttggaactgctacatgtgcggccacaagggcacatacggcctgctgagacggagagaggactggcctagcagactgcagatgttcttcgccaataaccacgaccaggagttcgacccccctaaggtgtaccctcccgtccccgccgagaagagaaagcccatccgggtcctgagcctgttcgatggcatcgccaccggtctgctggtgctgaaggacctgggcatccaggtggataggtacattgcctccgaggtgtgcgaggactccatcaccgtgggaatggtgcgtcatcagggcaagatcatgtacgtgggcgacgtgcggagcgtgacacagaagcatatccaggagtggggccctttcgacctggtgatcggcggcagcccttgcaatgacctgagcatcgtgaacccagcccggaagggcctgtacgagggaaccggcagactgttcttcgagttttacagactgctgcacgacgcccggcctaaggaaggcgacgaccggcccttcttttggctgttcgagaatgtggtggccatgggagtcagcgacaagcgggatattagccggttcctggagagcaaccccgtgatgatcgatgccaaggaagtgagcgccgcccaccgggccagatacttctggggcaatctgcctggcatgaacagacccctggccagcaccgtgaacgacaagctggagctgcaggagtgcctggagcacggccggatcgccaagttcagcaaggtgagaaccatcaccacccgaagcaacagcatcaaacaaggcaaggaccagcactttcctgtgttcatgaacgagaaggaggacatcctgtggtgtaccgagatggagagagtgttcgggttcccagtccactacacagatgtcagcaacatgtctagactggccagacagagactgctgggaagaagctggtccgtccctgtgatcagacacctgttcgcccctctgaaggagtacttcgcctgcgtgagcagcggcaacagcaacgccaacagccggggccccagcttctctagcggcctggtgccactgtccctgagagggagccacatgggccccatggagatctacaaaaccgtgagcgcctggaagcggcagcctgtgcgcgtgctgagcctgtttcggaatatcgataaagtcctgaaaagcctgggattcctggagagcggctctggctccggcggtggcaccctgaagtacgtggaggatgtgacaaacgtggtcagacgggatgtggagaagtggggccccttcgatctggtgtacggcagcacccaacccctgggcagctcttgtgaccggtgccctggctggtacatgtttcagttccaccggatcctgcagtacgccctgccgagacaggagtcccagcggccattcttttggattttcatggacaacttgctgctgaccgaggatgaccaggaaactaccactcggttcctgcagaccgaagccgtgaccctgcaggacgtgagaggccgggactaccagaacgccatgcgggtgtggtccaacatccctggactgaaaagcaagcacgcacctctgacccctaaagaagaggagtacctgcaggcccaggtgcggagcagaagcaagctggacgcccctaaggtggatctgctggtgaagaattgcctcctgcccctgagagagtacttcaagtatttcagccagaatagtctgcccctgggcggcccaagcagcggcgcccctcctcccagcggcggcagcccagccggctccccaacctctaccgaggagggcacctctgagtccgccacccccgagagcggccctggcacctccaccgagcccagcgagggcagcgcacccggcagccctgccggcagccccacctccacagaggagggaaccagcaccgagcccagcgaaggcagcgccccaggcaccagcaccgagcctagtgagggcggctctggcggcggcagcgcccaggagattaaacggatcaacaagatcagaagaagacttgtgaaagacagcaacaccaagaaggccggcaagacaggccccatgaaaaccctgctggttagagtgatgacacccgatctgagagagcggctggaaaacctgagaaagaagcctgaaaatatcccccagcccatcagcaatacatctagagccaacctgaataagctgctgaccgattacaccgaaatgaagaaggcgatcctgcatgtgtactgggaagagttccagaaggaccctgtgggcctgatgagccgggtggcccagcctgccagcaagaagatcgatcagaacaagctgaaacctgagatggacgagaagggcaacctgaccaccgccggctttgcctgctctcagtgtggccagcccctgttcgtgtacaagctggagcaggtgtctgagaagggcaaggcttacaccaactacttcggacggtgcaatgtggccgagcacgaaaagctgatcctgctggcccagctgaagcccgagaaggatagcgacgaagccgtgacatatagcctgggaaagtttgggcagagggccctggatttctacagcattcatgtgaccaaggagtccacccaccccgtgaagcccctggcccagatcgccggaaacagatacgcctccggacctgtgggaaaggccctgagcgacgcatgtatgggcacaatcgcctccttcctgtctaagtaccaggacatcatcatcgaacaccagaaggtggtgaagggcaaccagaagagactggagagcctgcgggagctggccggcaaggaaaacctggaataccctagcgtgaccctgccacctcagcctcacaccaaggagggcgttgatgcctacaacgaagtgatcgcccgggtgcgaatgtgggtgaacctgaacctgtggcagaagctgaagctaagcagagatgatgccaagcctctgctgagactgaagggattcccttcctttcctctggtcgagagacaggccaacgaagtggactggtgggacatggtgtgtaacgtgaagaagctgatcaacgagaaaaaggaggatggcaaggtgttttggcagaatctggctggctacaagagacaggaagccctgagaccatacctgagcagcgaggaagatcggaagaagggaaagaaattcgctcggtaccagctgggcgacctgctgctgcacctggaaaagaagcacggcgaggactggggaaaggtgtacgacgaggcctgggagcggattgacaagaaagtggaaggcctgagcaagcacatcaagctggaagaggaacggagaagcgaggacgcccagagcaaggccgccctgaccgactggctgcgggctaaggccagcttcgtgatcgagggcctgaaggaggccgacaaggacgagttctgcagatgcgagctgaagctgcagaagtggtacggggacctgcggggaaagcccttcgccatcgaagccgagaacagcatcctggacatcagcggcttcagcaagcagtacaactgtgccttcatctggcagaaggacggcgtgaagaagctgaacctgtacctgatcatcaactacttcaagggcggcaagctgcggttcaagaagatcaaacctgaagccttcgaagccaacagattctacaccgtgatcaacaaaaagagcggcgagatcgtgcccatggaggtgaacttcaacttcgacgaccccaacctgatcatcctgcctctggcctttggcaagagacagggcagagaattcatctggaacgacctgctgtccctggaaaccggcagcctgaagctggccaacggaagagtgatcgagaagacactgtacaacagaagaacccggcaggatgagcctgccctgttcgtggccctgaccttcgagcggcgggaggtcctggactcctccaatatcaaaccaatgaacctgatcggcgtggcaagaggcgaaaacatccccgccgtgatcgccctgaccgaccccgagggctgcccactgagccggtttaaggatagcctgggaaacccaacccacatcctgagaatcggcgagagctataaggagaagcagcggaccatccaggccaagaaggaggtggagcagcggagagccggcggctacagccggaagtacgccagcaaagccaagaatctggcagacgatatggtgagaaacaccgctagagatctgctgtactacgccgtgacccaggatgccatgctgatcttcgccaacctgagccggggcttcggccggcagggcaagcggaccttcatggccgagagacagtacacacggatggaggactggctgaccgccaagctggcctacgagggcctgagcaagacctacctgtccaagacactggcccagtacacctccaagacatgcagcaactgtgggtttaccatcaccagcgccgactacgacagggtgctggagaagctgaagaagacagcaacaggctggatgaccacaattaacggcaaggagctgaaggtggagggccagattacctactacaacagatacaagagacagaacgtagtcaaggacctgtccgtcgagctggatagactgagcgaagaatctgtgaacaacgacatctcctcctggacaaagggcagaagcggagaagctctgagcctcctgaagaaaagattctcccatagacccgtgcaggagaagttcgtgtgcctgaactgcggcttcgagacacacgcagccgagcaagccgccctgaacatcgccagatcctggctgttcctgcggagccaggagtacaagaaataccagacaaacaagacaaccggcaacaccgataagagagccttcgtcgagacctggcagtccttttaccggaagaagcttaaggaggtgtggaaacctgccgtgcggtctggcggatctggcggaggctccacaagcccccaggacagcgtgaccttcgaggaggtggccgtgagcttcagcagggaggagtgggccctgctgaccgactggcagaagaacctgtacaaggacgtgatgagggacaactacgagatgctgaacagcctggacctggccgcccacaagcccgacatcatcctgaggatcgagaggggccaggagccctgcgtgggcaggctgcagaggagcaaggccagggagaggcccaaccacgtgttcaccagccccaagaaaaagagaaaagtctaagctgccttctgcggggcttgccttctggccatgcccttcttctctcccttgcacctgtacctcttggtctttgaataaagcctgagtaggaaggctagcaaaaaaaaaaaaaaaaaaaaaaaaaaaaaaaaaaaaaaaaaaaaaaaaaaaaaaaaaaaaaaaaaaaaaaaaaaaaaaaa

SEQ ID NO: 6411 - RNA, 5797 nt, synthetic construct
  source 1..5797: mol_type = other RNA
aggaaataagagagaaaagaagagtaagaagaaatataagagccaccatggcccctaagaagaagcgtaaagtgagccggatggaacgcctcgtctacgaggtgcggcagaagtgcagaaacatcgaggacatctgcatctcctgcggatctctgaacgtgaccctggagcacccactgttcatcggcggcatgtgccagaactgtaaaaactgttttctggagtgtgcctatcaatacgacgatgacggctaccagagctactgcaccatctgttgcggcggaagagaggtgctgatgtgtggaaataacaactgctgccggtgcttctgcgtggaatgcgtggacctgctggtgggccccggcgccgcccaggccgctattaaggaagatccttggaactgctacatgtgcggccacaagggcacatacggcctgctgagacggagagaggactggcctagcagactgcagatgttcttcgccaataaccacgaccaggagttcgacccccctaaggtgtaccctcccgtccccgccgagaagagaaagcccatccgggtcctgagcctgttcgatggcatcgccaccggtctgctggtgctgaaggacctgggcatccaggtggataggtacattgcctccgaggtgtgcgaggactccatcaccgtgggaatggtgcgtcatcagggcaagatcatgtacgtgggcgacgtgcggagcgtgacacagaagcatatccaggagtggggccctttcgacctggtgatcggcggcagcccttgcaatgacctgagcatcgtgaacccagcccggaagggcctgtacgagggaaccggcagactgttcttcgagttttacagactgctgcacgacgcccggcctaaggaaggcgacgaccggcccttcttttggctgttcgagaatgtggtggccatgggagtcagcgacaagcgggatattagccggttcctggagagcaaccccgtgatgatcgatgccaaggaagtgagcgccgcccaccgggccagatacttctggggcaatctgcctggcatgaacagacccctggccagcaccgtgaacgacaagctggagctgcaggagtgcctggagcacggccggatcgccaagttcagcaaggtgagaaccatcaccacccgaagcaacagcatcaaacaaggcaaggaccagcactttcctgtgttcatgaacgagaaggaggacatcctgtggtgtaccgagatggagagagtgttcgggttcccagtccactacacagatgtcagcaacatgtctagactggccagacagagactgctgggaagaagctggtccgtccctgtgatcagacacctgttcgcccctctgaaggagtacttcgcctgcgtgagcagcggcaacagcaacgccaacagccggggccccagcttctctagcggcctggtgccactgtccctgagagggagccacatgggccccatggagatctacaaaaccgtgagcgcctggaagcggcagcctgtgcgcgtgctgagcctgtttcggaatatcgataaagtcctgaaaagcctgggattcctggagagcggctctggctccggcggtggcaccctgaagtacgtggaggatgtgacaaacgtggtcagacgggatgtggagaagtggggccccttcgatctggtgtacggcagcacccaacccctgggcagctcttgtgaccggtgccctggctggtacatgtttcagttccaccggatcctgcagtacgccctgccgagacaggagtcccagcggccattcttttggattttcatggacaacttgctgctgaccgaggatgaccaggaaactaccactcggttcctgcagaccgaagccgtgaccctgcaggacgtgagaggccgggactaccagaacgccatgcgggtgtggtccaacatccctggactgaaaagcaagcacgcacctctgacccctaaagaagaggagtacctgcaggcccaggtgcggagcagaagcaagctggacgcccctaaggtggatctgctggtgaagaattgcctcctgcccctgagagagtacttcaagtatttcagccagaatagtctgcccctgggcggcccaagcagcggcgcccctcctcccagcggcggcagcccagccggctccccaacctctaccgaggagggcacctctgagtccgccacccccgagagcggccctggcacctccaccgagcccagcgagggcagcgcacccggcagccctgccggcagccccacctccacagaggagggaaccagcaccgagcccagcgaaggcagcgccccaggcaccagcaccgagcctagtgagggcggctctggcggcggcagcgcccaggagattaaacggatcaacaagatcagaagaagacttgtgaaagacagcaacaccaagaaggccggcaagacaggccccatgaaaaccctgctggttagagtgatgacacccgatctgagagagcggctggaaaacctgagaaagaagcctgaaaatatcccccagcccatcagcaatacatctagagccaacctgaataagctgctgaccgattacaccgaaatgaagaaggcgatcctgcatgtgtactgggaagagttccagaaggaccctgtgggcctgatgagccgggtggcccagcctgccagcaagaagatcgatcagaacaagctgaaacctgagatggacgagaagggcaacctgaccaccgccggctttgcctgctctcagtgtggccagcccctgttcgtgtacaagctggagcaggtgtctgagaagggcaaggcttacaccaactacttcggacggtgcaatgtggccgagcacgaaaagctgatcctgctggcccagctgaagcccgagaaggatagcgacgaagccgtgacatatagcctgggaaagtttgggcagagggccctggatttctacagcattcatgtgaccaaggagtccacccaccccgtgaagcccctggcccagatcgccggaaacagatacgcctccggacctgtgggaaaggccctgagcgacgcatgtatgggcacaatcgcctccttcctgtctaagtaccaggacatcatcatcgaacaccagaaggtggtgaagggcaaccagaagagactggagagcctgcgggagctggccggcaaggaaaacctggaataccctagcgtgaccctgccacctcagcctcacaccaaggagggcgttgatgcctacaacgaagtgatcgcccgggtgcgaatgtgggtgaacctgaacctgtggcagaagctgaagctaagcagagatgatgccaagcctctgctgagactgaagggattcccttcctttcctctggtcgagagacaggccaacgaagtggactggtgggacatggtgtgtaacgtgaagaagctgatcaacgagaaaaaggaggatggcaaggtgttttggcagaatctggctggctacaagagacaggaagccctgagaccatacctgagcagcgaggaagatcggaagaagggaaagaaattcgctcggtaccagctgggcgacctgctgctgcacctggaaaagaagcacggcgaggactggggaaaggtgtacgacgaggcctgggagcggattgacaagaaagtggaaggcctgagcaagcacatcaagctggaagaggaacggagaagcgaggacgcccagagcaaggccgccctgaccgactggctgcgggctaaggccagcttcgtgatcgagggcctgaaggaggccgacaaggacgagttctgcagatgcgagctgaagctgcagaagtggtacggggacctgcggggaaagcccttcgccatcgaagccgagaacagcatcctggacatcagcggcttcagcaagcagtacaactgtgccttcatctggcagaaggacggcgtgaagaagctgaacctgtacctgatcatcaactacttcaagggcggcaagctgcggttcaagaagatcaaacctgaagccttcgaagccaacagattctacaccgtgatcaacaaaaagagcggcgagatcgtgcccatggaggtgaacttcaacttcgacgaccccaacctgatcatcctgcctctggcctttggcaagagacagggcagagaattcatctggaacgacctgctgtccctggaaaccggcagcctgaagctggccaacggaagagtgatcgagaagacactgtacaacagaagaacccggcaggatgagcctgccctgttcgtggccctgaccttcgagcggcgggaggtcctggactcctccaatatcaaaccaatgaacctgatcggcgtggcaagaggcgaaaacatccccgccgtgatcgccctgaccgaccccgagggctgcccactgagccggtttaaggatagcctgggaaacccaacccacatcctgagaatcggcgagagctataaggagaagcagcggaccatccaggccaagaaggaggtggagcagcggagagccggcggctacagccggaagtacgccagcaaagccaagaatctggcagacgatatggtgagaaacaccgctagagatctgctgtactacgccgtgacccaggatgccatgctgatcttcgccaacctgagccggggcttcggccggcagggcaagcggaccttcatggccgagagacagtacacacggatggaggactggctgaccgccaagctggcctacgagggcctgagcaagacctacctgtccaagacactggcccagtacacctccaagacatgcagcaactgtgggtttaccatcaccagcgccgactacgacagggtgctggagaagctgaagaagacagcaacaggctggatgaccacaattaacggcaaggagctgaaggtggagggccagattacctactacaacagatacaagagacagaacgtagtcaaggacctgtccgtcgagctggatagactgagcgaagaatctgtgaacaacgacatctcctcctggacaaagggcagaagcggagaagctctgagcctcctgaagaaaagattctcccatagacccgtgcaggagaagttcgtgtgcctgaactgcggcttcgagacacacgcagccgagcaagccgccctgaacatcgccagatcctggctgttcctgcggagccaggagtacaagaaataccagacaaacaagacaaccggcaacaccgataagagagccttcgtcgagacctggcagtccttttaccggaagaagcttaaggaggtgtggaaacctgccgtgcggtctggcggatctggcggaggctccacaagcaggatgaagagcgtgaccttcgaggacgtggccgtgtacttcacccagaccgagtgggacagcctgagcaccgcccagagggccctgtacagggacgtgatgctggagaactacggcaacgtggccagcctgggcttccccctgctgaagcccgccgtgatcagccagctggagggcggcggcgagctggagggccccagccccctggccagcggcgccggcaccggcccccagggcctgtggaccagccccaagaaaaagagaaaagtctaagctgccttctgcggggcttgccttctggccatgcccttcttctctcccttgcacctgtacctcttggtctttgaataaagcctgagtaggaaggctagcaaaaaaaaaaaaaaaaaaaaaaaaaaaaaaaaaaaaaaaaaaaaaaaaaaaaaaaaaaaaaaaaaaaaaaaaaaaaaaaa

SEQ ID NO: 6412 - RNA, 5797 nt, synthetic construct
  source 1..5797: mol_type = other RNA
aggaaataagagagaaaagaagagtaagaagaaatataagagccaccatggcccctaagaagaagcgtaaagtgagccggatggaacgcctcgtctacgaggtgcggcagaagtgcagaaacatcgaggacatctgcatctcctgcggatctctgaacgtgaccctggagcacccactgttcatcggcggcatgtgccagaactgtaaaaactgttttctggagtgtgcctatcaatacgacgatgacggctaccagagctactgcaccatctgttgcggcggaagagaggtgctgatgtgtggaaataacaactgctgccggtgcttctgcgtggaatgcgtggacctgctggtgggccccggcgccgcccaggccgctattaaggaagatccttggaactgctacatgtgcggccacaagggcacatacggcctgctgagacggagagaggactggcctagcagactgcagatgttcttcgccaataaccacgaccaggagttcgacccccctaaggtgtaccctcccgtccccgccgagaagagaaagcccatccgggtcctgagcctgttcgatggcatcgccaccggtctgctggtgctgaaggacctgggcatccaggtggataggtacattgcctccgaggtgtgcgaggactccatcaccgtgggaatggtgcgtcatcagggcaagatcatgtacgtgggcgacgtgcggagcgtgacacagaagcatatccaggagtggggccctttcgacctggtgatcggcggcagcccttgcaatgacctgagcatcgtgaacccagcccggaagggcctgtacgagggaaccggcagactgttcttcgagttttacagactgctgcacgacgcccggcctaaggaaggcgacgaccggcccttcttttggctgttcgagaatgtggtggccatgggagtcagcgacaagcgggatattagccggttcctggagagcaaccccgtgatgatcgatgccaaggaagtgagcgccgcccaccgggccagatacttctggggcaatctgcctggcatgaacagacccctggccagcaccgtgaacgacaagctggagctgcaggagtgcctggagcacggccggatcgccaagttcagcaaggtgagaaccatcaccacccgaagcaacagcatcaaacaaggcaaggaccagcactttcctgtgttcatgaacgagaaggaggacatcctgtggtgtaccgagatggagagagtgttcgggttcccagtccactacacagatgtcagcaacatgtctagactggccagacagagactgctgggaagaagctggtccgtccctgtgatcagacacctgttcgcccctctgaaggagtacttcgcctgcgtgagcagcggcaacagcaacgccaacagccggggccccagcttctctagcggcctggtgccactgtccctgagagggagccacatgggccccatggagatctacaaaaccgtgagcgcctggaagcggcagcctgtgcgcgtgctgagcctgtttcggaatatcgataaagtcctgaaaagcctgggattcctggagagcggctctggctccggcggtggcaccctgaagtacgtggaggatgtgacaaacgtggtcagacgggatgtggagaagtggggccccttcgatctggtgtacggcagcacccaacccctgggcagctcttgtgaccggtgccctggctggtacatgtttcagttccaccggatcctgcagtacgccctgccgagacaggagtcccagcggccattcttttggattttcatggacaacttgctgctgaccgaggatgaccaggaaactaccactcggttcctgcagaccgaagccgtgaccctgcaggacgtgagaggccgggactaccagaacgccatgcgggtgtggtccaacatccctggactgaaaagcaagcacgcacctctgacccctaaagaagaggagtacctgcaggcccaggtgcggagcagaagcaagctggacgcccctaaggtggatctgctggtgaagaattgcctcctgcccctgagagagtacttcaagtatttcagccagaatagtctgcccctgggcggcccaagcagcggcgcccctcctcccagcggcggcagcccagccggctccccaacctctaccgaggagggcacctctgagtccgccacccccgagagcggccctggcacctccaccgagcccagcgagggcagcgcacccggcagccctgccggcagccccacctccacagaggagggaaccagcaccgagcccagcgaaggcagcgccccaggcaccagcaccgagcctagtgagggcggctctggcggcggcagcgcccaggagattaaacggatcaacaagatcagaagaagacttgtgaaagacagcaacaccaagaaggccggcaagacaggccccatgaaaaccctgctggttagagtgatgacacccgatctgagagagcggctggaaaacctgagaaagaagcctgaaaatatcccccagcccatcagcaatacatctagagccaacctgaataagctgctgaccgattacaccgaaatgaagaaggcgatcctgcatgtgtactgggaagagttccagaaggaccctgtgggcctgatgagccgggtggcccagcctgccagcaagaagatcgatcagaacaagctgaaacctgagatggacgagaagggcaacctgaccaccgccggctttgcctgctctcagtgtggccagcccctgttcgtgtacaagctggagcaggtgtctgagaagggcaaggcttacaccaactacttcggacggtgcaatgtggccgagcacgaaaagctgatcctgctggcccagctgaagcccgagaaggatagcgacgaagccgtgacatatagcctgggaaagtttgggcagagggccctggatttctacagcattcatgtgaccaaggagtccacccaccccgtgaagcccctggcccagatcgccggaaacagatacgcctccggacctgtgggaaaggccctgagcgacgcatgtatgggcacaatcgcctccttcctgtctaagtaccaggacatcatcatcgaacaccagaaggtggtgaagggcaaccagaagagactggagagcctgcgggagctggccggcaaggaaaacctggaataccctagcgtgaccctgccacctcagcctcacaccaaggagggcgttgatgcctacaacgaagtgatcgcccgggtgcgaatgtgggtgaacctgaacctgtggcagaagctgaagctaagcagagatgatgccaagcctctgctgagactgaagggattcccttcctttcctctggtcgagagacaggccaacgaagtggactggtgggacatggtgtgtaacgtgaagaagctgatcaacgagaaaaaggaggatggcaaggtgttttggcagaatctggctggctacaagagacaggaagccctgagaccatacctgagcagcgaggaagatcggaagaagggaaagaaattcgctcggtaccagctgggcgacctgctgctgcacctggaaaagaagcacggcgaggactggggaaaggtgtacgacgaggcctgggagcggattgacaagaaagtggaaggcctgagcaagcacatcaagctggaagaggaacggagaagcgaggacgcccagagcaaggccgccctgaccgactggctgcgggctaaggccagcttcgtgatcgagggcctgaaggaggccgacaaggacgagttctgcagatgcgagctgaagctgcagaagtggtacggggacctgcggggaaagcccttcgccatcgaagccgagaacagcatcctggacatcagcggcttcagcaagcagtacaactgtgccttcatctggcagaaggacggcgtgaagaagctgaacctgtacctgatcatcaactacttcaagggcggcaagctgcggttcaagaagatcaaacctgaagccttcgaagccaacagattctacaccgtgatcaacaaaaagagcggcgagatcgtgcccatggaggtgaacttcaacttcgacgaccccaacctgatcatcctgcctctggcctttggcaagagacagggcagagaattcatctggaacgacctgctgtccctggaaaccggcagcctgaagctggccaacggaagagtgatcgagaagacactgtacaacagaagaacccggcaggatgagcctgccctgttcgtggccctgaccttcgagcggcgggaggtcctggactcctccaatatcaaaccaatgaacctgatcggcgtggcaagaggcgaaaacatccccgccgtgatcgccctgaccgaccccgagggctgcccactgagccggtttaaggatagcctgggaaacccaacccacatcctgagaatcggcgagagctataaggagaagcagcggaccatccaggccaagaaggaggtggagcagcggagagccggcggctacagccggaagtacgccagcaaagccaagaatctggcagacgatatggtgagaaacaccgctagagatctgctgtactacgccgtgacccaggatgccatgctgatcttcgccaacctgagccggggcttcggccggcagggcaagcggaccttcatggccgagagacagtacacacggatggaggactggctgaccgccaagctggcctacgagggcctgagcaagacctacctgtccaagacactggcccagtacacctccaagacatgcagcaactgtgggtttaccatcaccagcgccgactacgacagggtgctggagaagctgaagaagacagcaacaggctggatgaccacaattaacggcaaggagctgaaggtggagggccagattacctactacaacagatacaagagacagaacgtagtcaaggacctgtccgtcgagctggatagactgagcgaagaatctgtgaacaacgacatctcctcctggacaaagggcagaagcggagaagctctgagcctcctgaagaaaagattctcccatagacccgtgcaggagaagttcgtgtgcctgaactgcggcttcgagacacacgcagccgagcaagccgccctgaacatcgccagatcctggctgttcctgcggagccaggagtacaagaaataccagacaaacaagacaaccggcaacaccgataagagagccttcgtcgagacctggcagtccttttaccggaagaagcttaaggaggtgtggaaacctgccgtgcggtctggcggatctggcggaggctccacaagcatccagggcagcctgaccttcaaggacgtggccgtggacttcacccaggaggagtggtgcctgctggaccacagccagaaggagctgtacctggaggtgatgctggagaacgtgcagaacctgctgagcgtgggcctgcccgtgcccagggagtactgcaccagctacttccagcaggagaaggccaggtggctgctggagcagaagtgccccaggagcagcagccccgaggccgagaccaacaccagccccaagaaaaagagaaaagtctaagctgccttctgcggggcttgccttctggccatgcccttcttctctcccttgcacctgtacctcttggtctttgaataaagcctgagtaggaaggctagcaaaaaaaaaaaaaaaaaaaaaaaaaaaaaaaaaaaaaaaaaaaaaaaaaaaaaaaaaaaaaaaaaaaaaaaaaaaaaaaa

SEQ ID NO: 6413 - RNA, 5797 nt, synthetic construct
  source 1..5797: mol_type = other RNA
aggaaataagagagaaaagaagagtaagaagaaatataagagccaccatggcccctaagaagaagcgtaaagtgagccggatggaacgcctcgtctacgaggtgcggcagaagtgcagaaacatcgaggacatctgcatctcctgcggatctctgaacgtgaccctggagcacccactgttcatcggcggcatgtgccagaactgtaaaaactgttttctggagtgtgcctatcaatacgacgatgacggctaccagagctactgcaccatctgttgcggcggaagagaggtgctgatgtgtggaaataacaactgctgccggtgcttctgcgtggaatgcgtggacctgctggtgggccccggcgccgcccaggccgctattaaggaagatccttggaactgctacatgtgcggccacaagggcacatacggcctgctgagacggagagaggactggcctagcagactgcagatgttcttcgccaataaccacgaccaggagttcgacccccctaaggtgtaccctcccgtccccgccgagaagagaaagcccatccgggtcctgagcctgttcgatggcatcgccaccggtctgctggtgctgaaggacctgggcatccaggtggataggtacattgcctccgaggtgtgcgaggactccatcaccgtgggaatggtgcgtcatcagggcaagatcatgtacgtgggcgacgtgcggagcgtgacacagaagcatatccaggagtggggccctttcgacctggtgatcggcggcagcccttgcaatgacctgagcatcgtgaacccagcccggaagggcctgtacgagggaaccggcagactgttcttcgagttttacagactgctgcacgacgcccggcctaaggaaggcgacgaccggcccttcttttggctgttcgagaatgtggtggccatgggagtcagcgacaagcgggatattagccggttcctggagagcaaccccgtgatgatcgatgccaaggaagtgagcgccgcccaccgggccagatacttctggggcaatctgcctggcatgaacagacccctggccagcaccgtgaacgacaagctggagctgcaggagtgcctggagcacggccggatcgccaagttcagcaaggtgagaaccatcaccacccgaagcaacagcatcaaacaaggcaaggaccagcactttcctgtgttcatgaacgagaaggaggacatcctgtggtgtaccgagatggagagagtgttcgggttcccagtccactacacagatgtcagcaacatgtctagactggccagacagagactgctgggaagaagctggtccgtccctgtgatcagacacctgttcgcccctctgaaggagtacttcgcctgcgtgagcagcggcaacagcaacgccaacagccggggccccagcttctctagcggcctggtgccactgtccctgagagggagccacatgggccccatggagatctacaaaaccgtgagcgcctggaagcggcagcctgtgcgcgtgctgagcctgtttcggaatatcgataaagtcctgaaaagcctgggattcctggagagcggctctggctccggcggtggcaccctgaagtacgtggaggatgtgacaaacgtggtcagacgggatgtggagaagtggggccccttcgatctggtgtacggcagcacccaacccctgggcagctcttgtgaccggtgccctggctggtacatgtttcagttccaccggatcctgcagtacgccctgccgagacaggagtcccagcggccattcttttggattttcatggacaacttgctgctgaccgaggatgaccaggaaactaccactcggttcctgcagaccgaagccgtgaccctgcaggacgtgagaggccgggactaccagaacgccatgcgggtgtggtccaacatccctggactgaaaagcaagcacgcacctctgacccctaaagaagaggagtacctgcaggcccaggtgcggagcagaagcaagctggacgcccctaaggtggatctgctggtgaagaattgcctcctgcccctgagagagtacttcaagtatttcagccagaatagtctgcccctgggcggcccaagcagcggcgcccctcctcccagcggcggcagcccagccggctccccaacctctaccgaggagggcacctctgagtccgccacccccgagagcggccctggcacctccaccgagcccagcgagggcagcgcacccggcagccctgccggcagccccacctccacagaggagggaaccagcaccgagcccagcgaaggcagcgccccaggcaccagcaccgagcctagtgagggcggctctggcggcggcagcgcccaggagattaaacggatcaacaagatcagaagaagacttgtgaaagacagcaacaccaagaaggccggcaagacaggccccatgaaaaccctgctggttagagtgatgacacccgatctgagagagcggctggaaaacctgagaaagaagcctgaaaatatcccccagcccatcagcaatacatctagagccaacctgaataagctgctgaccgattacaccgaaatgaagaaggcgatcctgcatgtgtactgggaagagttccagaaggaccctgtgggcctgatgagccgggtggcccagcctgccagcaagaagatcgatcagaacaagctgaaacctgagatggacgagaagggcaacctgaccaccgccggctttgcctgctctcagtgtggccagcccctgttcgtgtacaagctggagcaggtgtctgagaagggcaaggcttacaccaactacttcggacggtgcaatgtggccgagcacgaaaagctgatcctgctggcccagctgaagcccgagaaggatagcgacgaagccgtgacatatagcctgggaaagtttgggcagagggccctggatttctacagcattcatgtgaccaaggagtccacccaccccgtgaagcccctggcccagatcgccggaaacagatacgcctccggacctgtgggaaaggccctgagcgacgcatgtatgggcacaatcgcctccttcctgtctaagtaccaggacatcatcatcgaacaccagaaggtggtgaagggcaaccagaagagactggagagcctgcgggagctggccggcaaggaaaacctggaataccctagcgtgaccctgccacctcagcctcacaccaaggagggcgttgatgcctacaacgaagtgatcgcccgggtgcgaatgtgggtgaacctgaacctgtggcagaagctgaagctaagcagagatgatgccaagcctctgctgagactgaagggattcccttcctttcctctggtcgagagacaggccaacgaagtggactggtgggacatggtgtgtaacgtgaagaagctgatcaacgagaaaaaggaggatggcaaggtgttttggcagaatctggctggctacaagagacaggaagccctgagaccatacctgagcagcgaggaagatcggaagaagggaaagaaattcgctcggtaccagctgggcgacctgctgctgcacctggaaaagaagcacggcgaggactggggaaaggtgtacgacgaggcctgggagcggattgacaagaaagtggaaggcctgagcaagcacatcaagctggaagaggaacggagaagcgaggacgcccagagcaaggccgccctgaccgactggctgcgggctaaggccagcttcgtgatcgagggcctgaaggaggccgacaaggacgagttctgcagatgcgagctgaagctgcagaagtggtacggggacctgcggggaaagcccttcgccatcgaagccgagaacagcatcctggacatcagcggcttcagcaagcagtacaactgtgccttcatctggcagaaggacggcgtgaagaagctgaacctgtacctgatcatcaactacttcaagggcggcaagctgcggttcaagaagatcaaacctgaagccttcgaagccaacagattctacaccgtgatcaacaaaaagagcggcgagatcgtgcccatggaggtgaacttcaacttcgacgaccccaacctgatcatcctgcctctggcctttggcaagagacagggcagagaattcatctggaacgacctgctgtccctggaaaccggcagcctgaagctggccaacggaagagtgatcgagaagacactgtacaacagaagaacccggcaggatgagcctgccctgttcgtggccctgaccttcgagcggcgggaggtcctggactcctccaatatcaaaccaatgaacctgatcggcgtggcaagaggcgaaaacatccccgccgtgatcgccctgaccgaccccgagggctgcccactgagccggtttaaggatagcctgggaaacccaacccacatcctgagaatcggcgagagctataaggagaagcagcggaccatccaggccaagaaggaggtggagcagcggagagccggcggctacagccggaagtacgccagcaaagccaagaatctggcagacgatatggtgagaaacaccgctagagatctgctgtactacgccgtgacccaggatgccatgctgatcttcgccaacctgagccggggcttcggccggcagggcaagcggaccttcatggccgagagacagtacacacggatggaggactggctgaccgccaagctggcctacgagggcctgagcaagacctacctgtccaagacactggcccagtacacctccaagacatgcagcaactgtgggtttaccatcaccagcgccgactacgacagggtgctggagaagctgaagaagacagcaacaggctggatgaccacaattaacggcaaggagctgaaggtggagggccagattacctactacaacagatacaagagacagaacgtagtcaaggacctgtccgtcgagctggatagactgagcgaagaatctgtgaacaacgacatctcctcctggacaaagggcagaagcggagaagctctgagcctcctgaagaaaagattctcccatagacccgtgcaggagaagttcgtgtgcctgaactgcggcttcgagacacacgcagccgagcaagccgccctgaacatcgccagatcctggctgttcctgcggagccaggagtacaagaaataccagacaaacaagacaaccggcaacaccgataagagagccttcgtcgagacctggcagtccttttaccggaagaagcttaaggaggtgtggaaacctgccgtgcggtctggcggatctggcggaggctccacaagcggcaccgtggtgttcagcgacgtgagcgtggacttcagccaggaggagtgggagtgcctggaccccgtgcagagggacctgtacagggaggtgatgctggagaactacagcaacctggtgagcgtgggcgccggcccctacatccccaagccccaggtgatcagcctgctggagcagggcaaggagccctggatggtgggcagggagctgaccaggggcctgtgcagcgacctggagagcatgaccagccccaagaaaaagagaaaagtctaagctgccttctgcggggcttgccttctggccatgcccttcttctctcccttgcacctgtacctcttggtctttgaataaagcctgagtaggaaggctagcaaaaaaaaaaaaaaaaaaaaaaaaaaaaaaaaaaaaaaaaaaaaaaaaaaaaaaaaaaaaaaaaaaaaaaaaaaaaaaaa

SEQ ID NO: 6414 - RNA, 5797 nt, synthetic construct
  source 1..5797: mol_type = other RNA
aggaaataagagagaaaagaagagtaagaagaaatataagagccaccatggcccctaagaagaagcgtaaagtgagccggatggaacgcctcgtctacgaggtgcggcagaagtgcagaaacatcgaggacatctgcatctcctgcggatctctgaacgtgaccctggagcacccactgttcatcggcggcatgtgccagaactgtaaaaactgttttctggagtgtgcctatcaatacgacgatgacggctaccagagctactgcaccatctgttgcggcggaagagaggtgctgatgtgtggaaataacaactgctgccggtgcttctgcgtggaatgcgtggacctgctggtgggccccggcgccgcccaggccgctattaaggaagatccttggaactgctacatgtgcggccacaagggcacatacggcctgctgagacggagagaggactggcctagcagactgcagatgttcttcgccaataaccacgaccaggagttcgacccccctaaggtgtaccctcccgtccccgccgagaagagaaagcccatccgggtcctgagcctgttcgatggcatcgccaccggtctgctggtgctgaaggacctgggcatccaggtggataggtacattgcctccgaggtgtgcgaggactccatcaccgtgggaatggtgcgtcatcagggcaagatcatgtacgtgggcgacgtgcggagcgtgacacagaagcatatccaggagtggggccctttcgacctggtgatcggcggcagcccttgcaatgacctgagcatcgtgaacccagcccggaagggcctgtacgagggaaccggcagactgttcttcgagttttacagactgctgcacgacgcccggcctaaggaaggcgacgaccggcccttcttttggctgttcgagaatgtggtggccatgggagtcagcgacaagcgggatattagccggttcctggagagcaaccccgtgatgatcgatgccaaggaagtgagcgccgcccaccgggccagatacttctggggcaatctgcctggcatgaacagacccctggccagcaccgtgaacgacaagctggagctgcaggagtgcctggagcacggccggatcgccaagttcagcaaggtgagaaccatcaccacccgaagcaacagcatcaaacaaggcaaggaccagcactttcctgtgttcatgaacgagaaggaggacatcctgtggtgtaccgagatggagagagtgttcgggttcccagtccactacacagatgtcagcaacatgtctagactggccagacagagactgctgggaagaagctggtccgtccctgtgatcagacacctgttcgcccctctgaaggagtacttcgcctgcgtgagcagcggcaacagcaacgccaacagccggggccccagcttctctagcggcctggtgccactgtccctgagagggagccacatgggccccatggagatctacaaaaccgtgagcgcctggaagcggcagcctgtgcgcgtgctgagcctgtttcggaatatcgataaagtcctgaaaagcctgggattcctggagagcggctctggctccggcggtggcaccctgaagtacgtggaggatgtgacaaacgtggtcagacgggatgtggagaagtggggccccttcgatctggtgtacggcagcacccaacccctgggcagctcttgtgaccggtgccctggctggtacatgtttcagttccaccggatcctgcagtacgccctgccgagacaggagtcccagcggccattcttttggattttcatggacaacttgctgctgaccgaggatgaccaggaaactaccactcggttcctgcagaccgaagccgtgaccctgcaggacgtgagaggccgggactaccagaacgccatgcgggtgtggtccaacatccctggactgaaaagcaagcacgcacctctgacccctaaagaagaggagtacctgcaggcccaggtgcggagcagaagcaagctggacgcccctaaggtggatctgctggtgaagaattgcctcctgcccctgagagagtacttcaagtatttcagccagaatagtctgcccctgggcggcccaagcagcggcgcccctcctcccagcggcggcagcccagccggctccccaacctctaccgaggagggcacctctgagtccgccacccccgagagcggccctggcacctccaccgagcccagcgagggcagcgcacccggcagccctgccggcagccccacctccacagaggagggaaccagcaccgagcccagcgaaggcagcgccccaggcaccagcaccgagcctagtgagggcggctctggcggcggcagcgcccaggagattaaacggatcaacaagatcagaagaagacttgtgaaagacagcaacaccaagaaggccggcaagacaggccccatgaaaaccctgctggttagagtgatgacacccgatctgagagagcggctggaaaacctgagaaagaagcctgaaaatatcccccagcccatcagcaatacatctagagccaacctgaataagctgctgaccgattacaccgaaatgaagaaggcgatcctgcatgtgtactgggaagagttccagaaggaccctgtgggcctgatgagccgggtggcccagcctgccagcaagaagatcgatcagaacaagctgaaacctgagatggacgagaagggcaacctgaccaccgccggctttgcctgctctcagtgtggccagcccctgttcgtgtacaagctggagcaggtgtctgagaagggcaaggcttacaccaactacttcggacggtgcaatgtggccgagcacgaaaagctgatcctgctggcccagctgaagcccgagaaggatagcgacgaagccgtgacatatagcctgggaaagtttgggcagagggccctggatttctacagcattcatgtgaccaaggagtccacccaccccgtgaagcccctggcccagatcgccggaaacagatacgcctccggacctgtgggaaaggccctgagcgacgcatgtatgggcacaatcgcctccttcctgtctaagtaccaggacatcatcatcgaacaccagaaggtggtgaagggcaaccagaagagactggagagcctgcgggagctggccggcaaggaaaacctggaataccctagcgtgaccctgccacctcagcctcacaccaaggagggcgttgatgcctacaacgaagtgatcgcccgggtgcgaatgtgggtgaacctgaacctgtggcagaagctgaagctaagcagagatgatgccaagcctctgctgagactgaagggattcccttcctttcctctggtcgagagacaggccaacgaagtggactggtgggacatggtgtgtaacgtgaagaagctgatcaacgagaaaaaggaggatggcaaggtgttttggcagaatctggctggctacaagagacaggaagccctgagaccatacctgagcagcgaggaagatcggaagaagggaaagaaattcgctcggtaccagctgggcgacctgctgctgcacctggaaaagaagcacggcgaggactggggaaaggtgtacgacgaggcctgggagcggattgacaagaaagtggaaggcctgagcaagcacatcaagctggaagaggaacggagaagcgaggacgcccagagcaaggccgccctgaccgactggctgcgggctaaggccagcttcgtgatcgagggcctgaaggaggccgacaaggacgagttctgcagatgcgagctgaagctgcagaagtggtacggggacctgcggggaaagcccttcgccatcgaagccgagaacagcatcctggacatcagcggcttcagcaagcagtacaactgtgccttcatctggcagaaggacggcgtgaagaagctgaacctgtacctgatcatcaactacttcaagggcggcaagctgcggttcaagaagatcaaacctgaagccttcgaagccaacagattctacaccgtgatcaacaaaaagagcggcgagatcgtgcccatggaggtgaacttcaacttcgacgaccccaacctgatcatcctgcctctggcctttggcaagagacagggcagagaattcatctggaacgacctgctgtccctggaaaccggcagcctgaagctggccaacggaagagtgatcgagaagacactgtacaacagaagaacccggcaggatgagcctgccctgttcgtggccctgaccttcgagcggcgggaggtcctggactcctccaatatcaaaccaatgaacctgatcggcgtggcaagaggcgaaaacatccccgccgtgatcgccctgaccgaccccgagggctgcccactgagccggtttaaggatagcctgggaaacccaacccacatcctgagaatcggcgagagctataaggagaagcagcggaccatccaggccaagaaggaggtggagcagcggagagccggcggctacagccggaagtacgccagcaaagccaagaatctggcagacgatatggtgagaaacaccgctagagatctgctgtactacgccgtgacccaggatgccatgctgatcttcgccaacctgagccggggcttcggccggcagggcaagcggaccttcatggccgagagacagtacacacggatggaggactggctgaccgccaagctggcctacgagggcctgagcaagacctacctgtccaagacactggcccagtacacctccaagacatgcagcaactgtgggtttaccatcaccagcgccgactacgacagggtgctggagaagctgaagaagacagcaacaggctggatgaccacaattaacggcaaggagctgaaggtggagggccagattacctactacaacagatacaagagacagaacgtagtcaaggacctgtccgtcgagctggatagactgagcgaagaatctgtgaacaacgacatctcctcctggacaaagggcagaagcggagaagctctgagcctcctgaagaaaagattctcccatagacccgtgcaggagaagttcgtgtgcctgaactgcggcttcgagacacacgcagccgagcaagccgccctgaacatcgccagatcctggctgttcctgcggagccaggagtacaagaaataccagacaaacaagacaaccggcaacaccgataagagagccttcgtcgagacctggcagtccttttaccggaagaagcttaaggaggtgtggaaacctgccgtgcggtctggcggatctggcggaggctccacaagcgagatgggcctgctgaccttcagggacatcgccatcgagttcagcctggaggagtggcagtgcctggactgcgcccagaggaacctgtacagggacgtgatgctggagaactacaggaacctggtgagcctgggcatcgccgtgagcaagcccgacctgatcacctgcctggagcagaacaaggagagccagaacatcaagaggaacgagatggtggccaagcaccccgtgaccaggagccacaccagccccaagaaaaagagaaaagtctaagctgccttctgcggggcttgccttctggccatgcccttcttctctcccttgcacctgtacctcttggtctttgaataaagcctgagtaggaaggctagcaaaaaaaaaaaaaaaaaaaaaaaaaaaaaaaaaaaaaaaaaaaaaaaaaaaaaaaaaaaaaaaaaaaaaaaaaaaaaaaa

SEQ ID NO: 6415 - RNA, 5797 nt, synthetic construct
  source 1..5797: mol_type = other RNA
aggaaataagagagaaaagaagagtaagaagaaatataagagccaccatggcccctaagaagaagcgtaaagtgagccggatggaacgcctcgtctacgaggtgcggcagaagtgcagaaacatcgaggacatctgcatctcctgcggatctctgaacgtgaccctggagcacccactgttcatcggcggcatgtgccagaactgtaaaaactgttttctggagtgtgcctatcaatacgacgatgacggctaccagagctactgcaccatctgttgcggcggaagagaggtgctgatgtgtggaaataacaactgctgccggtgcttctgcgtggaatgcgtggacctgctggtgggccccggcgccgcccaggccgctattaaggaagatccttggaactgctacatgtgcggccacaagggcacatacggcctgctgagacggagagaggactggcctagcagactgcagatgttcttcgccaataaccacgaccaggagttcgacccccctaaggtgtaccctcccgtccccgccgagaagagaaagcccatccgggtcctgagcctgttcgatggcatcgccaccggtctgctggtgctgaaggacctgggcatccaggtggataggtacattgcctccgaggtgtgcgaggactccatcaccgtgggaatggtgcgtcatcagggcaagatcatgtacgtgggcgacgtgcggagcgtgacacagaagcatatccaggagtggggccctttcgacctggtgatcggcggcagcccttgcaatgacctgagcatcgtgaacccagcccggaagggcctgtacgagggaaccggcagactgttcttcgagttttacagactgctgcacgacgcccggcctaaggaaggcgacgaccggcccttcttttggctgttcgagaatgtggtggccatgggagtcagcgacaagcgggatattagccggttcctggagagcaaccccgtgatgatcgatgccaaggaagtgagcgccgcccaccgggccagatacttctggggcaatctgcctggcatgaacagacccctggccagcaccgtgaacgacaagctggagctgcaggagtgcctggagcacggccggatcgccaagttcagcaaggtgagaaccatcaccacccgaagcaacagcatcaaacaaggcaaggaccagcactttcctgtgttcatgaacgagaaggaggacatcctgtggtgtaccgagatggagagagtgttcgggttcccagtccactacacagatgtcagcaacatgtctagactggccagacagagactgctgggaagaagctggtccgtccctgtgatcagacacctgttcgcccctctgaaggagtacttcgcctgcgtgagcagcggcaacagcaacgccaacagccggggccccagcttctctagcggcctggtgccactgtccctgagagggagccacatgggccccatggagatctacaaaaccgtgagcgcctggaagcggcagcctgtgcgcgtgctgagcctgtttcggaatatcgataaagtcctgaaaagcctgggattcctggagagcggctctggctccggcggtggcaccctgaagtacgtggaggatgtgacaaacgtggtcagacgggatgtggagaagtggggccccttcgatctggtgtacggcagcacccaacccctgggcagctcttgtgaccggtgccctggctggtacatgtttcagttccaccggatcctgcagtacgccctgccgagacaggagtcccagcggccattcttttggattttcatggacaacttgctgctgaccgaggatgaccaggaaactaccactcggttcctgcagaccgaagccgtgaccctgcaggacgtgagaggccgggactaccagaacgccatgcgggtgtggtccaacatccctggactgaaaagcaagcacgcacctctgacccctaaagaagaggagtacctgcaggcccaggtgcggagcagaagcaagctggacgcccctaaggtggatctgctggtgaagaattgcctcctgcccctgagagagtacttcaagtatttcagccagaatagtctgcccctgggcggcccaagcagcggcgcccctcctcccagcggcggcagcccagccggctccccaacctctaccgaggagggcacctctgagtccgccacccccgagagcggccctggcacctccaccgagcccagcgagggcagcgcacccggcagccctgccggcagccccacctccacagaggagggaaccagcaccgagcccagcgaaggcagcgccccaggcaccagcaccgagcctagtgagggcggctctggcggcggcagcgcccaggagattaaacggatcaacaagatcagaagaagacttgtgaaagacagcaacaccaagaaggccggcaagacaggccccatgaaaaccctgctggttagagtgatgacacccgatctgagagagcggctggaaaacctgagaaagaagcctgaaaatatcccccagcccatcagcaatacatctagagccaacctgaataagctgctgaccgattacaccgaaatgaagaaggcgatcctgcatgtgtactgggaagagttccagaaggaccctgtgggcctgatgagccgggtggcccagcctgccagcaagaagatcgatcagaacaagctgaaacctgagatggacgagaagggcaacctgaccaccgccggctttgcctgctctcagtgtggccagcccctgttcgtgtacaagctggagcaggtgtctgagaagggcaaggcttacaccaactacttcggacggtgcaatgtggccgagcacgaaaagctgatcctgctggcccagctgaagcccgagaaggatagcgacgaagccgtgacatatagcctgggaaagtttgggcagagggccctggatttctacagcattcatgtgaccaaggagtccacccaccccgtgaagcccctggcccagatcgccggaaacagatacgcctccggacctgtgggaaaggccctgagcgacgcatgtatgggcacaatcgcctccttcctgtctaagtaccaggacatcatcatcgaacaccagaaggtggtgaagggcaaccagaagagactggagagcctgcgggagctggccggcaaggaaaacctggaataccctagcgtgaccctgccacctcagcctcacaccaaggagggcgttgatgcctacaacgaagtgatcgcccgggtgcgaatgtgggtgaacctgaacctgtggcagaagctgaagctaagcagagatgatgccaagcctctgctgagactgaagggattcccttcctttcctctggtcgagagacaggccaacgaagtggactggtgggacatggtgtgtaacgtgaagaagctgatcaacgagaaaaaggaggatggcaaggtgttttggcagaatctggctggctacaagagacaggaagccctgagaccatacctgagcagcgaggaagatcggaagaagggaaagaaattcgctcggtaccagctgggcgacctgctgctgcacctggaaaagaagcacggcgaggactggggaaaggtgtacgacgaggcctgggagcggattgacaagaaagtggaaggcctgagcaagcacatcaagctggaagaggaacggagaagcgaggacgcccagagcaaggccgccctgaccgactggctgcgggctaaggccagcttcgtgatcgagggcctgaaggaggccgacaaggacgagttctgcagatgcgagctgaagctgcagaagtggtacggggacctgcggggaaagcccttcgccatcgaagccgagaacagcatcctggacatcagcggcttcagcaagcagtacaactgtgccttcatctggcagaaggacggcgtgaagaagctgaacctgtacctgatcatcaactacttcaagggcggcaagctgcggttcaagaagatcaaacctgaagccttcgaagccaacagattctacaccgtgatcaacaaaaagagcggcgagatcgtgcccatggaggtgaacttcaacttcgacgaccccaacctgatcatcctgcctctggcctttggcaagagacagggcagagaattcatctggaacgacctgctgtccctggaaaccggcagcctgaagctggccaacggaagagtgatcgagaagacactgtacaacagaagaacccggcaggatgagcctgccctgttcgtggccctgaccttcgagcggcgggaggtcctggactcctccaatatcaaaccaatgaacctgatcggcgtggcaagaggcgaaaacatccccgccgtgatcgccctgaccgaccccgagggctgcccactgagccggtttaaggatagcctgggaaacccaacccacatcctgagaatcggcgagagctataaggagaagcagcggaccatccaggccaagaaggaggtggagcagcggagagccggcggctacagccggaagtacgccagcaaagccaagaatctggcagacgatatggtgagaaacaccgctagagatctgctgtactacgccgtgacccaggatgccatgctgatcttcgccaacctgagccggggcttcggccggcagggcaagcggaccttcatggccgagagacagtacacacggatggaggactggctgaccgccaagctggcctacgagggcctgagcaagacctacctgtccaagacactggcccagtacacctccaagacatgcagcaactgtgggtttaccatcaccagcgccgactacgacagggtgctggagaagctgaagaagacagcaacaggctggatgaccacaattaacggcaaggagctgaaggtggagggccagattacctactacaacagatacaagagacagaacgtagtcaaggacctgtccgtcgagctggatagactgagcgaagaatctgtgaacaacgacatctcctcctggacaaagggcagaagcggagaagctctgagcctcctgaagaaaagattctcccatagacccgtgcaggagaagttcgtgtgcctgaactgcggcttcgagacacacgcagccgagcaagccgccctgaacatcgccagatcctggctgttcctgcggagccaggagtacaagaaataccagacaaacaagacaaccggcaacaccgataagagagccttcgtcgagacctggcagtccttttaccggaagaagcttaaggaggtgtggaaacctgccgtgcggtctggcggatctggcggaggctccacaagcaccagcgcccccgtgaccttcggcgacctggccatctacttcagccaggaggagtgggagtggctgagccccgtgcagaaggccctgtacgaggacgtgatgctggagaactaccagaccctggccagcctgggcctgagcttcaggaggcccaacgtgatcaccctgctggagaagggcaaggccccctggatggtggagcccgtgaggaggaggaggggcctggacagcggcagcaagtgcaccagccccaagaaaaagagaaaagtctaagctgccttctgcggggcttgccttctggccatgcccttcttctctcccttgcacctgtacctcttggtctttgaataaagcctgagtaggaaggctagcaaaaaaaaaaaaaaaaaaaaaaaaaaaaaaaaaaaaaaaaaaaaaaaaaaaaaaaaaaaaaaaaaaaaaaaaaaaaaaaa

SEQ ID NO: 6416 - RNA, 5797 nt, synthetic construct
  source 1..5797: mol_type = other RNA
aggaaataagagagaaaagaagagtaagaagaaatataagagccaccatggcccctaagaagaagcgtaaagtgagccggatggaacgcctcgtctacgaggtgcggcagaagtgcagaaacatcgaggacatctgcatctcctgcggatctctgaacgtgaccctggagcacccactgttcatcggcggcatgtgccagaactgtaaaaactgttttctggagtgtgcctatcaatacgacgatgacggctaccagagctactgcaccatctgttgcggcggaagagaggtgctgatgtgtggaaataacaactgctgccggtgcttctgcgtggaatgcgtggacctgctggtgggccccggcgccgcccaggccgctattaaggaagatccttggaactgctacatgtgcggccacaagggcacatacggcctgctgagacggagagaggactggcctagcagactgcagatgttcttcgccaataaccacgaccaggagttcgacccccctaaggtgtaccctcccgtccccgccgagaagagaaagcccatccgggtcctgagcctgttcgatggcatcgccaccggtctgctggtgctgaaggacctgggcatccaggtggataggtacattgcctccgaggtgtgcgaggactccatcaccgtgggaatggtgcgtcatcagggcaagatcatgtacgtgggcgacgtgcggagcgtgacacagaagcatatccaggagtggggccctttcgacctggtgatcggcggcagcccttgcaatgacctgagcatcgtgaacccagcccggaagggcctgtacgagggaaccggcagactgttcttcgagttttacagactgctgcacgacgcccggcctaaggaaggcgacgaccggcccttcttttggctgttcgagaatgtggtggccatgggagtcagcgacaagcgggatattagccggttcctggagagcaaccccgtgatgatcgatgccaaggaagtgagcgccgcccaccgggccagatacttctggggcaatctgcctggcatgaacagacccctggccagcaccgtgaacgacaagctggagctgcaggagtgcctggagcacggccggatcgccaagttcagcaaggtgagaaccatcaccacccgaagcaacagcatcaaacaaggcaaggaccagcactttcctgtgttcatgaacgagaaggaggacatcctgtggtgtaccgagatggagagagtgttcgggttcccagtccactacacagatgtcagcaacatgtctagactggccagacagagactgctgggaagaagctggtccgtccctgtgatcagacacctgttcgcccctctgaaggagtacttcgcctgcgtgagcagcggcaacagcaacgccaacagccggggccccagcttctctagcggcctggtgccactgtccctgagagggagccacatgggccccatggagatctacaaaaccgtgagcgcctggaagcggcagcctgtgcgcgtgctgagcctgtttcggaatatcgataaagtcctgaaaagcctgggattcctggagagcggctctggctccggcggtggcaccctgaagtacgtggaggatgtgacaaacgtggtcagacgggatgtggagaagtggggccccttcgatctggtgtacggcagcacccaacccctgggcagctcttgtgaccggtgccctggctggtacatgtttcagttccaccggatcctgcagtacgccctgccgagacaggagtcccagcggccattcttttggattttcatggacaacttgctgctgaccgaggatgaccaggaaactaccactcggttcctgcagaccgaagccgtgaccctgcaggacgtgagaggccgggactaccagaacgccatgcgggtgtggtccaacatccctggactgaaaagcaagcacgcacctctgacccctaaagaagaggagtacctgcaggcccaggtgcggagcagaagcaagctggacgcccctaaggtggatctgctggtgaagaattgcctcctgcccctgagagagtacttcaagtatttcagccagaatagtctgcccctgggcggcccaagcagcggcgcccctcctcccagcggcggcagcccagccggctccccaacctctaccgaggagggcacctctgagtccgccacccccgagagcggccctggcacctccaccgagcccagcgagggcagcgcacccggcagccctgccggcagccccacctccacagaggagggaaccagcaccgagcccagcgaaggcagcgccccaggcaccagcaccgagcctagtgagggcggctctggcggcggcagcgcccaggagattaaacggatcaacaagatcagaagaagacttgtgaaagacagcaacaccaagaaggccggcaagacaggccccatgaaaaccctgctggttagagtgatgacacccgatctgagagagcggctggaaaacctgagaaagaagcctgaaaatatcccccagcccatcagcaatacatctagagccaacctgaataagctgctgaccgattacaccgaaatgaagaaggcgatcctgcatgtgtactgggaagagttccagaaggaccctgtgggcctgatgagccgggtggcccagcctgccagcaagaagatcgatcagaacaagctgaaacctgagatggacgagaagggcaacctgaccaccgccggctttgcctgctctcagtgtggccagcccctgttcgtgtacaagctggagcaggtgtctgagaagggcaaggcttacaccaactacttcggacggtgcaatgtggccgagcacgaaaagctgatcctgctggcccagctgaagcccgagaaggatagcgacgaagccgtgacatatagcctgggaaagtttgggcagagggccctggatttctacagcattcatgtgaccaaggagtccacccaccccgtgaagcccctggcccagatcgccggaaacagatacgcctccggacctgtgggaaaggccctgagcgacgcatgtatgggcacaatcgcctccttcctgtctaagtaccaggacatcatcatcgaacaccagaaggtggtgaagggcaaccagaagagactggagagcctgcgggagctggccggcaaggaaaacctggaataccctagcgtgaccctgccacctcagcctcacaccaaggagggcgttgatgcctacaacgaagtgatcgcccgggtgcgaatgtgggtgaacctgaacctgtggcagaagctgaagctaagcagagatgatgccaagcctctgctgagactgaagggattcccttcctttcctctggtcgagagacaggccaacgaagtggactggtgggacatggtgtgtaacgtgaagaagctgatcaacgagaaaaaggaggatggcaaggtgttttggcagaatctggctggctacaagagacaggaagccctgagaccatacctgagcagcgaggaagatcggaagaagggaaagaaattcgctcggtaccagctgggcgacctgctgctgcacctggaaaagaagcacggcgaggactggggaaaggtgtacgacgaggcctgggagcggattgacaagaaagtggaaggcctgagcaagcacatcaagctggaagaggaacggagaagcgaggacgcccagagcaaggccgccctgaccgactggctgcgggctaaggccagcttcgtgatcgagggcctgaaggaggccgacaaggacgagttctgcagatgcgagctgaagctgcagaagtggtacggggacctgcggggaaagcccttcgccatcgaagccgagaacagcatcctggacatcagcggcttcagcaagcagtacaactgtgccttcatctggcagaaggacggcgtgaagaagctgaacctgtacctgatcatcaactacttcaagggcggcaagctgcggttcaagaagatcaaacctgaagccttcgaagccaacagattctacaccgtgatcaacaaaaagagcggcgagatcgtgcccatggaggtgaacttcaacttcgacgaccccaacctgatcatcctgcctctggcctttggcaagagacagggcagagaattcatctggaacgacctgctgtccctggaaaccggcagcctgaagctggccaacggaagagtgatcgagaagacactgtacaacagaagaacccggcaggatgagcctgccctgttcgtggccctgaccttcgagcggcgggaggtcctggactcctccaatatcaaaccaatgaacctgatcggcgtggcaagaggcgaaaacatccccgccgtgatcgccctgaccgaccccgagggctgcccactgagccggtttaaggatagcctgggaaacccaacccacatcctgagaatcggcgagagctataaggagaagcagcggaccatccaggccaagaaggaggtggagcagcggagagccggcggctacagccggaagtacgccagcaaagccaagaatctggcagacgatatggtgagaaacaccgctagagatctgctgtactacgccgtgacccaggatgccatgctgatcttcgccaacctgagccggggcttcggccggcagggcaagcggaccttcatggccgagagacagtacacacggatggaggactggctgaccgccaagctggcctacgagggcctgagcaagacctacctgtccaagacactggcccagtacacctccaagacatgcagcaactgtgggtttaccatcaccagcgccgactacgacagggtgctggagaagctgaagaagacagcaacaggctggatgaccacaattaacggcaaggagctgaaggtggagggccagattacctactacaacagatacaagagacagaacgtagtcaaggacctgtccgtcgagctggatagactgagcgaagaatctgtgaacaacgacatctcctcctggacaaagggcagaagcggagaagctctgagcctcctgaagaaaagattctcccatagacccgtgcaggagaagttcgtgtgcctgaactgcggcttcgagacacacgcagccgagcaagccgccctgaacatcgccagatcctggctgttcctgcggagccaggagtacaagaaataccagacaaacaagacaaccggcaacaccgataagagagccttcgtcgagacctggcagtccttttaccggaagaagcttaaggaggtgtggaaacctgccgtgcggtctggcggatctggcggaggctccacaagcgacagcgtgaccttcgaggacgtggccatcagcttcaccgtggaggagtgggccctgctggaccccagccagaagaagctgcacagggacgtgatggaggagaccttcaggaacctggccgccatcggcaggacccaggacgaccagcacatcgacaacgaccacaggtacagcaggaggaaccagaggaacgaggtggtggagaggctgctggagaggaacaagagcagcgagtgcaaggagaccagccccaagaaaaagagaaaagtctaagctgccttctgcggggcttgccttctggccatgcccttcttctctcccttgcacctgtacctcttggtctttgaataaagcctgagtaggaaggctagcaaaaaaaaaaaaaaaaaaaaaaaaaaaaaaaaaaaaaaaaaaaaaaaaaaaaaaaaaaaaaaaaaaaaaaaaaaaaaaaa

SEQ ID NO: 6417 - RNA, 5797 nt, synthetic construct
  source 1..5797: mol_type = other RNA
aggaaataagagagaaaagaagagtaagaagaaatataagagccaccatggcccctaagaagaagcgtaaagtgagccggatggaacgcctcgtctacgaggtgcggcagaagtgcagaaacatcgaggacatctgcatctcctgcggatctctgaacgtgaccctggagcacccactgttcatcggcggcatgtgccagaactgtaaaaactgttttctggagtgtgcctatcaatacgacgatgacggctaccagagctactgcaccatctgttgcggcggaagagaggtgctgatgtgtggaaataacaactgctgccggtgcttctgcgtggaatgcgtggacctgctggtgggccccggcgccgcccaggccgctattaaggaagatccttggaactgctacatgtgcggccacaagggcacatacggcctgctgagacggagagaggactggcctagcagactgcagatgttcttcgccaataaccacgaccaggagttcgacccccctaaggtgtaccctcccgtccccgccgagaagagaaagcccatccgggtcctgagcctgttcgatggcatcgccaccggtctgctggtgctgaaggacctgggcatccaggtggataggtacattgcctccgaggtgtgcgaggactccatcaccgtgggaatggtgcgtcatcagggcaagatcatgtacgtgggcgacgtgcggagcgtgacacagaagcatatccaggagtggggccctttcgacctggtgatcggcggcagcccttgcaatgacctgagcatcgtgaacccagcccggaagggcctgtacgagggaaccggcagactgttcttcgagttttacagactgctgcacgacgcccggcctaaggaaggcgacgaccggcccttcttttggctgttcgagaatgtggtggccatgggagtcagcgacaagcgggatattagccggttcctggagagcaaccccgtgatgatcgatgccaaggaagtgagcgccgcccaccgggccagatacttctggggcaatctgcctggcatgaacagacccctggccagcaccgtgaacgacaagctggagctgcaggagtgcctggagcacggccggatcgccaagttcagcaaggtgagaaccatcaccacccgaagcaacagcatcaaacaaggcaaggaccagcactttcctgtgttcatgaacgagaaggaggacatcctgtggtgtaccgagatggagagagtgttcgggttcccagtccactacacagatgtcagcaacatgtctagactggccagacagagactgctgggaagaagctggtccgtccctgtgatcagacacctgttcgcccctctgaaggagtacttcgcctgcgtgagcagcggcaacagcaacgccaacagccggggccccagcttctctagcggcctggtgccactgtccctgagagggagccacatgggccccatggagatctacaaaaccgtgagcgcctggaagcggcagcctgtgcgcgtgctgagcctgtttcggaatatcgataaagtcctgaaaagcctgggattcctggagagcggctctggctccggcggtggcaccctgaagtacgtggaggatgtgacaaacgtggtcagacgggatgtggagaagtggggccccttcgatctggtgtacggcagcacccaacccctgggcagctcttgtgaccggtgccctggctggtacatgtttcagttccaccggatcctgcagtacgccctgccgagacaggagtcccagcggccattcttttggattttcatggacaacttgctgctgaccgaggatgaccaggaaactaccactcggttcctgcagaccgaagccgtgaccctgcaggacgtgagaggccgggactaccagaacgccatgcgggtgtggtccaacatccctggactgaaaagcaagcacgcacctctgacccctaaagaagaggagtacctgcaggcccaggtgcggagcagaagcaagctggacgcccctaaggtggatctgctggtgaagaattgcctcctgcccctgagagagtacttcaagtatttcagccagaatagtctgcccctgggcggcccaagcagcggcgcccctcctcccagcggcggcagcccagccggctccccaacctctaccgaggagggcacctctgagtccgccacccccgagagcggccctggcacctccaccgagcccagcgagggcagcgcacccggcagccctgccggcagccccacctccacagaggagggaaccagcaccgagcccagcgaaggcagcgccccaggcaccagcaccgagcctagtgagggcggctctggcggcggcagcgcccaggagattaaacggatcaacaagatcagaagaagacttgtgaaagacagcaacaccaagaaggccggcaagacaggccccatgaaaaccctgctggttagagtgatgacacccgatctgagagagcggctggaaaacctgagaaagaagcctgaaaatatcccccagcccatcagcaatacatctagagccaacctgaataagctgctgaccgattacaccgaaatgaagaaggcgatcctgcatgtgtactgggaagagttccagaaggaccctgtgggcctgatgagccgggtggcccagcctgccagcaagaagatcgatcagaacaagctgaaacctgagatggacgagaagggcaacctgaccaccgccggctttgcctgctctcagtgtggccagcccctgttcgtgtacaagctggagcaggtgtctgagaagggcaaggcttacaccaactacttcggacggtgcaatgtggccgagcacgaaaagctgatcctgctggcccagctgaagcccgagaaggatagcgacgaagccgtgacatatagcctgggaaagtttgggcagagggccctggatttctacagcattcatgtgaccaaggagtccacccaccccgtgaagcccctggcccagatcgccggaaacagatacgcctccggacctgtgggaaaggccctgagcgacgcatgtatgggcacaatcgcctccttcctgtctaagtaccaggacatcatcatcgaacaccagaaggtggtgaagggcaaccagaagagactggagagcctgcgggagctggccggcaaggaaaacctggaataccctagcgtgaccctgccacctcagcctcacaccaaggagggcgttgatgcctacaacgaagtgatcgcccgggtgcgaatgtgggtgaacctgaacctgtggcagaagctgaagctaagcagagatgatgccaagcctctgctgagactgaagggattcccttcctttcctctggtcgagagacaggccaacgaagtggactggtgggacatggtgtgtaacgtgaagaagctgatcaacgagaaaaaggaggatggcaaggtgttttggcagaatctggctggctacaagagacaggaagccctgagaccatacctgagcagcgaggaagatcggaagaagggaaagaaattcgctcggtaccagctgggcgacctgctgctgcacctggaaaagaagcacggcgaggactggggaaaggtgtacgacgaggcctgggagcggattgacaagaaagtggaaggcctgagcaagcacatcaagctggaagaggaacggagaagcgaggacgcccagagcaaggccgccctgaccgactggctgcgggctaaggccagcttcgtgatcgagggcctgaaggaggccgacaaggacgagttctgcagatgcgagctgaagctgcagaagtggtacggggacctgcggggaaagcccttcgccatcgaagccgagaacagcatcctggacatcagcggcttcagcaagcagtacaactgtgccttcatctggcagaaggacggcgtgaagaagctgaacctgtacctgatcatcaactacttcaagggcggcaagctgcggttcaagaagatcaaacctgaagccttcgaagccaacagattctacaccgtgatcaacaaaaagagcggcgagatcgtgcccatggaggtgaacttcaacttcgacgaccccaacctgatcatcctgcctctggcctttggcaagagacagggcagagaattcatctggaacgacctgctgtccctggaaaccggcagcctgaagctggccaacggaagagtgatcgagaagacactgtacaacagaagaacccggcaggatgagcctgccctgttcgtggccctgaccttcgagcggcgggaggtcctggactcctccaatatcaaaccaatgaacctgatcggcgtggcaagaggcgaaaacatccccgccgtgatcgccctgaccgaccccgagggctgcccactgagccggtttaaggatagcctgggaaacccaacccacatcctgagaatcggcgagagctataaggagaagcagcggaccatccaggccaagaaggaggtggagcagcggagagccggcggctacagccggaagtacgccagcaaagccaagaatctggcagacgatatggtgagaaacaccgctagagatctgctgtactacgccgtgacccaggatgccatgctgatcttcgccaacctgagccggggcttcggccggcagggcaagcggaccttcatggccgagagacagtacacacggatggaggactggctgaccgccaagctggcctacgagggcctgagcaagacctacctgtccaagacactggcccagtacacctccaagacatgcagcaactgtgggtttaccatcaccagcgccgactacgacagggtgctggagaagctgaagaagacagcaacaggctggatgaccacaattaacggcaaggagctgaaggtggagggccagattacctactacaacagatacaagagacagaacgtagtcaaggacctgtccgtcgagctggatagactgagcgaagaatctgtgaacaacgacatctcctcctggacaaagggcagaagcggagaagctctgagcctcctgaagaaaagattctcccatagacccgtgcaggagaagttcgtgtgcctgaactgcggcttcgagacacacgcagccgagcaagccgccctgaacatcgccagatcctggctgttcctgcggagccaggagtacaagaaataccagacaaacaagacaaccggcaacaccgataagagagccttcgtcgagacctggcagtccttttaccggaagaagcttaaggaggtgtggaaacctgccgtgcggtctggcggatctggcggaggctccacaagcggcgagaacctggagagcagggtgaccctgggcagccccgccgccgagagccaggagctgctgaccttcaaggacgtgagcgtggacttcacccaggaggagtggggccagctggcccccgcccacaggaacctgtacagggaggtgatgctggagaactacggcaacctggtgagcgtgggctaccagctgagcaagcccggcctgatcagccagctggagaagggcgaggagccctggctgaccagccccaagaaaaagagaaaagtctaagctgccttctgcggggcttgccttctggccatgcccttcttctctcccttgcacctgtacctcttggtctttgaataaagcctgagtaggaaggctagcaaaaaaaaaaaaaaaaaaaaaaaaaaaaaaaaaaaaaaaaaaaaaaaaaaaaaaaaaaaaaaaaaaaaaaaaaaaaaaaa

SEQ ID NO: 6418 - RNA, 5797 nt, synthetic construct
  source 1..5797: mol_type = other RNA
aggaaataagagagaaaagaagagtaagaagaaatataagagccaccatggcccctaagaagaagcgtaaagtgagccggatggaacgcctcgtctacgaggtgcggcagaagtgcagaaacatcgaggacatctgcatctcctgcggatctctgaacgtgaccctggagcacccactgttcatcggcggcatgtgccagaactgtaaaaactgttttctggagtgtgcctatcaatacgacgatgacggctaccagagctactgcaccatctgttgcggcggaagagaggtgctgatgtgtggaaataacaactgctgccggtgcttctgcgtggaatgcgtggacctgctggtgggccccggcgccgcccaggccgctattaaggaagatccttggaactgctacatgtgcggccacaagggcacatacggcctgctgagacggagagaggactggcctagcagactgcagatgttcttcgccaataaccacgaccaggagttcgacccccctaaggtgtaccctcccgtccccgccgagaagagaaagcccatccgggtcctgagcctgttcgatggcatcgccaccggtctgctggtgctgaaggacctgggcatccaggtggataggtacattgcctccgaggtgtgcgaggactccatcaccgtgggaatggtgcgtcatcagggcaagatcatgtacgtgggcgacgtgcggagcgtgacacagaagcatatccaggagtggggccctttcgacctggtgatcggcggcagcccttgcaatgacctgagcatcgtgaacccagcccggaagggcctgtacgagggaaccggcagactgttcttcgagttttacagactgctgcacgacgcccggcctaaggaaggcgacgaccggcccttcttttggctgttcgagaatgtggtggccatgggagtcagcgacaagcgggatattagccggttcctggagagcaaccccgtgatgatcgatgccaaggaagtgagcgccgcccaccgggccagatacttctggggcaatctgcctggcatgaacagacccctggccagcaccgtgaacgacaagctggagctgcaggagtgcctggagcacggccggatcgccaagttcagcaaggtgagaaccatcaccacccgaagcaacagcatcaaacaaggcaaggaccagcactttcctgtgttcatgaacgagaaggaggacatcctgtggtgtaccgagatggagagagtgttcgggttcccagtccactacacagatgtcagcaacatgtctagactggccagacagagactgctgggaagaagctggtccgtccctgtgatcagacacctgttcgcccctctgaaggagtacttcgcctgcgtgagcagcggcaacagcaacgccaacagccggggccccagcttctctagcggcctggtgccactgtccctgagagggagccacatgggccccatggagatctacaaaaccgtgagcgcctggaagcggcagcctgtgcgcgtgctgagcctgtttcggaatatcgataaagtcctgaaaagcctgggattcctggagagcggctctggctccggcggtggcaccctgaagtacgtggaggatgtgacaaacgtggtcagacgggatgtggagaagtggggccccttcgatctggtgtacggcagcacccaacccctgggcagctcttgtgaccggtgccctggctggtacatgtttcagttccaccggatcctgcagtacgccctgccgagacaggagtcccagcggccattcttttggattttcatggacaacttgctgctgaccgaggatgaccaggaaactaccactcggttcctgcagaccgaagccgtgaccctgcaggacgtgagaggccgggactaccagaacgccatgcgggtgtggtccaacatccctggactgaaaagcaagcacgcacctctgacccctaaagaagaggagtacctgcaggcccaggtgcggagcagaagcaagctggacgcccctaaggtggatctgctggtgaagaattgcctcctgcccctgagagagtacttcaagtatttcagccagaatagtctgcccctgggcggcccaagcagcggcgcccctcctcccagcggcggcagcccagccggctccccaacctctaccgaggagggcacctctgagtccgccacccccgagagcggccctggcacctccaccgagcccagcgagggcagcgcacccggcagccctgccggcagccccacctccacagaggagggaaccagcaccgagcccagcgaaggcagcgccccaggcaccagcaccgagcctagtgagggcggctctggcggcggcagcgcccaggagattaaacggatcaacaagatcagaagaagacttgtgaaagacagcaacaccaagaaggccggcaagacaggccccatgaaaaccctgctggttagagtgatgacacccgatctgagagagcggctggaaaacctgagaaagaagcctgaaaatatcccccagcccatcagcaatacatctagagccaacctgaataagctgctgaccgattacaccgaaatgaagaaggcgatcctgcatgtgtactgggaagagttccagaaggaccctgtgggcctgatgagccgggtggcccagcctgccagcaagaagatcgatcagaacaagctgaaacctgagatggacgagaagggcaacctgaccaccgccggctttgcctgctctcagtgtggccagcccctgttcgtgtacaagctggagcaggtgtctgagaagggcaaggcttacaccaactacttcggacggtgcaatgtggccgagcacgaaaagctgatcctgctggcccagctgaagcccgagaaggatagcgacgaagccgtgacatatagcctgggaaagtttgggcagagggccctggatttctacagcattcatgtgaccaaggagtccacccaccccgtgaagcccctggcccagatcgccggaaacagatacgcctccggacctgtgggaaaggccctgagcgacgcatgtatgggcacaatcgcctccttcctgtctaagtaccaggacatcatcatcgaacaccagaaggtggtgaagggcaaccagaagagactggagagcctgcgggagctggccggcaaggaaaacctggaataccctagcgtgaccctgccacctcagcctcacaccaaggagggcgttgatgcctacaacgaagtgatcgcccgggtgcgaatgtgggtgaacctgaacctgtggcagaagctgaagctaagcagagatgatgccaagcctctgctgagactgaagggattcccttcctttcctctggtcgagagacaggccaacgaagtggactggtgggacatggtgtgtaacgtgaagaagctgatcaacgagaaaaaggaggatggcaaggtgttttggcagaatctggctggctacaagagacaggaagccctgagaccatacctgagcagcgaggaagatcggaagaagggaaagaaattcgctcggtaccagctgggcgacctgctgctgcacctggaaaagaagcacggcgaggactggggaaaggtgtacgacgaggcctgggagcggattgacaagaaagtggaaggcctgagcaagcacatcaagctggaagaggaacggagaagcgaggacgcccagagcaaggccgccctgaccgactggctgcgggctaaggccagcttcgtgatcgagggcctgaaggaggccgacaaggacgagttctgcagatgcgagctgaagctgcagaagtggtacggggacctgcggggaaagcccttcgccatcgaagccgagaacagcatcctggacatcagcggcttcagcaagcagtacaactgtgccttcatctggcagaaggacggcgtgaagaagctgaacctgtacctgatcatcaactacttcaagggcggcaagctgcggttcaagaagatcaaacctgaagccttcgaagccaacagattctacaccgtgatcaacaaaaagagcggcgagatcgtgcccatggaggtgaacttcaacttcgacgaccccaacctgatcatcctgcctctggcctttggcaagagacagggcagagaattcatctggaacgacctgctgtccctggaaaccggcagcctgaagctggccaacggaagagtgatcgagaagacactgtacaacagaagaacccggcaggatgagcctgccctgttcgtggccctgaccttcgagcggcgggaggtcctggactcctccaatatcaaaccaatgaacctgatcggcgtggcaagaggcgaaaacatccccgccgtgatcgccctgaccgaccccgagggctgcccactgagccggtttaaggatagcctgggaaacccaacccacatcctgagaatcggcgagagctataaggagaagcagcggaccatccaggccaagaaggaggtggagcagcggagagccggcggctacagccggaagtacgccagcaaagccaagaatctggcagacgatatggtgagaaacaccgctagagatctgctgtactacgccgtgacccaggatgccatgctgatcttcgccaacctgagccggggcttcggccggcagggcaagcggaccttcatggccgagagacagtacacacggatggaggactggctgaccgccaagctggcctacgagggcctgagcaagacctacctgtccaagacactggcccagtacacctccaagacatgcagcaactgtgggtttaccatcaccagcgccgactacgacagggtgctggagaagctgaagaagacagcaacaggctggatgaccacaattaacggcaaggagctgaaggtggagggccagattacctactacaacagatacaagagacagaacgtagtcaaggacctgtccgtcgagctggatagactgagcgaagaatctgtgaacaacgacatctcctcctggacaaagggcagaagcggagaagctctgagcctcctgaagaaaagattctcccatagacccgtgcaggagaagttcgtgtgcctgaactgcggcttcgagacacacgcagccgagcaagccgccctgaacatcgccagatcctggctgttcctgcggagccaggagtacaagaaataccagacaaacaagacaaccggcaacaccgataagagagccttcgtcgagacctggcagtccttttaccggaagaagcttaaggaggtgtggaaacctgccgtgcggtctggcggatctggcggaggctccacaagcccccaggccagcgtgaccttcgaggacgtggccgtgtacctgacccaggaggagtggggccacctggagcccgcccagaggggcctgtacagggacgtgatgctggagaactacggcaacgtggtgagcctgggcttccccgtgagcaagcccgacgtgatcctgcagctggagctgaggggcgagccctggttcctggacatgcagggcaccgagggcagggagatcctgagggactgcgagaccagccccaagaaaaagagaaaagtctaagctgccttctgcggggcttgccttctggccatgcccttcttctctcccttgcacctgtacctcttggtctttgaataaagcctgagtaggaaggctagcaaaaaaaaaaaaaaaaaaaaaaaaaaaaaaaaaaaaaaaaaaaaaaaaaaaaaaaaaaaaaaaaaaaaaaaaaaaaaaaa

SEQ ID NO: 6419 - RNA, 5797 nt, synthetic construct
  source 1..5797: mol_type = other RNA
aggaaataagagagaaaagaagagtaagaagaaatataagagccaccatggcccctaagaagaagcgtaaagtgagccggatggaacgcctcgtctacgaggtgcggcagaagtgcagaaacatcgaggacatctgcatctcctgcggatctctgaacgtgaccctggagcacccactgttcatcggcggcatgtgccagaactgtaaaaactgttttctggagtgtgcctatcaatacgacgatgacggctaccagagctactgcaccatctgttgcggcggaagagaggtgctgatgtgtggaaataacaactgctgccggtgcttctgcgtggaatgcgtggacctgctggtgggccccggcgccgcccaggccgctattaaggaagatccttggaactgctacatgtgcggccacaagggcacatacggcctgctgagacggagagaggactggcctagcagactgcagatgttcttcgccaataaccacgaccaggagttcgacccccctaaggtgtaccctcccgtccccgccgagaagagaaagcccatccgggtcctgagcctgttcgatggcatcgccaccggtctgctggtgctgaaggacctgggcatccaggtggataggtacattgcctccgaggtgtgcgaggactccatcaccgtgggaatggtgcgtcatcagggcaagatcatgtacgtgggcgacgtgcggagcgtgacacagaagcatatccaggagtggggccctttcgacctggtgatcggcggcagcccttgcaatgacctgagcatcgtgaacccagcccggaagggcctgtacgagggaaccggcagactgttcttcgagttttacagactgctgcacgacgcccggcctaaggaaggcgacgaccggcccttcttttggctgttcgagaatgtggtggccatgggagtcagcgacaagcgggatattagccggttcctggagagcaaccccgtgatgatcgatgccaaggaagtgagcgccgcccaccgggccagatacttctggggcaatctgcctggcatgaacagacccctggccagcaccgtgaacgacaagctggagctgcaggagtgcctggagcacggccggatcgccaagttcagcaaggtgagaaccatcaccacccgaagcaacagcatcaaacaaggcaaggaccagcactttcctgtgttcatgaacgagaaggaggacatcctgtggtgtaccgagatggagagagtgttcgggttcccagtccactacacagatgtcagcaacatgtctagactggccagacagagactgctgggaagaagctggtccgtccctgtgatcagacacctgttcgcccctctgaaggagtacttcgcctgcgtgagcagcggcaacagcaacgccaacagccggggccccagcttctctagcggcctggtgccactgtccctgagagggagccacatgggccccatggagatctacaaaaccgtgagcgcctggaagcggcagcctgtgcgcgtgctgagcctgtttcggaatatcgataaagtcctgaaaagcctgggattcctggagagcggctctggctccggcggtggcaccctgaagtacgtggaggatgtgacaaacgtggtcagacgggatgtggagaagtggggccccttcgatctggtgtacggcagcacccaacccctgggcagctcttgtgaccggtgccctggctggtacatgtttcagttccaccggatcctgcagtacgccctgccgagacaggagtcccagcggccattcttttggattttcatggacaacttgctgctgaccgaggatgaccaggaaactaccactcggttcctgcagaccgaagccgtgaccctgcaggacgtgagaggccgggactaccagaacgccatgcgggtgtggtccaacatccctggactgaaaagcaagcacgcacctctgacccctaaagaagaggagtacctgcaggcccaggtgcggagcagaagcaagctggacgcccctaaggtggatctgctggtgaagaattgcctcctgcccctgagagagtacttcaagtatttcagccagaatagtctgcccctgggcggcccaagcagcggcgcccctcctcccagcggcggcagcccagccggctccccaacctctaccgaggagggcacctctgagtccgccacccccgagagcggccctggcacctccaccgagcccagcgagggcagcgcacccggcagccctgccggcagccccacctccacagaggagggaaccagcaccgagcccagcgaaggcagcgccccaggcaccagcaccgagcctagtgagggcggctctggcggcggcagcgcccaggagattaaacggatcaacaagatcagaagaagacttgtgaaagacagcaacaccaagaaggccggcaagacaggccccatgaaaaccctgctggttagagtgatgacacccgatctgagagagcggctggaaaacctgagaaagaagcctgaaaatatcccccagcccatcagcaatacatctagagccaacctgaataagctgctgaccgattacaccgaaatgaagaaggcgatcctgcatgtgtactgggaagagttccagaaggaccctgtgggcctgatgagccgggtggcccagcctgccagcaagaagatcgatcagaacaagctgaaacctgagatggacgagaagggcaacctgaccaccgccggctttgcctgctctcagtgtggccagcccctgttcgtgtacaagctggagcaggtgtctgagaagggcaaggcttacaccaactacttcggacggtgcaatgtggccgagcacgaaaagctgatcctgctggcccagctgaagcccgagaaggatagcgacgaagccgtgacatatagcctgggaaagtttgggcagagggccctggatttctacagcattcatgtgaccaaggagtccacccaccccgtgaagcccctggcccagatcgccggaaacagatacgcctccggacctgtgggaaaggccctgagcgacgcatgtatgggcacaatcgcctccttcctgtctaagtaccaggacatcatcatcgaacaccagaaggtggtgaagggcaaccagaagagactggagagcctgcgggagctggccggcaaggaaaacctggaataccctagcgtgaccctgccacctcagcctcacaccaaggagggcgttgatgcctacaacgaagtgatcgcccgggtgcgaatgtgggtgaacctgaacctgtggcagaagctgaagctaagcagagatgatgccaagcctctgctgagactgaagggattcccttcctttcctctggtcgagagacaggccaacgaagtggactggtgggacatggtgtgtaacgtgaagaagctgatcaacgagaaaaaggaggatggcaaggtgttttggcagaatctggctggctacaagagacaggaagccctgagaccatacctgagcagcgaggaagatcggaagaagggaaagaaattcgctcggtaccagctgggcgacctgctgctgcacctggaaaagaagcacggcgaggactggggaaaggtgtacgacgaggcctgggagcggattgacaagaaagtggaaggcctgagcaagcacatcaagctggaagaggaacggagaagcgaggacgcccagagcaaggccgccctgaccgactggctgcgggctaaggccagcttcgtgatcgagggcctgaaggaggccgacaaggacgagttctgcagatgcgagctgaagctgcagaagtggtacggggacctgcggggaaagcccttcgccatcgaagccgagaacagcatcctggacatcagcggcttcagcaagcagtacaactgtgccttcatctggcagaaggacggcgtgaagaagctgaacctgtacctgatcatcaactacttcaagggcggcaagctgcggttcaagaagatcaaacctgaagccttcgaagccaacagattctacaccgtgatcaacaaaaagagcggcgagatcgtgcccatggaggtgaacttcaacttcgacgaccccaacctgatcatcctgcctctggcctttggcaagagacagggcagagaattcatctggaacgacctgctgtccctggaaaccggcagcctgaagctggccaacggaagagtgatcgagaagacactgtacaacagaagaacccggcaggatgagcctgccctgttcgtggccctgaccttcgagcggcgggaggtcctggactcctccaatatcaaaccaatgaacctgatcggcgtggcaagaggcgaaaacatccccgccgtgatcgccctgaccgaccccgagggctgcccactgagccggtttaaggatagcctgggaaacccaacccacatcctgagaatcggcgagagctataaggagaagcagcggaccatccaggccaagaaggaggtggagcagcggagagccggcggctacagccggaagtacgccagcaaagccaagaatctggcagacgatatggtgagaaacaccgctagagatctgctgtactacgccgtgacccaggatgccatgctgatcttcgccaacctgagccggggcttcggccggcagggcaagcggaccttcatggccgagagacagtacacacggatggaggactggctgaccgccaagctggcctacgagggcctgagcaagacctacctgtccaagacactggcccagtacacctccaagacatgcagcaactgtgggtttaccatcaccagcgccgactacgacagggtgctggagaagctgaagaagacagcaacaggctggatgaccacaattaacggcaaggagctgaaggtggagggccagattacctactacaacagatacaagagacagaacgtagtcaaggacctgtccgtcgagctggatagactgagcgaagaatctgtgaacaacgacatctcctcctggacaaagggcagaagcggagaagctctgagcctcctgaagaaaagattctcccatagacccgtgcaggagaagttcgtgtgcctgaactgcggcttcgagacacacgcagccgagcaagccgccctgaacatcgccagatcctggctgttcctgcggagccaggagtacaagaaataccagacaaacaagacaaccggcaacaccgataagagagccttcgtcgagacctggcagtccttttaccggaagaagcttaaggaggtgtggaaacctgccgtgcggtctggcggatctggcggaggctccacaagcgaggccctgcccgtggtgttcgaggacgtggccgtgtacttcaccagggaggagtggggcgccctggacaagaggcagaaggagatgtacagggacgtgatgaggatgaactacgagctgctggccagcctgggccccgccgccgccaagcccgacctgatcagcaagctggagaggagggccgccccctggatcaaggacccccacggcctgaagtggggcaagggcaggccccccggcaagaccagccccaagaaaaagagaaaagtctaagctgccttctgcggggcttgccttctggccatgcccttcttctctcccttgcacctgtacctcttggtctttgaataaagcctgagtaggaaggctagcaaaaaaaaaaaaaaaaaaaaaaaaaaaaaaaaaaaaaaaaaaaaaaaaaaaaaaaaaaaaaaaaaaaaaaaaaaaaaaaa

SEQ ID NO: 6420 - RNA, 5824 nt, synthetic construct
  source 1..5824: mol_type = other RNA
aggaaataagagagaaaagaagagtaagaagaaatataagagccaccatggcccctaagaagaagcgtaaagtgagccggatggaacgcctcgtctacgaggtgcggcagaagtgcagaaacatcgaggacatctgcatctcctgcggatctctgaacgtgaccctggagcacccactgttcatcggcggcatgtgccagaactgtaaaaactgttttctggagtgtgcctatcaatacgacgatgacggctaccagagctactgcaccatctgttgcggcggaagagaggtgctgatgtgtggaaataacaactgctgccggtgcttctgcgtggaatgcgtggacctgctggtgggccccggcgccgcccaggccgctattaaggaagatccttggaactgctacatgtgcggccacaagggcacatacggcctgctgagacggagagaggactggcctagcagactgcagatgttcttcgccaataaccacgaccaggagttcgacccccctaaggtgtaccctcccgtccccgccgagaagagaaagcccatccgggtcctgagcctgttcgatggcatcgccaccggtctgctggtgctgaaggacctgggcatccaggtggataggtacattgcctccgaggtgtgcgaggactccatcaccgtgggaatggtgcgtcatcagggcaagatcatgtacgtgggcgacgtgcggagcgtgacacagaagcatatccaggagtggggccctttcgacctggtgatcggcggcagcccttgcaatgacctgagcatcgtgaacccagcccggaagggcctgtacgagggaaccggcagactgttcttcgagttttacagactgctgcacgacgcccggcctaaggaaggcgacgaccggcccttcttttggctgttcgagaatgtggtggccatgggagtcagcgacaagcgggatattagccggttcctggagagcaaccccgtgatgatcgatgccaaggaagtgagcgccgcccaccgggccagatacttctggggcaatctgcctggcatgaacagacccctggccagcaccgtgaacgacaagctggagctgcaggagtgcctggagcacggccggatcgccaagttcagcaaggtgagaaccatcaccacccgaagcaacagcatcaaacaaggcaaggaccagcactttcctgtgttcatgaacgagaaggaggacatcctgtggtgtaccgagatggagagagtgttcgggttcccagtccactacacagatgtcagcaacatgtctagactggccagacagagactgctgggaagaagctggtccgtccctgtgatcagacacctgttcgcccctctgaaggagtacttcgcctgcgtgagcagcggcaacagcaacgccaacagccggggccccagcttctctagcggcctggtgccactgtccctgagagggagccacatgggccccatggagatctacaaaaccgtgagcgcctggaagcggcagcctgtgcgcgtgctgagcctgtttcggaatatcgataaagtcctgaaaagcctgggattcctggagagcggctctggctccggcggtggcaccctgaagtacgtggaggatgtgacaaacgtggtcagacgggatgtggagaagtggggccccttcgatctggtgtacggcagcacccaacccctgggcagctcttgtgaccggtgccctggctggtacatgtttcagttccaccggatcctgcagtacgccctgccgagacaggagtcccagcggccattcttttggattttcatggacaacttgctgctgaccgaggatgaccaggaaactaccactcggttcctgcagaccgaagccgtgaccctgcaggacgtgagaggccgggactaccagaacgccatgcgggtgtggtccaacatccctggactgaaaagcaagcacgcacctctgacccctaaagaagaggagtacctgcaggcccaggtgcggagcagaagcaagctggacgcccctaaggtggatctgctggtgaagaattgcctcctgcccctgagagagtacttcaagtatttcagccagaatagtctgcccctgggcggcccaagcagcggcgcccctcctcccagcggcggcagcccagccggctccccaacctctaccgaggagggcacctctgagtccgccacccccgagagcggccctggcacctccaccgagcccagcgagggcagcgcacccggcagccctgccggcagccccacctccacagaggagggaaccagcaccgagcccagcgaaggcagcgccccaggcaccagcaccgagcctagtgagggcggctctggcggcggcagcgcccaggagattaaacggatcaacaagatcagaagaagacttgtgaaagacagcaacaccaagaaggccggcaagacaggccccatgaaaaccctgctggttagagtgatgacacccgatctgagagagcggctggaaaacctgagaaagaagcctgaaaatatcccccagcccatcagcaatacatctagagccaacctgaataagctgctgaccgattacaccgaaatgaagaaggcgatcctgcatgtgtactgggaagagttccagaaggaccctgtgggcctgatgagccgggtggcccagcctgccagcaagaagatcgatcagaacaagctgaaacctgagatggacgagaagggcaacctgaccaccgccggctttgcctgctctcagtgtggccagcccctgttcgtgtacaagctggagcaggtgtctgagaagggcaaggcttacaccaactacttcggacggtgcaatgtggccgagcacgaaaagctgatcctgctggcccagctgaagcccgagaaggatagcgacgaagccgtgacatatagcctgggaaagtttgggcagagggccctggatttctacagcattcatgtgaccaaggagtccacccaccccgtgaagcccctggcccagatcgccggaaacagatacgcctccggacctgtgggaaaggccctgagcgacgcatgtatgggcacaatcgcctccttcctgtctaagtaccaggacatcatcatcgaacaccagaaggtggtgaagggcaaccagaagagactggagagcctgcgggagctggccggcaaggaaaacctggaataccctagcgtgaccctgccacctcagcctcacaccaaggagggcgttgatgcctacaacgaagtgatcgcccgggtgcgaatgtgggtgaacctgaacctgtggcagaagctgaagctaagcagagatgatgccaagcctctgctgagactgaagggattcccttcctttcctctggtcgagagacaggccaacgaagtggactggtgggacatggtgtgtaacgtgaagaagctgatcaacgagaaaaaggaggatggcaaggtgttttggcagaatctggctggctacaagagacaggaagccctgagaccatacctgagcagcgaggaagatcggaagaagggaaagaaattcgctcggtaccagctgggcgacctgctgctgcacctggaaaagaagcacggcgaggactggggaaaggtgtacgacgaggcctgggagcggattgacaagaaagtggaaggcctgagcaagcacatcaagctggaagaggaacggagaagcgaggacgcccagagcaaggccgccctgaccgactggctgcgggctaaggccagcttcgtgatcgagggcctgaaggaggccgacaaggacgagttctgcagatgcgagctgaagctgcagaagtggtacggggacctgcggggaaagcccttcgccatcgaagccgagaacagcatcctggacatcagcggcttcagcaagcagtacaactgtgccttcatctggcagaaggacggcgtgaagaagctgaacctgtacctgatcatcaactacttcaagggcggcaagctgcggttcaagaagatcaaacctgaagccttcgaagccaacagattctacaccgtgatcaacaaaaagagcggcgagatcgtgcccatggaggtgaacttcaacttcgacgaccccaacctgatcatcctgcctctggcctttggcaagagacagggcagagaattcatctggaacgacctgctgtccctggaaaccggcagcctgaagctggccaacggaagagtgatcgagaagacactgtacaacagaagaacccggcaggatgagcctgccctgttcgtggccctgaccttcgagcggcgggaggtcctggactcctccaatatcaaaccaatgaacctgatcggcgtggcaagaggcgaaaacatccccgccgtgatcgccctgaccgaccccgagggctgcccactgagccggtttaaggatagcctgggaaacccaacccacatcctgagaatcggcgagagctataaggagaagcagcggaccatccaggccaagaaggaggtggagcagcggagagccggcggctacagccggaagtacgccagcaaagccaagaatctggcagacgatatggtgagaaacaccgctagagatctgctgtactacgccgtgacccaggatgccatgctgatcttcgccaacctgagccggggcttcggccggcagggcaagcggaccttcatggccgagagacagtacacacggatggaggactggctgaccgccaagctggcctacgagggcctgagcaagacctacctgtccaagacactggcccagtacacctccaagacatgcagcaactgtgggtttaccatcaccagcgccgactacgacagggtgctggagaagctgaagaagacagcaacaggctggatgaccacaattaacggcaaggagctgaaggtggagggccagattacctactacaacagatacaagagacagaacgtagtcaaggacctgtccgtcgagctggatagactgagcgaagaatctgtgaacaacgacatctcctcctggacaaagggcagaagcggagaagctctgagcctcctgaagaaaagattctcccatagacccgtgcaggagaagttcgtgtgcctgaactgcggcttcgagacacacgcagccgagcaagccgccctgaacatcgccagatcctggctgttcctgcggagccaggagtacaagaaataccagacaaacaagacaaccggcaacaccgataagagagccttcgtcgagacctggcagtccttttaccggaagaagcttaaggaggtgtggaaacctgccgtgcggtctggcggatctggcggaggctccacaagcgtggccttcagggacgtgatcgtggacttcacccaggaggagtggcagcagctgaagcccgcccagaaggacctgtacagggacgtgatgatggagatctactggaacctggtgagcctggacctggagaccgagggcgacatgaacgagcccgaccccgagaaggacagctgggaggacaggaccagcatcgtggtggtggagggcctgatgaggaacggcgcccagggctacgcctgcgagaaggccggcatccagggctgcagggtgaccagccccaagaaaaagagaaaagtctaagctgccttctgcggggcttgccttctggccatgcccttcttctctcccttgcacctgtacctcttggtctttgaataaagcctgagtaggaaggctagcaaaaaaaaaaaaaaaaaaaaaaaaaaaaaaaaaaaaaaaaaaaaaaaaaaaaaaaaaaaaaaaaaaaaaaaaaaaaaaaa

SEQ ID NO: 6421 - RNA, 5797 nt, synthetic construct
  source 1..5797: mol_type = other RNA
aggaaataagagagaaaagaagagtaagaagaaatataagagccaccatggcccctaagaagaagcgtaaagtgagccggatggaacgcctcgtctacgaggtgcggcagaagtgcagaaacatcgaggacatctgcatctcctgcggatctctgaacgtgaccctggagcacccactgttcatcggcggcatgtgccagaactgtaaaaactgttttctggagtgtgcctatcaatacgacgatgacggctaccagagctactgcaccatctgttgcggcggaagagaggtgctgatgtgtggaaataacaactgctgccggtgcttctgcgtggaatgcgtggacctgctggtgggccccggcgccgcccaggccgctattaaggaagatccttggaactgctacatgtgcggccacaagggcacatacggcctgctgagacggagagaggactggcctagcagactgcagatgttcttcgccaataaccacgaccaggagttcgacccccctaaggtgtaccctcccgtccccgccgagaagagaaagcccatccgggtcctgagcctgttcgatggcatcgccaccggtctgctggtgctgaaggacctgggcatccaggtggataggtacattgcctccgaggtgtgcgaggactccatcaccgtgggaatggtgcgtcatcagggcaagatcatgtacgtgggcgacgtgcggagcgtgacacagaagcatatccaggagtggggccctttcgacctggtgatcggcggcagcccttgcaatgacctgagcatcgtgaacccagcccggaagggcctgtacgagggaaccggcagactgttcttcgagttttacagactgctgcacgacgcccggcctaaggaaggcgacgaccggcccttcttttggctgttcgagaatgtggtggccatgggagtcagcgacaagcgggatattagccggttcctggagagcaaccccgtgatgatcgatgccaaggaagtgagcgccgcccaccgggccagatacttctggggcaatctgcctggcatgaacagacccctggccagcaccgtgaacgacaagctggagctgcaggagtgcctggagcacggccggatcgccaagttcagcaaggtgagaaccatcaccacccgaagcaacagcatcaaacaaggcaaggaccagcactttcctgtgttcatgaacgagaaggaggacatcctgtggtgtaccgagatggagagagtgttcgggttcccagtccactacacagatgtcagcaacatgtctagactggccagacagagactgctgggaagaagctggtccgtccctgtgatcagacacctgttcgcccctctgaaggagtacttcgcctgcgtgagcagcggcaacagcaacgccaacagccggggccccagcttctctagcggcctggtgccactgtccctgagagggagccacatgggccccatggagatctacaaaaccgtgagcgcctggaagcggcagcctgtgcgcgtgctgagcctgtttcggaatatcgataaagtcctgaaaagcctgggattcctggagagcggctctggctccggcggtggcaccctgaagtacgtggaggatgtgacaaacgtggtcagacgggatgtggagaagtggggccccttcgatctggtgtacggcagcacccaacccctgggcagctcttgtgaccggtgccctggctggtacatgtttcagttccaccggatcctgcagtacgccctgccgagacaggagtcccagcggccattcttttggattttcatggacaacttgctgctgaccgaggatgaccaggaaactaccactcggttcctgcagaccgaagccgtgaccctgcaggacgtgagaggccgggactaccagaacgccatgcgggtgtggtccaacatccctggactgaaaagcaagcacgcacctctgacccctaaagaagaggagtacctgcaggcccaggtgcggagcagaagcaagctggacgcccctaaggtggatctgctggtgaagaattgcctcctgcccctgagagagtacttcaagtatttcagccagaatagtctgcccctgggcggcccaagcagcggcgcccctcctcccagcggcggcagcccagccggctccccaacctctaccgaggagggcacctctgagtccgccacccccgagagcggccctggcacctccaccgagcccagcgagggcagcgcacccggcagccctgccggcagccccacctccacagaggagggaaccagcaccgagcccagcgaaggcagcgccccaggcaccagcaccgagcctagtgagggcggctctggcggcggcagcgcccaggagattaaacggatcaacaagatcagaagaagacttgtgaaagacagcaacaccaagaaggccggcaagacaggccccatgaaaaccctgctggttagagtgatgacacccgatctgagagagcggctggaaaacctgagaaagaagcctgaaaatatcccccagcccatcagcaatacatctagagccaacctgaataagctgctgaccgattacaccgaaatgaagaaggcgatcctgcatgtgtactgggaagagttccagaaggaccctgtgggcctgatgagccgggtggcccagcctgccagcaagaagatcgatcagaacaagctgaaacctgagatggacgagaagggcaacctgaccaccgccggctttgcctgctctcagtgtggccagcccctgttcgtgtacaagctggagcaggtgtctgagaagggcaaggcttacaccaactacttcggacggtgcaatgtggccgagcacgaaaagctgatcctgctggcccagctgaagcccgagaaggatagcgacgaagccgtgacatatagcctgggaaagtttgggcagagggccctggatttctacagcattcatgtgaccaaggagtccacccaccccgtgaagcccctggcccagatcgccggaaacagatacgcctccggacctgtgggaaaggccctgagcgacgcatgtatgggcacaatcgcctccttcctgtctaagtaccaggacatcatcatcgaacaccagaaggtggtgaagggcaaccagaagagactggagagcctgcgggagctggccggcaaggaaaacctggaataccctagcgtgaccctgccacctcagcctcacaccaaggagggcgttgatgcctacaacgaagtgatcgcccgggtgcgaatgtgggtgaacctgaacctgtggcagaagctgaagctaagcagagatgatgccaagcctctgctgagactgaagggattcccttcctttcctctggtcgagagacaggccaacgaagtggactggtgggacatggtgtgtaacgtgaagaagctgatcaacgagaaaaaggaggatggcaaggtgttttggcagaatctggctggctacaagagacaggaagccctgagaccatacctgagcagcgaggaagatcggaagaagggaaagaaattcgctcggtaccagctgggcgacctgctgctgcacctggaaaagaagcacggcgaggactggggaaaggtgtacgacgaggcctgggagcggattgacaagaaagtggaaggcctgagcaagcacatcaagctggaagaggaacggagaagcgaggacgcccagagcaaggccgccctgaccgactggctgcgggctaaggccagcttcgtgatcgagggcctgaaggaggccgacaaggacgagttctgcagatgcgagctgaagctgcagaagtggtacggggacctgcggggaaagcccttcgccatcgaagccgagaacagcatcctggacatcagcggcttcagcaagcagtacaactgtgccttcatctggcagaaggacggcgtgaagaagctgaacctgtacctgatcatcaactacttcaagggcggcaagctgcggttcaagaagatcaaacctgaagccttcgaagccaacagattctacaccgtgatcaacaaaaagagcggcgagatcgtgcccatggaggtgaacttcaacttcgacgaccccaacctgatcatcctgcctctggcctttggcaagagacagggcagagaattcatctggaacgacctgctgtccctggaaaccggcagcctgaagctggccaacggaagagtgatcgagaagacactgtacaacagaagaacccggcaggatgagcctgccctgttcgtggccctgaccttcgagcggcgggaggtcctggactcctccaatatcaaaccaatgaacctgatcggcgtggcaagaggcgaaaacatccccgccgtgatcgccctgaccgaccccgagggctgcccactgagccggtttaaggatagcctgggaaacccaacccacatcctgagaatcggcgagagctataaggagaagcagcggaccatccaggccaagaaggaggtggagcagcggagagccggcggctacagccggaagtacgccagcaaagccaagaatctggcagacgatatggtgagaaacaccgctagagatctgctgtactacgccgtgacccaggatgccatgctgatcttcgccaacctgagccggggcttcggccggcagggcaagcggaccttcatggccgagagacagtacacacggatggaggactggctgaccgccaagctggcctacgagggcctgagcaagacctacctgtccaagacactggcccagtacacctccaagacatgcagcaactgtgggtttaccatcaccagcgccgactacgacagggtgctggagaagctgaagaagacagcaacaggctggatgaccacaattaacggcaaggagctgaaggtggagggccagattacctactacaacagatacaagagacagaacgtagtcaaggacctgtccgtcgagctggatagactgagcgaagaatctgtgaacaacgacatctcctcctggacaaagggcagaagcggagaagctctgagcctcctgaagaaaagattctcccatagacccgtgcaggagaagttcgtgtgcctgaactgcggcttcgagacacacgcagccgagcaagccgccctgaacatcgccagatcctggctgttcctgcggagccaggagtacaagaaataccagacaaacaagacaaccggcaacaccgataagagagccttcgtcgagacctggcagtccttttaccggaagaagcttaaggaggtgtggaaacctgccgtgcggtctggcggatctggcggaggctccacaagcggcccctggaccctgctgaccttcagggacgtggccatcgagttcagccaggaggagtggggctgcctgaaccacagccagagggagctgtacagggacgtgatgctggagacctacggccacctgctgttcctgggcctggtgagcaagcccgacctggtgatcctgctggagcagaagaaggagctgtggggcgtgaagaggaaggagaccgtgggctgccagttcgagggccacgtgaccaccagccccaagaaaaagagaaaagtctaagctgccttctgcggggcttgccttctggccatgcccttcttctctcccttgcacctgtacctcttggtctttgaataaagcctgagtaggaaggctagcaaaaaaaaaaaaaaaaaaaaaaaaaaaaaaaaaaaaaaaaaaaaaaaaaaaaaaaaaaaaaaaaaaaaaaaaaaaaaaaa

SEQ ID NO: 6422 - RNA, 5797 nt, synthetic construct
  source 1..5797: mol_type = other RNA
aggaaataagagagaaaagaagagtaagaagaaatataagagccaccatggcccctaagaagaagcgtaaagtgagccggatggaacgcctcgtctacgaggtgcggcagaagtgcagaaacatcgaggacatctgcatctcctgcggatctctgaacgtgaccctggagcacccactgttcatcggcggcatgtgccagaactgtaaaaactgttttctggagtgtgcctatcaatacgacgatgacggctaccagagctactgcaccatctgttgcggcggaagagaggtgctgatgtgtggaaataacaactgctgccggtgcttctgcgtggaatgcgtggacctgctggtgggccccggcgccgcccaggccgctattaaggaagatccttggaactgctacatgtgcggccacaagggcacatacggcctgctgagacggagagaggactggcctagcagactgcagatgttcttcgccaataaccacgaccaggagttcgacccccctaaggtgtaccctcccgtccccgccgagaagagaaagcccatccgggtcctgagcctgttcgatggcatcgccaccggtctgctggtgctgaaggacctgggcatccaggtggataggtacattgcctccgaggtgtgcgaggactccatcaccgtgggaatggtgcgtcatcagggcaagatcatgtacgtgggcgacgtgcggagcgtgacacagaagcatatccaggagtggggccctttcgacctggtgatcggcggcagcccttgcaatgacctgagcatcgtgaacccagcccggaagggcctgtacgagggaaccggcagactgttcttcgagttttacagactgctgcacgacgcccggcctaaggaaggcgacgaccggcccttcttttggctgttcgagaatgtggtggccatgggagtcagcgacaagcgggatattagccggttcctggagagcaaccccgtgatgatcgatgccaaggaagtgagcgccgcccaccgggccagatacttctggggcaatctgcctggcatgaacagacccctggccagcaccgtgaacgacaagctggagctgcaggagtgcctggagcacggccggatcgccaagttcagcaaggtgagaaccatcaccacccgaagcaacagcatcaaacaaggcaaggaccagcactttcctgtgttcatgaacgagaaggaggacatcctgtggtgtaccgagatggagagagtgttcgggttcccagtccactacacagatgtcagcaacatgtctagactggccagacagagactgctgggaagaagctggtccgtccctgtgatcagacacctgttcgcccctctgaaggagtacttcgcctgcgtgagcagcggcaacagcaacgccaacagccggggccccagcttctctagcggcctggtgccactgtccctgagagggagccacatgggccccatggagatctacaaaaccgtgagcgcctggaagcggcagcctgtgcgcgtgctgagcctgtttcggaatatcgataaagtcctgaaaagcctgggattcctggagagcggctctggctccggcggtggcaccctgaagtacgtggaggatgtgacaaacgtggtcagacgggatgtggagaagtggggccccttcgatctggtgtacggcagcacccaacccctgggcagctcttgtgaccggtgccctggctggtacatgtttcagttccaccggatcctgcagtacgccctgccgagacaggagtcccagcggccattcttttggattttcatggacaacttgctgctgaccgaggatgaccaggaaactaccactcggttcctgcagaccgaagccgtgaccctgcaggacgtgagaggccgggactaccagaacgccatgcgggtgtggtccaacatccctggactgaaaagcaagcacgcacctctgacccctaaagaagaggagtacctgcaggcccaggtgcggagcagaagcaagctggacgcccctaaggtggatctgctggtgaagaattgcctcctgcccctgagagagtacttcaagtatttcagccagaatagtctgcccctgggcggcccaagcagcggcgcccctcctcccagcggcggcagcccagccggctccccaacctctaccgaggagggcacctctgagtccgccacccccgagagcggccctggcacctccaccgagcccagcgagggcagcgcacccggcagccctgccggcagccccacctccacagaggagggaaccagcaccgagcccagcgaaggcagcgccccaggcaccagcaccgagcctagtgagggcggctctggcggcggcagcgcccaggagattaaacggatcaacaagatcagaagaagacttgtgaaagacagcaacaccaagaaggccggcaagacaggccccatgaaaaccctgctggttagagtgatgacacccgatctgagagagcggctggaaaacctgagaaagaagcctgaaaatatcccccagcccatcagcaatacatctagagccaacctgaataagctgctgaccgattacaccgaaatgaagaaggcgatcctgcatgtgtactgggaagagttccagaaggaccctgtgggcctgatgagccgggtggcccagcctgccagcaagaagatcgatcagaacaagctgaaacctgagatggacgagaagggcaacctgaccaccgccggctttgcctgctctcagtgtggccagcccctgttcgtgtacaagctggagcaggtgtctgagaagggcaaggcttacaccaactacttcggacggtgcaatgtggccgagcacgaaaagctgatcctgctggcccagctgaagcccgagaaggatagcgacgaagccgtgacatatagcctgggaaagtttgggcagagggccctggatttctacagcattcatgtgaccaaggagtccacccaccccgtgaagcccctggcccagatcgccggaaacagatacgcctccggacctgtgggaaaggccctgagcgacgcatgtatgggcacaatcgcctccttcctgtctaagtaccaggacatcatcatcgaacaccagaaggtggtgaagggcaaccagaagagactggagagcctgcgggagctggccggcaaggaaaacctggaataccctagcgtgaccctgccacctcagcctcacaccaaggagggcgttgatgcctacaacgaagtgatcgcccgggtgcgaatgtgggtgaacctgaacctgtggcagaagctgaagctaagcagagatgatgccaagcctctgctgagactgaagggattcccttcctttcctctggtcgagagacaggccaacgaagtggactggtgggacatggtgtgtaacgtgaagaagctgatcaacgagaaaaaggaggatggcaaggtgttttggcagaatctggctggctacaagagacaggaagccctgagaccatacctgagcagcgaggaagatcggaagaagggaaagaaattcgctcggtaccagctgggcgacctgctgctgcacctggaaaagaagcacggcgaggactggggaaaggtgtacgacgaggcctgggagcggattgacaagaaagtggaaggcctgagcaagcacatcaagctggaagaggaacggagaagcgaggacgcccagagcaaggccgccctgaccgactggctgcgggctaaggccagcttcgtgatcgagggcctgaaggaggccgacaaggacgagttctgcagatgcgagctgaagctgcagaagtggtacggggacctgcggggaaagcccttcgccatcgaagccgagaacagcatcctggacatcagcggcttcagcaagcagtacaactgtgccttcatctggcagaaggacggcgtgaagaagctgaacctgtacctgatcatcaactacttcaagggcggcaagctgcggttcaagaagatcaaacctgaagccttcgaagccaacagattctacaccgtgatcaacaaaaagagcggcgagatcgtgcccatggaggtgaacttcaacttcgacgaccccaacctgatcatcctgcctctggcctttggcaagagacagggcagagaattcatctggaacgacctgctgtccctggaaaccggcagcctgaagctggccaacggaagagtgatcgagaagacactgtacaacagaagaacccggcaggatgagcctgccctgttcgtggccctgaccttcgagcggcgggaggtcctggactcctccaatatcaaaccaatgaacctgatcggcgtggcaagaggcgaaaacatccccgccgtgatcgccctgaccgaccccgagggctgcccactgagccggtttaaggatagcctgggaaacccaacccacatcctgagaatcggcgagagctataaggagaagcagcggaccatccaggccaagaaggaggtggagcagcggagagccggcggctacagccggaagtacgccagcaaagccaagaatctggcagacgatatggtgagaaacaccgctagagatctgctgtactacgccgtgacccaggatgccatgctgatcttcgccaacctgagccggggcttcggccggcagggcaagcggaccttcatggccgagagacagtacacacggatggaggactggctgaccgccaagctggcctacgagggcctgagcaagacctacctgtccaagacactggcccagtacacctccaagacatgcagcaactgtgggtttaccatcaccagcgccgactacgacagggtgctggagaagctgaagaagacagcaacaggctggatgaccacaattaacggcaaggagctgaaggtggagggccagattacctactacaacagatacaagagacagaacgtagtcaaggacctgtccgtcgagctggatagactgagcgaagaatctgtgaacaacgacatctcctcctggacaaagggcagaagcggagaagctctgagcctcctgaagaaaagattctcccatagacccgtgcaggagaagttcgtgtgcctgaactgcggcttcgagacacacgcagccgagcaagccgccctgaacatcgccagatcctggctgttcctgcggagccaggagtacaagaaataccagacaaacaagacaaccggcaacaccgataagagagccttcgtcgagacctggcagtccttttaccggaagaagcttaaggaggtgtggaaacctgccgtgcggtctggcggatctggcggaggctccacaagcagcaaggcccccgtgaccttcggcgacctggtgatctacttcagccaggaggagtgggagtggctgagccccatccagaaggacctgtacgaggaggtgatgctggagaactaccacaccctggtgagcctgggcctggtgagcaggaggcccaacatcatcaccctgctggagaagggcaaggccccctggatggtggagcccagcaggaggaggaggggccccgagagcggcagcaagaggaccagccccaagaaaaagagaaaagtctaagctgccttctgcggggcttgccttctggccatgcccttcttctctcccttgcacctgtacctcttggtctttgaataaagcctgagtaggaaggctagcaaaaaaaaaaaaaaaaaaaaaaaaaaaaaaaaaaaaaaaaaaaaaaaaaaaaaaaaaaaaaaaaaaaaaaaaaaaaaaaa

SEQ ID NO: 6423 - RNA, 5797 nt, synthetic construct
  source 1..5797: mol_type = other RNA
aggaaataagagagaaaagaagagtaagaagaaatataagagccaccatggcccctaagaagaagcgtaaagtgagccggatggaacgcctcgtctacgaggtgcggcagaagtgcagaaacatcgaggacatctgcatctcctgcggatctctgaacgtgaccctggagcacccactgttcatcggcggcatgtgccagaactgtaaaaactgttttctggagtgtgcctatcaatacgacgatgacggctaccagagctactgcaccatctgttgcggcggaagagaggtgctgatgtgtggaaataacaactgctgccggtgcttctgcgtggaatgcgtggacctgctggtgggccccggcgccgcccaggccgctattaaggaagatccttggaactgctacatgtgcggccacaagggcacatacggcctgctgagacggagagaggactggcctagcagactgcagatgttcttcgccaataaccacgaccaggagttcgacccccctaaggtgtaccctcccgtccccgccgagaagagaaagcccatccgggtcctgagcctgttcgatggcatcgccaccggtctgctggtgctgaaggacctgggcatccaggtggataggtacattgcctccgaggtgtgcgaggactccatcaccgtgggaatggtgcgtcatcagggcaagatcatgtacgtgggcgacgtgcggagcgtgacacagaagcatatccaggagtggggccctttcgacctggtgatcggcggcagcccttgcaatgacctgagcatcgtgaacccagcccggaagggcctgtacgagggaaccggcagactgttcttcgagttttacagactgctgcacgacgcccggcctaaggaaggcgacgaccggcccttcttttggctgttcgagaatgtggtggccatgggagtcagcgacaagcgggatattagccggttcctggagagcaaccccgtgatgatcgatgccaaggaagtgagcgccgcccaccgggccagatacttctggggcaatctgcctggcatgaacagacccctggccagcaccgtgaacgacaagctggagctgcaggagtgcctggagcacggccggatcgccaagttcagcaaggtgagaaccatcaccacccgaagcaacagcatcaaacaaggcaaggaccagcactttcctgtgttcatgaacgagaaggaggacatcctgtggtgtaccgagatggagagagtgttcgggttcccagtccactacacagatgtcagcaacatgtctagactggccagacagagactgctgggaagaagctggtccgtccctgtgatcagacacctgttcgcccctctgaaggagtacttcgcctgcgtgagcagcggcaacagcaacgccaacagccggggccccagcttctctagcggcctggtgccactgtccctgagagggagccacatgggccccatggagatctacaaaaccgtgagcgcctggaagcggcagcctgtgcgcgtgctgagcctgtttcggaatatcgataaagtcctgaaaagcctgggattcctggagagcggctctggctccggcggtggcaccctgaagtacgtggaggatgtgacaaacgtggtcagacgggatgtggagaagtggggccccttcgatctggtgtacggcagcacccaacccctgggcagctcttgtgaccggtgccctggctggtacatgtttcagttccaccggatcctgcagtacgccctgccgagacaggagtcccagcggccattcttttggattttcatggacaacttgctgctgaccgaggatgaccaggaaactaccactcggttcctgcagaccgaagccgtgaccctgcaggacgtgagaggccgggactaccagaacgccatgcgggtgtggtccaacatccctggactgaaaagcaagcacgcacctctgacccctaaagaagaggagtacctgcaggcccaggtgcggagcagaagcaagctggacgcccctaaggtggatctgctggtgaagaattgcctcctgcccctgagagagtacttcaagtatttcagccagaatagtctgcccctgggcggcccaagcagcggcgcccctcctcccagcggcggcagcccagccggctccccaacctctaccgaggagggcacctctgagtccgccacccccgagagcggccctggcacctccaccgagcccagcgagggcagcgcacccggcagccctgccggcagccccacctccacagaggagggaaccagcaccgagcccagcgaaggcagcgccccaggcaccagcaccgagcctagtgagggcggctctggcggcggcagcgcccaggagattaaacggatcaacaagatcagaagaagacttgtgaaagacagcaacaccaagaaggccggcaagacaggccccatgaaaaccctgctggttagagtgatgacacccgatctgagagagcggctggaaaacctgagaaagaagcctgaaaatatcccccagcccatcagcaatacatctagagccaacctgaataagctgctgaccgattacaccgaaatgaagaaggcgatcctgcatgtgtactgggaagagttccagaaggaccctgtgggcctgatgagccgggtggcccagcctgccagcaagaagatcgatcagaacaagctgaaacctgagatggacgagaagggcaacctgaccaccgccggctttgcctgctctcagtgtggccagcccctgttcgtgtacaagctggagcaggtgtctgagaagggcaaggcttacaccaactacttcggacggtgcaatgtggccgagcacgaaaagctgatcctgctggcccagctgaagcccgagaaggatagcgacgaagccgtgacatatagcctgggaaagtttgggcagagggccctggatttctacagcattcatgtgaccaaggagtccacccaccccgtgaagcccctggcccagatcgccggaaacagatacgcctccggacctgtgggaaaggccctgagcgacgcatgtatgggcacaatcgcctccttcctgtctaagtaccaggacatcatcatcgaacaccagaaggtggtgaagggcaaccagaagagactggagagcctgcgggagctggccggcaaggaaaacctggaataccctagcgtgaccctgccacctcagcctcacaccaaggagggcgttgatgcctacaacgaagtgatcgcccgggtgcgaatgtgggtgaacctgaacctgtggcagaagctgaagctaagcagagatgatgccaagcctctgctgagactgaagggattcccttcctttcctctggtcgagagacaggccaacgaagtggactggtgggacatggtgtgtaacgtgaagaagctgatcaacgagaaaaaggaggatggcaaggtgttttggcagaatctggctggctacaagagacaggaagccctgagaccatacctgagcagcgaggaagatcggaagaagggaaagaaattcgctcggtaccagctgggcgacctgctgctgcacctggaaaagaagcacggcgaggactggggaaaggtgtacgacgaggcctgggagcggattgacaagaaagtggaaggcctgagcaagcacatcaagctggaagaggaacggagaagcgaggacgcccagagcaaggccgccctgaccgactggctgcgggctaaggccagcttcgtgatcgagggcctgaaggaggccgacaaggacgagttctgcagatgcgagctgaagctgcagaagtggtacggggacctgcggggaaagcccttcgccatcgaagccgagaacagcatcctggacatcagcggcttcagcaagcagtacaactgtgccttcatctggcagaaggacggcgtgaagaagctgaacctgtacctgatcatcaactacttcaagggcggcaagctgcggttcaagaagatcaaacctgaagccttcgaagccaacagattctacaccgtgatcaacaaaaagagcggcgagatcgtgcccatggaggtgaacttcaacttcgacgaccccaacctgatcatcctgcctctggcctttggcaagagacagggcagagaattcatctggaacgacctgctgtccctggaaaccggcagcctgaagctggccaacggaagagtgatcgagaagacactgtacaacagaagaacccggcaggatgagcctgccctgttcgtggccctgaccttcgagcggcgggaggtcctggactcctccaatatcaaaccaatgaacctgatcggcgtggcaagaggcgaaaacatccccgccgtgatcgccctgaccgaccccgagggctgcccactgagccggtttaaggatagcctgggaaacccaacccacatcctgagaatcggcgagagctataaggagaagcagcggaccatccaggccaagaaggaggtggagcagcggagagccggcggctacagccggaagtacgccagcaaagccaagaatctggcagacgatatggtgagaaacaccgctagagatctgctgtactacgccgtgacccaggatgccatgctgatcttcgccaacctgagccggggcttcggccggcagggcaagcggaccttcatggccgagagacagtacacacggatggaggactggctgaccgccaagctggcctacgagggcctgagcaagacctacctgtccaagacactggcccagtacacctccaagacatgcagcaactgtgggtttaccatcaccagcgccgactacgacagggtgctggagaagctgaagaagacagcaacaggctggatgaccacaattaacggcaaggagctgaaggtggagggccagattacctactacaacagatacaagagacagaacgtagtcaaggacctgtccgtcgagctggatagactgagcgaagaatctgtgaacaacgacatctcctcctggacaaagggcagaagcggagaagctctgagcctcctgaagaaaagattctcccatagacccgtgcaggagaagttcgtgtgcctgaactgcggcttcgagacacacgcagccgagcaagccgccctgaacatcgccagatcctggctgttcctgcggagccaggagtacaagaaataccagacaaacaagacaaccggcaacaccgataagagagccttcgtcgagacctggcagtccttttaccggaagaagcttaaggaggtgtggaaacctgccgtgcggtctggcggatctggcggaggctccacaagcgagcccgtgagcttcgaggaggtggccgtgtacttcagcagggaggagtgggccctgctggaccccgcccagagggccctgtactgggacgtgatgctggagacctacgagtgcgtggccagcctggcccccctgcccggccccaagcccatggtgatcagcctgctggaggagggcgaggagccctggatccccgacgtgggcagccccgaggccgtggccggcgacgtgagccccggcgagaccagccccaagaaaaagagaaaagtctaagctgccttctgcggggcttgccttctggccatgcccttcttctctcccttgcacctgtacctcttggtctttgaataaagcctgagtaggaaggctagcaaaaaaaaaaaaaaaaaaaaaaaaaaaaaaaaaaaaaaaaaaaaaaaaaaaaaaaaaaaaaaaaaaaaaaaaaaaaaaaa

SEQ ID NO: 6424 - RNA, 5797 nt, synthetic construct
  source 1..5797: mol_type = other RNA
aggaaataagagagaaaagaagagtaagaagaaatataagagccaccatggcccctaagaagaagcgtaaagtgagccggatggaacgcctcgtctacgaggtgcggcagaagtgcagaaacatcgaggacatctgcatctcctgcggatctctgaacgtgaccctggagcacccactgttcatcggcggcatgtgccagaactgtaaaaactgttttctggagtgtgcctatcaatacgacgatgacggctaccagagctactgcaccatctgttgcggcggaagagaggtgctgatgtgtggaaataacaactgctgccggtgcttctgcgtggaatgcgtggacctgctggtgggccccggcgccgcccaggccgctattaaggaagatccttggaactgctacatgtgcggccacaagggcacatacggcctgctgagacggagagaggactggcctagcagactgcagatgttcttcgccaataaccacgaccaggagttcgacccccctaaggtgtaccctcccgtccccgccgagaagagaaagcccatccgggtcctgagcctgttcgatggcatcgccaccggtctgctggtgctgaaggacctgggcatccaggtggataggtacattgcctccgaggtgtgcgaggactccatcaccgtgggaatggtgcgtcatcagggcaagatcatgtacgtgggcgacgtgcggagcgtgacacagaagcatatccaggagtggggccctttcgacctggtgatcggcggcagcccttgcaatgacctgagcatcgtgaacccagcccggaagggcctgtacgagggaaccggcagactgttcttcgagttttacagactgctgcacgacgcccggcctaaggaaggcgacgaccggcccttcttttggctgttcgagaatgtggtggccatgggagtcagcgacaagcgggatattagccggttcctggagagcaaccccgtgatgatcgatgccaaggaagtgagcgccgcccaccgggccagatacttctggggcaatctgcctggcatgaacagacccctggccagcaccgtgaacgacaagctggagctgcaggagtgcctggagcacggccggatcgccaagttcagcaaggtgagaaccatcaccacccgaagcaacagcatcaaacaaggcaaggaccagcactttcctgtgttcatgaacgagaaggaggacatcctgtggtgtaccgagatggagagagtgttcgggttcccagtccactacacagatgtcagcaacatgtctagactggccagacagagactgctgggaagaagctggtccgtccctgtgatcagacacctgttcgcccctctgaaggagtacttcgcctgcgtgagcagcggcaacagcaacgccaacagccggggccccagcttctctagcggcctggtgccactgtccctgagagggagccacatgggccccatggagatctacaaaaccgtgagcgcctggaagcggcagcctgtgcgcgtgctgagcctgtttcggaatatcgataaagtcctgaaaagcctgggattcctggagagcggctctggctccggcggtggcaccctgaagtacgtggaggatgtgacaaacgtggtcagacgggatgtggagaagtggggccccttcgatctggtgtacggcagcacccaacccctgggcagctcttgtgaccggtgccctggctggtacatgtttcagttccaccggatcctgcagtacgccctgccgagacaggagtcccagcggccattcttttggattttcatggacaacttgctgctgaccgaggatgaccaggaaactaccactcggttcctgcagaccgaagccgtgaccctgcaggacgtgagaggccgggactaccagaacgccatgcgggtgtggtccaacatccctggactgaaaagcaagcacgcacctctgacccctaaagaagaggagtacctgcaggcccaggtgcggagcagaagcaagctggacgcccctaaggtggatctgctggtgaagaattgcctcctgcccctgagagagtacttcaagtatttcagccagaatagtctgcccctgggcggcccaagcagcggcgcccctcctcccagcggcggcagcccagccggctccccaacctctaccgaggagggcacctctgagtccgccacccccgagagcggccctggcacctccaccgagcccagcgagggcagcgcacccggcagccctgccggcagccccacctccacagaggagggaaccagcaccgagcccagcgaaggcagcgccccaggcaccagcaccgagcctagtgagggcggctctggcggcggcagcgcccaggagattaaacggatcaacaagatcagaagaagacttgtgaaagacagcaacaccaagaaggccggcaagacaggccccatgaaaaccctgctggttagagtgatgacacccgatctgagagagcggctggaaaacctgagaaagaagcctgaaaatatcccccagcccatcagcaatacatctagagccaacctgaataagctgctgaccgattacaccgaaatgaagaaggcgatcctgcatgtgtactgggaagagttccagaaggaccctgtgggcctgatgagccgggtggcccagcctgccagcaagaagatcgatcagaacaagctgaaacctgagatggacgagaagggcaacctgaccaccgccggctttgcctgctctcagtgtggccagcccctgttcgtgtacaagctggagcaggtgtctgagaagggcaaggcttacaccaactacttcggacggtgcaatgtggccgagcacgaaaagctgatcctgctggcccagctgaagcccgagaaggatagcgacgaagccgtgacatatagcctgggaaagtttgggcagagggccctggatttctacagcattcatgtgaccaaggagtccacccaccccgtgaagcccctggcccagatcgccggaaacagatacgcctccggacctgtgggaaaggccctgagcgacgcatgtatgggcacaatcgcctccttcctgtctaagtaccaggacatcatcatcgaacaccagaaggtggtgaagggcaaccagaagagactggagagcctgcgggagctggccggcaaggaaaacctggaataccctagcgtgaccctgccacctcagcctcacaccaaggagggcgttgatgcctacaacgaagtgatcgcccgggtgcgaatgtgggtgaacctgaacctgtggcagaagctgaagctaagcagagatgatgccaagcctctgctgagactgaagggattcccttcctttcctctggtcgagagacaggccaacgaagtggactggtgggacatggtgtgtaacgtgaagaagctgatcaacgagaaaaaggaggatggcaaggtgttttggcagaatctggctggctacaagagacaggaagccctgagaccatacctgagcagcgaggaagatcggaagaagggaaagaaattcgctcggtaccagctgggcgacctgctgctgcacctggaaaagaagcacggcgaggactggggaaaggtgtacgacgaggcctgggagcggattgacaagaaagtggaaggcctgagcaagcacatcaagctggaagaggaacggagaagcgaggacgcccagagcaaggccgccctgaccgactggctgcgggctaaggccagcttcgtgatcgagggcctgaaggaggccgacaaggacgagttctgcagatgcgagctgaagctgcagaagtggtacggggacctgcggggaaagcccttcgccatcgaagccgagaacagcatcctggacatcagcggcttcagcaagcagtacaactgtgccttcatctggcagaaggacggcgtgaagaagctgaacctgtacctgatcatcaactacttcaagggcggcaagctgcggttcaagaagatcaaacctgaagccttcgaagccaacagattctacaccgtgatcaacaaaaagagcggcgagatcgtgcccatggaggtgaacttcaacttcgacgaccccaacctgatcatcctgcctctggcctttggcaagagacagggcagagaattcatctggaacgacctgctgtccctggaaaccggcagcctgaagctggccaacggaagagtgatcgagaagacactgtacaacagaagaacccggcaggatgagcctgccctgttcgtggccctgaccttcgagcggcgggaggtcctggactcctccaatatcaaaccaatgaacctgatcggcgtggcaagaggcgaaaacatccccgccgtgatcgccctgaccgaccccgagggctgcccactgagccggtttaaggatagcctgggaaacccaacccacatcctgagaatcggcgagagctataaggagaagcagcggaccatccaggccaagaaggaggtggagcagcggagagccggcggctacagccggaagtacgccagcaaagccaagaatctggcagacgatatggtgagaaacaccgctagagatctgctgtactacgccgtgacccaggatgccatgctgatcttcgccaacctgagccggggcttcggccggcagggcaagcggaccttcatggccgagagacagtacacacggatggaggactggctgaccgccaagctggcctacgagggcctgagcaagacctacctgtccaagacactggcccagtacacctccaagacatgcagcaactgtgggtttaccatcaccagcgccgactacgacagggtgctggagaagctgaagaagacagcaacaggctggatgaccacaattaacggcaaggagctgaaggtggagggccagattacctactacaacagatacaagagacagaacgtagtcaaggacctgtccgtcgagctggatagactgagcgaagaatctgtgaacaacgacatctcctcctggacaaagggcagaagcggagaagctctgagcctcctgaagaaaagattctcccatagacccgtgcaggagaagttcgtgtgcctgaactgcggcttcgagacacacgcagccgagcaagccgccctgaacatcgccagatcctggctgttcctgcggagccaggagtacaagaaataccagacaaacaagacaaccggcaacaccgataagagagccttcgtcgagacctggcagtccttttaccggaagaagcttaaggaggtgtggaaacctgccgtgcggtctggcggatctggcggaggctccacaagcgcccagggcagcctgaccctgaaggacgtggccgtggacttcacctgggaggagtggcagctgctggaccccgaccagaaggacctgtacagggacgtgatgctggagaactacagcaacctggtgagcgtgggctaccaggtgaacaagcccgacatcctgagcatgctggagcagggcgagcccccctggaccctggaggacgaggtgcacagccacccccaccccgagaccgacaaggtgaccagccccaagaaaaagagaaaagtctaagctgccttctgcggggcttgccttctggccatgcccttcttctctcccttgcacctgtacctcttggtctttgaataaagcctgagtaggaaggctagcaaaaaaaaaaaaaaaaaaaaaaaaaaaaaaaaaaaaaaaaaaaaaaaaaaaaaaaaaaaaaaaaaaaaaaaaaaaaaaaa

SEQ ID NO: 6425 - RNA, 5797 nt, synthetic construct
  source 1..5797: mol_type = other RNA
aggaaataagagagaaaagaagagtaagaagaaatataagagccaccatggcccctaagaagaagcgtaaagtgagccggatggaacgcctcgtctacgaggtgcggcagaagtgcagaaacatcgaggacatctgcatctcctgcggatctctgaacgtgaccctggagcacccactgttcatcggcggcatgtgccagaactgtaaaaactgttttctggagtgtgcctatcaatacgacgatgacggctaccagagctactgcaccatctgttgcggcggaagagaggtgctgatgtgtggaaataacaactgctgccggtgcttctgcgtggaatgcgtggacctgctggtgggccccggcgccgcccaggccgctattaaggaagatccttggaactgctacatgtgcggccacaagggcacatacggcctgctgagacggagagaggactggcctagcagactgcagatgttcttcgccaataaccacgaccaggagttcgacccccctaaggtgtaccctcccgtccccgccgagaagagaaagcccatccgggtcctgagcctgttcgatggcatcgccaccggtctgctggtgctgaaggacctgggcatccaggtggataggtacattgcctccgaggtgtgcgaggactccatcaccgtgggaatggtgcgtcatcagggcaagatcatgtacgtgggcgacgtgcggagcgtgacacagaagcatatccaggagtggggccctttcgacctggtgatcggcggcagcccttgcaatgacctgagcatcgtgaacccagcccggaagggcctgtacgagggaaccggcagactgttcttcgagttttacagactgctgcacgacgcccggcctaaggaaggcgacgaccggcccttcttttggctgttcgagaatgtggtggccatgggagtcagcgacaagcgggatattagccggttcctggagagcaaccccgtgatgatcgatgccaaggaagtgagcgccgcccaccgggccagatacttctggggcaatctgcctggcatgaacagacccctggccagcaccgtgaacgacaagctggagctgcaggagtgcctggagcacggccggatcgccaagttcagcaaggtgagaaccatcaccacccgaagcaacagcatcaaacaaggcaaggaccagcactttcctgtgttcatgaacgagaaggaggacatcctgtggtgtaccgagatggagagagtgttcgggttcccagtccactacacagatgtcagcaacatgtctagactggccagacagagactgctgggaagaagctggtccgtccctgtgatcagacacctgttcgcccctctgaaggagtacttcgcctgcgtgagcagcggcaacagcaacgccaacagccggggccccagcttctctagcggcctggtgccactgtccctgagagggagccacatgggccccatggagatctacaaaaccgtgagcgcctggaagcggcagcctgtgcgcgtgctgagcctgtttcggaatatcgataaagtcctgaaaagcctgggattcctggagagcggctctggctccggcggtggcaccctgaagtacgtggaggatgtgacaaacgtggtcagacgggatgtggagaagtggggccccttcgatctggtgtacggcagcacccaacccctgggcagctcttgtgaccggtgccctggctggtacatgtttcagttccaccggatcctgcagtacgccctgccgagacaggagtcccagcggccattcttttggattttcatggacaacttgctgctgaccgaggatgaccaggaaactaccactcggttcctgcagaccgaagccgtgaccctgcaggacgtgagaggccgggactaccagaacgccatgcgggtgtggtccaacatccctggactgaaaagcaagcacgcacctctgacccctaaagaagaggagtacctgcaggcccaggtgcggagcagaagcaagctggacgcccctaaggtggatctgctggtgaagaattgcctcctgcccctgagagagtacttcaagtatttcagccagaatagtctgcccctgggcggcccaagcagcggcgcccctcctcccagcggcggcagcccagccggctccccaacctctaccgaggagggcacctctgagtccgccacccccgagagcggccctggcacctccaccgagcccagcgagggcagcgcacccggcagccctgccggcagccccacctccacagaggagggaaccagcaccgagcccagcgaaggcagcgccccaggcaccagcaccgagcctagtgagggcggctctggcggcggcagcgcccaggagattaaacggatcaacaagatcagaagaagacttgtgaaagacagcaacaccaagaaggccggcaagacaggccccatgaaaaccctgctggttagagtgatgacacccgatctgagagagcggctggaaaacctgagaaagaagcctgaaaatatcccccagcccatcagcaatacatctagagccaacctgaataagctgctgaccgattacaccgaaatgaagaaggcgatcctgcatgtgtactgggaagagttccagaaggaccctgtgggcctgatgagccgggtggcccagcctgccagcaagaagatcgatcagaacaagctgaaacctgagatggacgagaagggcaacctgaccaccgccggctttgcctgctctcagtgtggccagcccctgttcgtgtacaagctggagcaggtgtctgagaagggcaaggcttacaccaactacttcggacggtgcaatgtggccgagcacgaaaagctgatcctgctggcccagctgaagcccgagaaggatagcgacgaagccgtgacatatagcctgggaaagtttgggcagagggccctggatttctacagcattcatgtgaccaaggagtccacccaccccgtgaagcccctggcccagatcgccggaaacagatacgcctccggacctgtgggaaaggccctgagcgacgcatgtatgggcacaatcgcctccttcctgtctaagtaccaggacatcatcatcgaacaccagaaggtggtgaagggcaaccagaagagactggagagcctgcgggagctggccggcaaggaaaacctggaataccctagcgtgaccctgccacctcagcctcacaccaaggagggcgttgatgcctacaacgaagtgatcgcccgggtgcgaatgtgggtgaacctgaacctgtggcagaagctgaagctaagcagagatgatgccaagcctctgctgagactgaagggattcccttcctttcctctggtcgagagacaggccaacgaagtggactggtgggacatggtgtgtaacgtgaagaagctgatcaacgagaaaaaggaggatggcaaggtgttttggcagaatctggctggctacaagagacaggaagccctgagaccatacctgagcagcgaggaagatcggaagaagggaaagaaattcgctcggtaccagctgggcgacctgctgctgcacctggaaaagaagcacggcgaggactggggaaaggtgtacgacgaggcctgggagcggattgacaagaaagtggaaggcctgagcaagcacatcaagctggaagaggaacggagaagcgaggacgcccagagcaaggccgccctgaccgactggctgcgggctaaggccagcttcgtgatcgagggcctgaaggaggccgacaaggacgagttctgcagatgcgagctgaagctgcagaagtggtacggggacctgcggggaaagcccttcgccatcgaagccgagaacagcatcctggacatcagcggcttcagcaagcagtacaactgtgccttcatctggcagaaggacggcgtgaagaagctgaacctgtacctgatcatcaactacttcaagggcggcaagctgcggttcaagaagatcaaacctgaagccttcgaagccaacagattctacaccgtgatcaacaaaaagagcggcgagatcgtgcccatggaggtgaacttcaacttcgacgaccccaacctgatcatcctgcctctggcctttggcaagagacagggcagagaattcatctggaacgacctgctgtccctggaaaccggcagcctgaagctggccaacggaagagtgatcgagaagacactgtacaacagaagaacccggcaggatgagcctgccctgttcgtggccctgaccttcgagcggcgggaggtcctggactcctccaatatcaaaccaatgaacctgatcggcgtggcaagaggcgaaaacatccccgccgtgatcgccctgaccgaccccgagggctgcccactgagccggtttaaggatagcctgggaaacccaacccacatcctgagaatcggcgagagctataaggagaagcagcggaccatccaggccaagaaggaggtggagcagcggagagccggcggctacagccggaagtacgccagcaaagccaagaatctggcagacgatatggtgagaaacaccgctagagatctgctgtactacgccgtgacccaggatgccatgctgatcttcgccaacctgagccggggcttcggccggcagggcaagcggaccttcatggccgagagacagtacacacggatggaggactggctgaccgccaagctggcctacgagggcctgagcaagacctacctgtccaagacactggcccagtacacctccaagacatgcagcaactgtgggtttaccatcaccagcgccgactacgacagggtgctggagaagctgaagaagacagcaacaggctggatgaccacaattaacggcaaggagctgaaggtggagggccagattacctactacaacagatacaagagacagaacgtagtcaaggacctgtccgtcgagctggatagactgagcgaagaatctgtgaacaacgacatctcctcctggacaaagggcagaagcggagaagctctgagcctcctgaagaaaagattctcccatagacccgtgcaggagaagttcgtgtgcctgaactgcggcttcgagacacacgcagccgagcaagccgccctgaacatcgccagatcctggctgttcctgcggagccaggagtacaagaaataccagacaaacaagacaaccggcaacaccgataagagagccttcgtcgagacctggcagtccttttaccggaagaagcttaaggaggtgtggaaacctgccgtgcggtctggcggatctggcggaggctccacaagcatgttccaggacagcgtggccttcgaggacgtggccgtgaccttcacccaggaggagtgggccctgctggaccccagccagaagaccctgtacagggacgtgatgcaggagaacttcaggaacctggccagcgtgggcaagaagtggaaggcccagaacatctacgtggagtacaagaacctgaggaggaacctgaggaacctgatgggcaagaggctgttcgagagcaaggaggaccaccagaccagccccaagaaaaagagaaaagtctaagctgccttctgcggggcttgccttctggccatgcccttcttctctcccttgcacctgtacctcttggtctttgaataaagcctgagtaggaaggctagcaaaaaaaaaaaaaaaaaaaaaaaaaaaaaaaaaaaaaaaaaaaaaaaaaaaaaaaaaaaaaaaaaaaaaaaaaaaaaaaa

SEQ ID NO: 6426 - RNA, 5797 nt, synthetic construct
  source 1..5797: mol_type = other RNA
aggaaataagagagaaaagaagagtaagaagaaatataagagccaccatggcccctaagaagaagcgtaaagtgagccggatggaacgcctcgtctacgaggtgcggcagaagtgcagaaacatcgaggacatctgcatctcctgcggatctctgaacgtgaccctggagcacccactgttcatcggcggcatgtgccagaactgtaaaaactgttttctggagtgtgcctatcaatacgacgatgacggctaccagagctactgcaccatctgttgcggcggaagagaggtgctgatgtgtggaaataacaactgctgccggtgcttctgcgtggaatgcgtggacctgctggtgggccccggcgccgcccaggccgctattaaggaagatccttggaactgctacatgtgcggccacaagggcacatacggcctgctgagacggagagaggactggcctagcagactgcagatgttcttcgccaataaccacgaccaggagttcgacccccctaaggtgtaccctcccgtccccgccgagaagagaaagcccatccgggtcctgagcctgttcgatggcatcgccaccggtctgctggtgctgaaggacctgggcatccaggtggataggtacattgcctccgaggtgtgcgaggactccatcaccgtgggaatggtgcgtcatcagggcaagatcatgtacgtgggcgacgtgcggagcgtgacacagaagcatatccaggagtggggccctttcgacctggtgatcggcggcagcccttgcaatgacctgagcatcgtgaacccagcccggaagggcctgtacgagggaaccggcagactgttcttcgagttttacagactgctgcacgacgcccggcctaaggaaggcgacgaccggcccttcttttggctgttcgagaatgtggtggccatgggagtcagcgacaagcgggatattagccggttcctggagagcaaccccgtgatgatcgatgccaaggaagtgagcgccgcccaccgggccagatacttctggggcaatctgcctggcatgaacagacccctggccagcaccgtgaacgacaagctggagctgcaggagtgcctggagcacggccggatcgccaagttcagcaaggtgagaaccatcaccacccgaagcaacagcatcaaacaaggcaaggaccagcactttcctgtgttcatgaacgagaaggaggacatcctgtggtgtaccgagatggagagagtgttcgggttcccagtccactacacagatgtcagcaacatgtctagactggccagacagagactgctgggaagaagctggtccgtccctgtgatcagacacctgttcgcccctctgaaggagtacttcgcctgcgtgagcagcggcaacagcaacgccaacagccggggccccagcttctctagcggcctggtgccactgtccctgagagggagccacatgggccccatggagatctacaaaaccgtgagcgcctggaagcggcagcctgtgcgcgtgctgagcctgtttcggaatatcgataaagtcctgaaaagcctgggattcctggagagcggctctggctccggcggtggcaccctgaagtacgtggaggatgtgacaaacgtggtcagacgggatgtggagaagtggggccccttcgatctggtgtacggcagcacccaacccctgggcagctcttgtgaccggtgccctggctggtacatgtttcagttccaccggatcctgcagtacgccctgccgagacaggagtcccagcggccattcttttggattttcatggacaacttgctgctgaccgaggatgaccaggaaactaccactcggttcctgcagaccgaagccgtgaccctgcaggacgtgagaggccgggactaccagaacgccatgcgggtgtggtccaacatccctggactgaaaagcaagcacgcacctctgacccctaaagaagaggagtacctgcaggcccaggtgcggagcagaagcaagctggacgcccctaaggtggatctgctggtgaagaattgcctcctgcccctgagagagtacttcaagtatttcagccagaatagtctgcccctgggcggcccaagcagcggcgcccctcctcccagcggcggcagcccagccggctccccaacctctaccgaggagggcacctctgagtccgccacccccgagagcggccctggcacctccaccgagcccagcgagggcagcgcacccggcagccctgccggcagccccacctccacagaggagggaaccagcaccgagcccagcgaaggcagcgccccaggcaccagcaccgagcctagtgagggcggctctggcggcggcagcgcccaggagattaaacggatcaacaagatcagaagaagacttgtgaaagacagcaacaccaagaaggccggcaagacaggccccatgaaaaccctgctggttagagtgatgacacccgatctgagagagcggctggaaaacctgagaaagaagcctgaaaatatcccccagcccatcagcaatacatctagagccaacctgaataagctgctgaccgattacaccgaaatgaagaaggcgatcctgcatgtgtactgggaagagttccagaaggaccctgtgggcctgatgagccgggtggcccagcctgccagcaagaagatcgatcagaacaagctgaaacctgagatggacgagaagggcaacctgaccaccgccggctttgcctgctctcagtgtggccagcccctgttcgtgtacaagctggagcaggtgtctgagaagggcaaggcttacaccaactacttcggacggtgcaatgtggccgagcacgaaaagctgatcctgctggcccagctgaagcccgagaaggatagcgacgaagccgtgacatatagcctgggaaagtttgggcagagggccctggatttctacagcattcatgtgaccaaggagtccacccaccccgtgaagcccctggcccagatcgccggaaacagatacgcctccggacctgtgggaaaggccctgagcgacgcatgtatgggcacaatcgcctccttcctgtctaagtaccaggacatcatcatcgaacaccagaaggtggtgaagggcaaccagaagagactggagagcctgcgggagctggccggcaaggaaaacctggaataccctagcgtgaccctgccacctcagcctcacaccaaggagggcgttgatgcctacaacgaagtgatcgcccgggtgcgaatgtgggtgaacctgaacctgtggcagaagctgaagctaagcagagatgatgccaagcctctgctgagactgaagggattcccttcctttcctctggtcgagagacaggccaacgaagtggactggtgggacatggtgtgtaacgtgaagaagctgatcaacgagaaaaaggaggatggcaaggtgttttggcagaatctggctggctacaagagacaggaagccctgagaccatacctgagcagcgaggaagatcggaagaagggaaagaaattcgctcggtaccagctgggcgacctgctgctgcacctggaaaagaagcacggcgaggactggggaaaggtgtacgacgaggcctgggagcggattgacaagaaagtggaaggcctgagcaagcacatcaagctggaagaggaacggagaagcgaggacgcccagagcaaggccgccctgaccgactggctgcgggctaaggccagcttcgtgatcgagggcctgaaggaggccgacaaggacgagttctgcagatgcgagctgaagctgcagaagtggtacggggacctgcggggaaagcccttcgccatcgaagccgagaacagcatcctggacatcagcggcttcagcaagcagtacaactgtgccttcatctggcagaaggacggcgtgaagaagctgaacctgtacctgatcatcaactacttcaagggcggcaagctgcggttcaagaagatcaaacctgaagccttcgaagccaacagattctacaccgtgatcaacaaaaagagcggcgagatcgtgcccatggaggtgaacttcaacttcgacgaccccaacctgatcatcctgcctctggcctttggcaagagacagggcagagaattcatctggaacgacctgctgtccctggaaaccggcagcctgaagctggccaacggaagagtgatcgagaagacactgtacaacagaagaacccggcaggatgagcctgccctgttcgtggccctgaccttcgagcggcgggaggtcctggactcctccaatatcaaaccaatgaacctgatcggcgtggcaagaggcgaaaacatccccgccgtgatcgccctgaccgaccccgagggctgcccactgagccggtttaaggatagcctgggaaacccaacccacatcctgagaatcggcgagagctataaggagaagcagcggaccatccaggccaagaaggaggtggagcagcggagagccggcggctacagccggaagtacgccagcaaagccaagaatctggcagacgatatggtgagaaacaccgctagagatctgctgtactacgccgtgacccaggatgccatgctgatcttcgccaacctgagccggggcttcggccggcagggcaagcggaccttcatggccgagagacagtacacacggatggaggactggctgaccgccaagctggcctacgagggcctgagcaagacctacctgtccaagacactggcccagtacacctccaagacatgcagcaactgtgggtttaccatcaccagcgccgactacgacagggtgctggagaagctgaagaagacagcaacaggctggatgaccacaattaacggcaaggagctgaaggtggagggccagattacctactacaacagatacaagagacagaacgtagtcaaggacctgtccgtcgagctggatagactgagcgaagaatctgtgaacaacgacatctcctcctggacaaagggcagaagcggagaagctctgagcctcctgaagaaaagattctcccatagacccgtgcaggagaagttcgtgtgcctgaactgcggcttcgagacacacgcagccgagcaagccgccctgaacatcgccagatcctggctgttcctgcggagccaggagtacaagaaataccagacaaacaagacaaccggcaacaccgataagagagccttcgtcgagacctggcagtccttttaccggaagaagcttaaggaggtgtggaaacctgccgtgcggtctggcggatctggcggaggctccacaagcttcctgctgggcctgctgaccttcagggacgtggccatcgagttcagccaggaggagtggggctgcctgaaccacacccagagggagctgtacagggacgtgatgctggagaactacggccacctgctgttcctgggcctgatcgtgagcaagcccgacctggtgagcttcctggagcagaagaaggagccctgggacgtgaagaggaagaagaccgtggccatccacaggggcaggtgggagaccagccccaagaaaaagagaaaagtctaagctgccttctgcggggcttgccttctggccatgcccttcttctctcccttgcacctgtacctcttggtctttgaataaagcctgagtaggaaggctagcaaaaaaaaaaaaaaaaaaaaaaaaaaaaaaaaaaaaaaaaaaaaaaaaaaaaaaaaaaaaaaaaaaaaaaaaaaaaaaaa

SEQ ID NO: 6427 - RNA, 5797 nt, synthetic construct
  source 1..5797: mol_type = other RNA
aggaaataagagagaaaagaagagtaagaagaaatataagagccaccatggcccctaagaagaagcgtaaagtgagccggatggaacgcctcgtctacgaggtgcggcagaagtgcagaaacatcgaggacatctgcatctcctgcggatctctgaacgtgaccctggagcacccactgttcatcggcggcatgtgccagaactgtaaaaactgttttctggagtgtgcctatcaatacgacgatgacggctaccagagctactgcaccatctgttgcggcggaagagaggtgctgatgtgtggaaataacaactgctgccggtgcttctgcgtggaatgcgtggacctgctggtgggccccggcgccgcccaggccgctattaaggaagatccttggaactgctacatgtgcggccacaagggcacatacggcctgctgagacggagagaggactggcctagcagactgcagatgttcttcgccaataaccacgaccaggagttcgacccccctaaggtgtaccctcccgtccccgccgagaagagaaagcccatccgggtcctgagcctgttcgatggcatcgccaccggtctgctggtgctgaaggacctgggcatccaggtggataggtacattgcctccgaggtgtgcgaggactccatcaccgtgggaatggtgcgtcatcagggcaagatcatgtacgtgggcgacgtgcggagcgtgacacagaagcatatccaggagtggggccctttcgacctggtgatcggcggcagcccttgcaatgacctgagcatcgtgaacccagcccggaagggcctgtacgagggaaccggcagactgttcttcgagttttacagactgctgcacgacgcccggcctaaggaaggcgacgaccggcccttcttttggctgttcgagaatgtggtggccatgggagtcagcgacaagcgggatattagccggttcctggagagcaaccccgtgatgatcgatgccaaggaagtgagcgccgcccaccgggccagatacttctggggcaatctgcctggcatgaacagacccctggccagcaccgtgaacgacaagctggagctgcaggagtgcctggagcacggccggatcgccaagttcagcaaggtgagaaccatcaccacccgaagcaacagcatcaaacaaggcaaggaccagcactttcctgtgttcatgaacgagaaggaggacatcctgtggtgtaccgagatggagagagtgttcgggttcccagtccactacacagatgtcagcaacatgtctagactggccagacagagactgctgggaagaagctggtccgtccctgtgatcagacacctgttcgcccctctgaaggagtacttcgcctgcgtgagcagcggcaacagcaacgccaacagccggggccccagcttctctagcggcctggtgccactgtccctgagagggagccacatgggccccatggagatctacaaaaccgtgagcgcctggaagcggcagcctgtgcgcgtgctgagcctgtttcggaatatcgataaagtcctgaaaagcctgggattcctggagagcggctctggctccggcggtggcaccctgaagtacgtggaggatgtgacaaacgtggtcagacgggatgtggagaagtggggccccttcgatctggtgtacggcagcacccaacccctgggcagctcttgtgaccggtgccctggctggtacatgtttcagttccaccggatcctgcagtacgccctgccgagacaggagtcccagcggccattcttttggattttcatggacaacttgctgctgaccgaggatgaccaggaaactaccactcggttcctgcagaccgaagccgtgaccctgcaggacgtgagaggccgggactaccagaacgccatgcgggtgtggtccaacatccctggactgaaaagcaagcacgcacctctgacccctaaagaagaggagtacctgcaggcccaggtgcggagcagaagcaagctggacgcccctaaggtggatctgctggtgaagaattgcctcctgcccctgagagagtacttcaagtatttcagccagaatagtctgcccctgggcggcccaagcagcggcgcccctcctcccagcggcggcagcccagccggctccccaacctctaccgaggagggcacctctgagtccgccacccccgagagcggccctggcacctccaccgagcccagcgagggcagcgcacccggcagccctgccggcagccccacctccacagaggagggaaccagcaccgagcccagcgaaggcagcgccccaggcaccagcaccgagcctagtgagggcggctctggcggcggcagcgcccaggagattaaacggatcaacaagatcagaagaagacttgtgaaagacagcaacaccaagaaggccggcaagacaggccccatgaaaaccctgctggttagagtgatgacacccgatctgagagagcggctggaaaacctgagaaagaagcctgaaaatatcccccagcccatcagcaatacatctagagccaacctgaataagctgctgaccgattacaccgaaatgaagaaggcgatcctgcatgtgtactgggaagagttccagaaggaccctgtgggcctgatgagccgggtggcccagcctgccagcaagaagatcgatcagaacaagctgaaacctgagatggacgagaagggcaacctgaccaccgccggctttgcctgctctcagtgtggccagcccctgttcgtgtacaagctggagcaggtgtctgagaagggcaaggcttacaccaactacttcggacggtgcaatgtggccgagcacgaaaagctgatcctgctggcccagctgaagcccgagaaggatagcgacgaagccgtgacatatagcctgggaaagtttgggcagagggccctggatttctacagcattcatgtgaccaaggagtccacccaccccgtgaagcccctggcccagatcgccggaaacagatacgcctccggacctgtgggaaaggccctgagcgacgcatgtatgggcacaatcgcctccttcctgtctaagtaccaggacatcatcatcgaacaccagaaggtggtgaagggcaaccagaagagactggagagcctgcgggagctggccggcaaggaaaacctggaataccctagcgtgaccctgccacctcagcctcacaccaaggagggcgttgatgcctacaacgaagtgatcgcccgggtgcgaatgtgggtgaacctgaacctgtggcagaagctgaagctaagcagagatgatgccaagcctctgctgagactgaagggattcccttcctttcctctggtcgagagacaggccaacgaagtggactggtgggacatggtgtgtaacgtgaagaagctgatcaacgagaaaaaggaggatggcaaggtgttttggcagaatctggctggctacaagagacaggaagccctgagaccatacctgagcagcgaggaagatcggaagaagggaaagaaattcgctcggtaccagctgggcgacctgctgctgcacctggaaaagaagcacggcgaggactggggaaaggtgtacgacgaggcctgggagcggattgacaagaaagtggaaggcctgagcaagcacatcaagctggaagaggaacggagaagcgaggacgcccagagcaaggccgccctgaccgactggctgcgggctaaggccagcttcgtgatcgagggcctgaaggaggccgacaaggacgagttctgcagatgcgagctgaagctgcagaagtggtacggggacctgcggggaaagcccttcgccatcgaagccgagaacagcatcctggacatcagcggcttcagcaagcagtacaactgtgccttcatctggcagaaggacggcgtgaagaagctgaacctgtacctgatcatcaactacttcaagggcggcaagctgcggttcaagaagatcaaacctgaagccttcgaagccaacagattctacaccgtgatcaacaaaaagagcggcgagatcgtgcccatggaggtgaacttcaacttcgacgaccccaacctgatcatcctgcctctggcctttggcaagagacagggcagagaattcatctggaacgacctgctgtccctggaaaccggcagcctgaagctggccaacggaagagtgatcgagaagacactgtacaacagaagaacccggcaggatgagcctgccctgttcgtggccctgaccttcgagcggcgggaggtcctggactcctccaatatcaaaccaatgaacctgatcggcgtggcaagaggcgaaaacatccccgccgtgatcgccctgaccgaccccgagggctgcccactgagccggtttaaggatagcctgggaaacccaacccacatcctgagaatcggcgagagctataaggagaagcagcggaccatccaggccaagaaggaggtggagcagcggagagccggcggctacagccggaagtacgccagcaaagccaagaatctggcagacgatatggtgagaaacaccgctagagatctgctgtactacgccgtgacccaggatgccatgctgatcttcgccaacctgagccggggcttcggccggcagggcaagcggaccttcatggccgagagacagtacacacggatggaggactggctgaccgccaagctggcctacgagggcctgagcaagacctacctgtccaagacactggcccagtacacctccaagacatgcagcaactgtgggtttaccatcaccagcgccgactacgacagggtgctggagaagctgaagaagacagcaacaggctggatgaccacaattaacggcaaggagctgaaggtggagggccagattacctactacaacagatacaagagacagaacgtagtcaaggacctgtccgtcgagctggatagactgagcgaagaatctgtgaacaacgacatctcctcctggacaaagggcagaagcggagaagctctgagcctcctgaagaaaagattctcccatagacccgtgcaggagaagttcgtgtgcctgaactgcggcttcgagacacacgcagccgagcaagccgccctgaacatcgccagatcctggctgttcctgcggagccaggagtacaagaaataccagacaaacaagacaaccggcaacaccgataagagagccttcgtcgagacctggcagtccttttaccggaagaagcttaaggaggtgtggaaacctgccgtgcggtctggcggatctggcggaggctccacaagcagcaaggcccccgtgaccttcggcgacctggccatctacttcagccaggaggagtgggagtggctgagccccatgcagaaggacctgtacgaggacgtgatgctggagaactaccacaacctggtgagcgtgggcctggcctgcaggaggcccaacatcatcgccctgctggagaagggcaaggccccctgggtgatcgagcccagcaggaggaggtggggccccgagagcggcagcaagtacaccagccccaagaaaaagagaaaagtctaagctgccttctgcggggcttgccttctggccatgcccttcttctctcccttgcacctgtacctcttggtctttgaataaagcctgagtaggaaggctagcaaaaaaaaaaaaaaaaaaaaaaaaaaaaaaaaaaaaaaaaaaaaaaaaaaaaaaaaaaaaaaaaaaaaaaaaaaaaaaaa

SEQ ID NO: 6428 - RNA, 5797 nt, synthetic construct
  source 1..5797: mol_type = other RNA
aggaaataagagagaaaagaagagtaagaagaaatataagagccaccatggcccctaagaagaagcgtaaagtgagccggatggaacgcctcgtctacgaggtgcggcagaagtgcagaaacatcgaggacatctgcatctcctgcggatctctgaacgtgaccctggagcacccactgttcatcggcggcatgtgccagaactgtaaaaactgttttctggagtgtgcctatcaatacgacgatgacggctaccagagctactgcaccatctgttgcggcggaagagaggtgctgatgtgtggaaataacaactgctgccggtgcttctgcgtggaatgcgtggacctgctggtgggccccggcgccgcccaggccgctattaaggaagatccttggaactgctacatgtgcggccacaagggcacatacggcctgctgagacggagagaggactggcctagcagactgcagatgttcttcgccaataaccacgaccaggagttcgacccccctaaggtgtaccctcccgtccccgccgagaagagaaagcccatccgggtcctgagcctgttcgatggcatcgccaccggtctgctggtgctgaaggacctgggcatccaggtggataggtacattgcctccgaggtgtgcgaggactccatcaccgtgggaatggtgcgtcatcagggcaagatcatgtacgtgggcgacgtgcggagcgtgacacagaagcatatccaggagtggggccctttcgacctggtgatcggcggcagcccttgcaatgacctgagcatcgtgaacccagcccggaagggcctgtacgagggaaccggcagactgttcttcgagttttacagactgctgcacgacgcccggcctaaggaaggcgacgaccggcccttcttttggctgttcgagaatgtggtggccatgggagtcagcgacaagcgggatattagccggttcctggagagcaaccccgtgatgatcgatgccaaggaagtgagcgccgcccaccgggccagatacttctggggcaatctgcctggcatgaacagacccctggccagcaccgtgaacgacaagctggagctgcaggagtgcctggagcacggccggatcgccaagttcagcaaggtgagaaccatcaccacccgaagcaacagcatcaaacaaggcaaggaccagcactttcctgtgttcatgaacgagaaggaggacatcctgtggtgtaccgagatggagagagtgttcgggttcccagtccactacacagatgtcagcaacatgtctagactggccagacagagactgctgggaagaagctggtccgtccctgtgatcagacacctgttcgcccctctgaaggagtacttcgcctgcgtgagcagcggcaacagcaacgccaacagccggggccccagcttctctagcggcctggtgccactgtccctgagagggagccacatgggccccatggagatctacaaaaccgtgagcgcctggaagcggcagcctgtgcgcgtgctgagcctgtttcggaatatcgataaagtcctgaaaagcctgggattcctggagagcggctctggctccggcggtggcaccctgaagtacgtggaggatgtgacaaacgtggtcagacgggatgtggagaagtggggccccttcgatctggtgtacggcagcacccaacccctgggcagctcttgtgaccggtgccctggctggtacatgtttcagttccaccggatcctgcagtacgccctgccgagacaggagtcccagcggccattcttttggattttcatggacaacttgctgctgaccgaggatgaccaggaaactaccactcggttcctgcagaccgaagccgtgaccctgcaggacgtgagaggccgggactaccagaacgccatgcgggtgtggtccaacatccctggactgaaaagcaagcacgcacctctgacccctaaagaagaggagtacctgcaggcccaggtgcggagcagaagcaagctggacgcccctaaggtggatctgctggtgaagaattgcctcctgcccctgagagagtacttcaagtatttcagccagaatagtctgcccctgggcggcccaagcagcggcgcccctcctcccagcggcggcagcccagccggctccccaacctctaccgaggagggcacctctgagtccgccacccccgagagcggccctggcacctccaccgagcccagcgagggcagcgcacccggcagccctgccggcagccccacctccacagaggagggaaccagcaccgagcccagcgaaggcagcgccccaggcaccagcaccgagcctagtgagggcggctctggcggcggcagcgcccaggagattaaacggatcaacaagatcagaagaagacttgtgaaagacagcaacaccaagaaggccggcaagacaggccccatgaaaaccctgctggttagagtgatgacacccgatctgagagagcggctggaaaacctgagaaagaagcctgaaaatatcccccagcccatcagcaatacatctagagccaacctgaataagctgctgaccgattacaccgaaatgaagaaggcgatcctgcatgtgtactgggaagagttccagaaggaccctgtgggcctgatgagccgggtggcccagcctgccagcaagaagatcgatcagaacaagctgaaacctgagatggacgagaagggcaacctgaccaccgccggctttgcctgctctcagtgtggccagcccctgttcgtgtacaagctggagcaggtgtctgagaagggcaaggcttacaccaactacttcggacggtgcaatgtggccgagcacgaaaagctgatcctgctggcccagctgaagcccgagaaggatagcgacgaagccgtgacatatagcctgggaaagtttgggcagagggccctggatttctacagcattcatgtgaccaaggagtccacccaccccgtgaagcccctggcccagatcgccggaaacagatacgcctccggacctgtgggaaaggccctgagcgacgcatgtatgggcacaatcgcctccttcctgtctaagtaccaggacatcatcatcgaacaccagaaggtggtgaagggcaaccagaagagactggagagcctgcgggagctggccggcaaggaaaacctggaataccctagcgtgaccctgccacctcagcctcacaccaaggagggcgttgatgcctacaacgaagtgatcgcccgggtgcgaatgtgggtgaacctgaacctgtggcagaagctgaagctaagcagagatgatgccaagcctctgctgagactgaagggattcccttcctttcctctggtcgagagacaggccaacgaagtggactggtgggacatggtgtgtaacgtgaagaagctgatcaacgagaaaaaggaggatggcaaggtgttttggcagaatctggctggctacaagagacaggaagccctgagaccatacctgagcagcgaggaagatcggaagaagggaaagaaattcgctcggtaccagctgggcgacctgctgctgcacctggaaaagaagcacggcgaggactggggaaaggtgtacgacgaggcctgggagcggattgacaagaaagtggaaggcctgagcaagcacatcaagctggaagaggaacggagaagcgaggacgcccagagcaaggccgccctgaccgactggctgcgggctaaggccagcttcgtgatcgagggcctgaaggaggccgacaaggacgagttctgcagatgcgagctgaagctgcagaagtggtacggggacctgcggggaaagcccttcgccatcgaagccgagaacagcatcctggacatcagcggcttcagcaagcagtacaactgtgccttcatctggcagaaggacggcgtgaagaagctgaacctgtacctgatcatcaactacttcaagggcggcaagctgcggttcaagaagatcaaacctgaagccttcgaagccaacagattctacaccgtgatcaacaaaaagagcggcgagatcgtgcccatggaggtgaacttcaacttcgacgaccccaacctgatcatcctgcctctggcctttggcaagagacagggcagagaattcatctggaacgacctgctgtccctggaaaccggcagcctgaagctggccaacggaagagtgatcgagaagacactgtacaacagaagaacccggcaggatgagcctgccctgttcgtggccctgaccttcgagcggcgggaggtcctggactcctccaatatcaaaccaatgaacctgatcggcgtggcaagaggcgaaaacatccccgccgtgatcgccctgaccgaccccgagggctgcccactgagccggtttaaggatagcctgggaaacccaacccacatcctgagaatcggcgagagctataaggagaagcagcggaccatccaggccaagaaggaggtggagcagcggagagccggcggctacagccggaagtacgccagcaaagccaagaatctggcagacgatatggtgagaaacaccgctagagatctgctgtactacgccgtgacccaggatgccatgctgatcttcgccaacctgagccggggcttcggccggcagggcaagcggaccttcatggccgagagacagtacacacggatggaggactggctgaccgccaagctggcctacgagggcctgagcaagacctacctgtccaagacactggcccagtacacctccaagacatgcagcaactgtgggtttaccatcaccagcgccgactacgacagggtgctggagaagctgaagaagacagcaacaggctggatgaccacaattaacggcaaggagctgaaggtggagggccagattacctactacaacagatacaagagacagaacgtagtcaaggacctgtccgtcgagctggatagactgagcgaagaatctgtgaacaacgacatctcctcctggacaaagggcagaagcggagaagctctgagcctcctgaagaaaagattctcccatagacccgtgcaggagaagttcgtgtgcctgaactgcggcttcgagacacacgcagccgagcaagccgccctgaacatcgccagatcctggctgttcctgcggagccaggagtacaagaaataccagacaaacaagacaaccggcaacaccgataagagagccttcgtcgagacctggcagtccttttaccggaagaagcttaaggaggtgtggaaacctgccgtgcggtctggcggatctggcggaggctccacaagcatgatgaccgccgtgagcctgaccaccaggagccaggagagcgtggccttcgaggacgtggccgtgtacttcaccaccaaggagtgggccatcatggtgcccgccgagagggccctgtacagggacgtgatgctggagaactacgaggccgtggccttcgtggtgccccccaccagcaagcccgccctggtgagccacctggagcagggcaaggagagctgcttcatcaggccccagggcgtgaccagccccaagaaaaagagaaaagtctaagctgccttctgcggggcttgccttctggccatgcccttcttctctcccttgcacctgtacctcttggtctttgaataaagcctgagtaggaaggctagcaaaaaaaaaaaaaaaaaaaaaaaaaaaaaaaaaaaaaaaaaaaaaaaaaaaaaaaaaaaaaaaaaaaaaaaaaaaaaaaa

SEQ ID NO: 6429 - RNA, 5797 nt, synthetic construct
  source 1..5797: mol_type = other RNA
aggaaataagagagaaaagaagagtaagaagaaatataagagccaccatggcccctaagaagaagcgtaaagtgagccggatggaacgcctcgtctacgaggtgcggcagaagtgcagaaacatcgaggacatctgcatctcctgcggatctctgaacgtgaccctggagcacccactgttcatcggcggcatgtgccagaactgtaaaaactgttttctggagtgtgcctatcaatacgacgatgacggctaccagagctactgcaccatctgttgcggcggaagagaggtgctgatgtgtggaaataacaactgctgccggtgcttctgcgtggaatgcgtggacctgctggtgggccccggcgccgcccaggccgctattaaggaagatccttggaactgctacatgtgcggccacaagggcacatacggcctgctgagacggagagaggactggcctagcagactgcagatgttcttcgccaataaccacgaccaggagttcgacccccctaaggtgtaccctcccgtccccgccgagaagagaaagcccatccgggtcctgagcctgttcgatggcatcgccaccggtctgctggtgctgaaggacctgggcatccaggtggataggtacattgcctccgaggtgtgcgaggactccatcaccgtgggaatggtgcgtcatcagggcaagatcatgtacgtgggcgacgtgcggagcgtgacacagaagcatatccaggagtggggccctttcgacctggtgatcggcggcagcccttgcaatgacctgagcatcgtgaacccagcccggaagggcctgtacgagggaaccggcagactgttcttcgagttttacagactgctgcacgacgcccggcctaaggaaggcgacgaccggcccttcttttggctgttcgagaatgtggtggccatgggagtcagcgacaagcgggatattagccggttcctggagagcaaccccgtgatgatcgatgccaaggaagtgagcgccgcccaccgggccagatacttctggggcaatctgcctggcatgaacagacccctggccagcaccgtgaacgacaagctggagctgcaggagtgcctggagcacggccggatcgccaagttcagcaaggtgagaaccatcaccacccgaagcaacagcatcaaacaaggcaaggaccagcactttcctgtgttcatgaacgagaaggaggacatcctgtggtgtaccgagatggagagagtgttcgggttcccagtccactacacagatgtcagcaacatgtctagactggccagacagagactgctgggaagaagctggtccgtccctgtgatcagacacctgttcgcccctctgaaggagtacttcgcctgcgtgagcagcggcaacagcaacgccaacagccggggccccagcttctctagcggcctggtgccactgtccctgagagggagccacatgggccccatggagatctacaaaaccgtgagcgcctggaagcggcagcctgtgcgcgtgctgagcctgtttcggaatatcgataaagtcctgaaaagcctgggattcctggagagcggctctggctccggcggtggcaccctgaagtacgtggaggatgtgacaaacgtggtcagacgggatgtggagaagtggggccccttcgatctggtgtacggcagcacccaacccctgggcagctcttgtgaccggtgccctggctggtacatgtttcagttccaccggatcctgcagtacgccctgccgagacaggagtcccagcggccattcttttggattttcatggacaacttgctgctgaccgaggatgaccaggaaactaccactcggttcctgcagaccgaagccgtgaccctgcaggacgtgagaggccgggactaccagaacgccatgcgggtgtggtccaacatccctggactgaaaagcaagcacgcacctctgacccctaaagaagaggagtacctgcaggcccaggtgcggagcagaagcaagctggacgcccctaaggtggatctgctggtgaagaattgcctcctgcccctgagagagtacttcaagtatttcagccagaatagtctgcccctgggcggcccaagcagcggcgcccctcctcccagcggcggcagcccagccggctccccaacctctaccgaggagggcacctctgagtccgccacccccgagagcggccctggcacctccaccgagcccagcgagggcagcgcacccggcagccctgccggcagccccacctccacagaggagggaaccagcaccgagcccagcgaaggcagcgccccaggcaccagcaccgagcctagtgagggcggctctggcggcggcagcgcccaggagattaaacggatcaacaagatcagaagaagacttgtgaaagacagcaacaccaagaaggccggcaagacaggccccatgaaaaccctgctggttagagtgatgacacccgatctgagagagcggctggaaaacctgagaaagaagcctgaaaatatcccccagcccatcagcaatacatctagagccaacctgaataagctgctgaccgattacaccgaaatgaagaaggcgatcctgcatgtgtactgggaagagttccagaaggaccctgtgggcctgatgagccgggtggcccagcctgccagcaagaagatcgatcagaacaagctgaaacctgagatggacgagaagggcaacctgaccaccgccggctttgcctgctctcagtgtggccagcccctgttcgtgtacaagctggagcaggtgtctgagaagggcaaggcttacaccaactacttcggacggtgcaatgtggccgagcacgaaaagctgatcctgctggcccagctgaagcccgagaaggatagcgacgaagccgtgacatatagcctgggaaagtttgggcagagggccctggatttctacagcattcatgtgaccaaggagtccacccaccccgtgaagcccctggcccagatcgccggaaacagatacgcctccggacctgtgggaaaggccctgagcgacgcatgtatgggcacaatcgcctccttcctgtctaagtaccaggacatcatcatcgaacaccagaaggtggtgaagggcaaccagaagagactggagagcctgcgggagctggccggcaaggaaaacctggaataccctagcgtgaccctgccacctcagcctcacaccaaggagggcgttgatgcctacaacgaagtgatcgcccgggtgcgaatgtgggtgaacctgaacctgtggcagaagctgaagctaagcagagatgatgccaagcctctgctgagactgaagggattcccttcctttcctctggtcgagagacaggccaacgaagtggactggtgggacatggtgtgtaacgtgaagaagctgatcaacgagaaaaaggaggatggcaaggtgttttggcagaatctggctggctacaagagacaggaagccctgagaccatacctgagcagcgaggaagatcggaagaagggaaagaaattcgctcggtaccagctgggcgacctgctgctgcacctggaaaagaagcacggcgaggactggggaaaggtgtacgacgaggcctgggagcggattgacaagaaagtggaaggcctgagcaagcacatcaagctggaagaggaacggagaagcgaggacgcccagagcaaggccgccctgaccgactggctgcgggctaaggccagcttcgtgatcgagggcctgaaggaggccgacaaggacgagttctgcagatgcgagctgaagctgcagaagtggtacggggacctgcggggaaagcccttcgccatcgaagccgagaacagcatcctggacatcagcggcttcagcaagcagtacaactgtgccttcatctggcagaaggacggcgtgaagaagctgaacctgtacctgatcatcaactacttcaagggcggcaagctgcggttcaagaagatcaaacctgaagccttcgaagccaacagattctacaccgtgatcaacaaaaagagcggcgagatcgtgcccatggaggtgaacttcaacttcgacgaccccaacctgatcatcctgcctctggcctttggcaagagacagggcagagaattcatctggaacgacctgctgtccctggaaaccggcagcctgaagctggccaacggaagagtgatcgagaagacactgtacaacagaagaacccggcaggatgagcctgccctgttcgtggccctgaccttcgagcggcgggaggtcctggactcctccaatatcaaaccaatgaacctgatcggcgtggcaagaggcgaaaacatccccgccgtgatcgccctgaccgaccccgagggctgcccactgagccggtttaaggatagcctgggaaacccaacccacatcctgagaatcggcgagagctataaggagaagcagcggaccatccaggccaagaaggaggtggagcagcggagagccggcggctacagccggaagtacgccagcaaagccaagaatctggcagacgatatggtgagaaacaccgctagagatctgctgtactacgccgtgacccaggatgccatgctgatcttcgccaacctgagccggggcttcggccggcagggcaagcggaccttcatggccgagagacagtacacacggatggaggactggctgaccgccaagctggcctacgagggcctgagcaagacctacctgtccaagacactggcccagtacacctccaagacatgcagcaactgtgggtttaccatcaccagcgccgactacgacagggtgctggagaagctgaagaagacagcaacaggctggatgaccacaattaacggcaaggagctgaaggtggagggccagattacctactacaacagatacaagagacagaacgtagtcaaggacctgtccgtcgagctggatagactgagcgaagaatctgtgaacaacgacatctcctcctggacaaagggcagaagcggagaagctctgagcctcctgaagaaaagattctcccatagacccgtgcaggagaagttcgtgtgcctgaactgcggcttcgagacacacgcagccgagcaagccgccctgaacatcgccagatcctggctgttcctgcggagccaggagtacaagaaataccagacaaacaagacaaccggcaacaccgataagagagccttcgtcgagacctggcagtccttttaccggaagaagcttaaggaggtgtggaaacctgccgtgcggtctggcggatctggcggaggctccacaagcctgctgaccttcgaggacgtggccatcagcttcagcgaggaggagtggaagctgatggaccccgcccagaagatgctgtacagcgacgtgatgcaggagaactacgagaccgtgatcagcctgggcctgaagctgaagaaggacaccggcaacgaccagcccatcagcaccagcaccctggagatccaggccagcggctgcaaggtgctgaggaaggccaggatgaaggtggcccagaagaccaccagccccaagaaaaagagaaaagtctaagctgccttctgcggggcttgccttctggccatgcccttcttctctcccttgcacctgtacctcttggtctttgaataaagcctgagtaggaaggctagcaaaaaaaaaaaaaaaaaaaaaaaaaaaaaaaaaaaaaaaaaaaaaaaaaaaaaaaaaaaaaaaaaaaaaaaaaaaaaaaa

SEQ ID NO: 6430 - RNA, 5797 nt, synthetic construct
  source 1..5797: mol_type = other RNA
aggaaataagagagaaaagaagagtaagaagaaatataagagccaccatggcccctaagaagaagcgtaaagtgagccggatggaacgcctcgtctacgaggtgcggcagaagtgcagaaacatcgaggacatctgcatctcctgcggatctctgaacgtgaccctggagcacccactgttcatcggcggcatgtgccagaactgtaaaaactgttttctggagtgtgcctatcaatacgacgatgacggctaccagagctactgcaccatctgttgcggcggaagagaggtgctgatgtgtggaaataacaactgctgccggtgcttctgcgtggaatgcgtggacctgctggtgggccccggcgccgcccaggccgctattaaggaagatccttggaactgctacatgtgcggccacaagggcacatacggcctgctgagacggagagaggactggcctagcagactgcagatgttcttcgccaataaccacgaccaggagttcgacccccctaaggtgtaccctcccgtccccgccgagaagagaaagcccatccgggtcctgagcctgttcgatggcatcgccaccggtctgctggtgctgaaggacctgggcatccaggtggataggtacattgcctccgaggtgtgcgaggactccatcaccgtgggaatggtgcgtcatcagggcaagatcatgtacgtgggcgacgtgcggagcgtgacacagaagcatatccaggagtggggccctttcgacctggtgatcggcggcagcccttgcaatgacctgagcatcgtgaacccagcccggaagggcctgtacgagggaaccggcagactgttcttcgagttttacagactgctgcacgacgcccggcctaaggaaggcgacgaccggcccttcttttggctgttcgagaatgtggtggccatgggagtcagcgacaagcgggatattagccggttcctggagagcaaccccgtgatgatcgatgccaaggaagtgagcgccgcccaccgggccagatacttctggggcaatctgcctggcatgaacagacccctggccagcaccgtgaacgacaagctggagctgcaggagtgcctggagcacggccggatcgccaagttcagcaaggtgagaaccatcaccacccgaagcaacagcatcaaacaaggcaaggaccagcactttcctgtgttcatgaacgagaaggaggacatcctgtggtgtaccgagatggagagagtgttcgggttcccagtccactacacagatgtcagcaacatgtctagactggccagacagagactgctgggaagaagctggtccgtccctgtgatcagacacctgttcgcccctctgaaggagtacttcgcctgcgtgagcagcggcaacagcaacgccaacagccggggccccagcttctctagcggcctggtgccactgtccctgagagggagccacatgggccccatggagatctacaaaaccgtgagcgcctggaagcggcagcctgtgcgcgtgctgagcctgtttcggaatatcgataaagtcctgaaaagcctgggattcctggagagcggctctggctccggcggtggcaccctgaagtacgtggaggatgtgacaaacgtggtcagacgggatgtggagaagtggggccccttcgatctggtgtacggcagcacccaacccctgggcagctcttgtgaccggtgccctggctggtacatgtttcagttccaccggatcctgcagtacgccctgccgagacaggagtcccagcggccattcttttggattttcatggacaacttgctgctgaccgaggatgaccaggaaactaccactcggttcctgcagaccgaagccgtgaccctgcaggacgtgagaggccgggactaccagaacgccatgcgggtgtggtccaacatccctggactgaaaagcaagcacgcacctctgacccctaaagaagaggagtacctgcaggcccaggtgcggagcagaagcaagctggacgcccctaaggtggatctgctggtgaagaattgcctcctgcccctgagagagtacttcaagtatttcagccagaatagtctgcccctgggcggcccaagcagcggcgcccctcctcccagcggcggcagcccagccggctccccaacctctaccgaggagggcacctctgagtccgccacccccgagagcggccctggcacctccaccgagcccagcgagggcagcgcacccggcagccctgccggcagccccacctccacagaggagggaaccagcaccgagcccagcgaaggcagcgccccaggcaccagcaccgagcctagtgagggcggctctggcggcggcagcgcccaggagattaaacggatcaacaagatcagaagaagacttgtgaaagacagcaacaccaagaaggccggcaagacaggccccatgaaaaccctgctggttagagtgatgacacccgatctgagagagcggctggaaaacctgagaaagaagcctgaaaatatcccccagcccatcagcaatacatctagagccaacctgaataagctgctgaccgattacaccgaaatgaagaaggcgatcctgcatgtgtactgggaagagttccagaaggaccctgtgggcctgatgagccgggtggcccagcctgccagcaagaagatcgatcagaacaagctgaaacctgagatggacgagaagggcaacctgaccaccgccggctttgcctgctctcagtgtggccagcccctgttcgtgtacaagctggagcaggtgtctgagaagggcaaggcttacaccaactacttcggacggtgcaatgtggccgagcacgaaaagctgatcctgctggcccagctgaagcccgagaaggatagcgacgaagccgtgacatatagcctgggaaagtttgggcagagggccctggatttctacagcattcatgtgaccaaggagtccacccaccccgtgaagcccctggcccagatcgccggaaacagatacgcctccggacctgtgggaaaggccctgagcgacgcatgtatgggcacaatcgcctccttcctgtctaagtaccaggacatcatcatcgaacaccagaaggtggtgaagggcaaccagaagagactggagagcctgcgggagctggccggcaaggaaaacctggaataccctagcgtgaccctgccacctcagcctcacaccaaggagggcgttgatgcctacaacgaagtgatcgcccgggtgcgaatgtgggtgaacctgaacctgtggcagaagctgaagctaagcagagatgatgccaagcctctgctgagactgaagggattcccttcctttcctctggtcgagagacaggccaacgaagtggactggtgggacatggtgtgtaacgtgaagaagctgatcaacgagaaaaaggaggatggcaaggtgttttggcagaatctggctggctacaagagacaggaagccctgagaccatacctgagcagcgaggaagatcggaagaagggaaagaaattcgctcggtaccagctgggcgacctgctgctgcacctggaaaagaagcacggcgaggactggggaaaggtgtacgacgaggcctgggagcggattgacaagaaagtggaaggcctgagcaagcacatcaagctggaagaggaacggagaagcgaggacgcccagagcaaggccgccctgaccgactggctgcgggctaaggccagcttcgtgatcgagggcctgaaggaggccgacaaggacgagttctgcagatgcgagctgaagctgcagaagtggtacggggacctgcggggaaagcccttcgccatcgaagccgagaacagcatcctggacatcagcggcttcagcaagcagtacaactgtgccttcatctggcagaaggacggcgtgaagaagctgaacctgtacctgatcatcaactacttcaagggcggcaagctgcggttcaagaagatcaaacctgaagccttcgaagccaacagattctacaccgtgatcaacaaaaagagcggcgagatcgtgcccatggaggtgaacttcaacttcgacgaccccaacctgatcatcctgcctctggcctttggcaagagacagggcagagaattcatctggaacgacctgctgtccctggaaaccggcagcctgaagctggccaacggaagagtgatcgagaagacactgtacaacagaagaacccggcaggatgagcctgccctgttcgtggccctgaccttcgagcggcgggaggtcctggactcctccaatatcaaaccaatgaacctgatcggcgtggcaagaggcgaaaacatccccgccgtgatcgccctgaccgaccccgagggctgcccactgagccggtttaaggatagcctgggaaacccaacccacatcctgagaatcggcgagagctataaggagaagcagcggaccatccaggccaagaaggaggtggagcagcggagagccggcggctacagccggaagtacgccagcaaagccaagaatctggcagacgatatggtgagaaacaccgctagagatctgctgtactacgccgtgacccaggatgccatgctgatcttcgccaacctgagccggggcttcggccggcagggcaagcggaccttcatggccgagagacagtacacacggatggaggactggctgaccgccaagctggcctacgagggcctgagcaagacctacctgtccaagacactggcccagtacacctccaagacatgcagcaactgtgggtttaccatcaccagcgccgactacgacagggtgctggagaagctgaagaagacagcaacaggctggatgaccacaattaacggcaaggagctgaaggtggagggccagattacctactacaacagatacaagagacagaacgtagtcaaggacctgtccgtcgagctggatagactgagcgaagaatctgtgaacaacgacatctcctcctggacaaagggcagaagcggagaagctctgagcctcctgaagaaaagattctcccatagacccgtgcaggagaagttcgtgtgcctgaactgcggcttcgagacacacgcagccgagcaagccgccctgaacatcgccagatcctggctgttcctgcggagccaggagtacaagaaataccagacaaacaagacaaccggcaacaccgataagagagccttcgtcgagacctggcagtccttttaccggaagaagcttaaggaggtgtggaaacctgccgtgcggtctggcggatctggcggaggctccacaagcagggtggtgttcgaggacgtggccgtgtacttcagccaggaggagtggggcctgctggacgaggcccagaggcacctgtaccacgccgtgatgaccgagaacttcgccctggtgaccagcctgggctgctggcacggcgcccagtacgaggaggcccccagcgagcagagcgtgagcgtgggcatgagcgaggtgggcacccccaagcccgaccccagcaccaagaaggcccagccctacgagaccagccccaagaaaaagagaaaagtctaagctgccttctgcggggcttgccttctggccatgcccttcttctctcccttgcacctgtacctcttggtctttgaataaagcctgagtaggaaggctagcaaaaaaaaaaaaaaaaaaaaaaaaaaaaaaaaaaaaaaaaaaaaaaaaaaaaaaaaaaaaaaaaaaaaaaaaaaaaaaaa

SEQ ID NO: 6431 - RNA, 5797 nt, synthetic construct
  source 1..5797: mol_type = other RNA
aggaaataagagagaaaagaagagtaagaagaaatataagagccaccatggcccctaagaagaagcgtaaagtgagccggatggaacgcctcgtctacgaggtgcggcagaagtgcagaaacatcgaggacatctgcatctcctgcggatctctgaacgtgaccctggagcacccactgttcatcggcggcatgtgccagaactgtaaaaactgttttctggagtgtgcctatcaatacgacgatgacggctaccagagctactgcaccatctgttgcggcggaagagaggtgctgatgtgtggaaataacaactgctgccggtgcttctgcgtggaatgcgtggacctgctggtgggccccggcgccgcccaggccgctattaaggaagatccttggaactgctacatgtgcggccacaagggcacatacggcctgctgagacggagagaggactggcctagcagactgcagatgttcttcgccaataaccacgaccaggagttcgacccccctaaggtgtaccctcccgtccccgccgagaagagaaagcccatccgggtcctgagcctgttcgatggcatcgccaccggtctgctggtgctgaaggacctgggcatccaggtggataggtacattgcctccgaggtgtgcgaggactccatcaccgtgggaatggtgcgtcatcagggcaagatcatgtacgtgggcgacgtgcggagcgtgacacagaagcatatccaggagtggggccctttcgacctggtgatcggcggcagcccttgcaatgacctgagcatcgtgaacccagcccggaagggcctgtacgagggaaccggcagactgttcttcgagttttacagactgctgcacgacgcccggcctaaggaaggcgacgaccggcccttcttttggctgttcgagaatgtggtggccatgggagtcagcgacaagcgggatattagccggttcctggagagcaaccccgtgatgatcgatgccaaggaagtgagcgccgcccaccgggccagatacttctggggcaatctgcctggcatgaacagacccctggccagcaccgtgaacgacaagctggagctgcaggagtgcctggagcacggccggatcgccaagttcagcaaggtgagaaccatcaccacccgaagcaacagcatcaaacaaggcaaggaccagcactttcctgtgttcatgaacgagaaggaggacatcctgtggtgtaccgagatggagagagtgttcgggttcccagtccactacacagatgtcagcaacatgtctagactggccagacagagactgctgggaagaagctggtccgtccctgtgatcagacacctgttcgcccctctgaaggagtacttcgcctgcgtgagcagcggcaacagcaacgccaacagccggggccccagcttctctagcggcctggtgccactgtccctgagagggagccacatgggccccatggagatctacaaaaccgtgagcgcctggaagcggcagcctgtgcgcgtgctgagcctgtttcggaatatcgataaagtcctgaaaagcctgggattcctggagagcggctctggctccggcggtggcaccctgaagtacgtggaggatgtgacaaacgtggtcagacgggatgtggagaagtggggccccttcgatctggtgtacggcagcacccaacccctgggcagctcttgtgaccggtgccctggctggtacatgtttcagttccaccggatcctgcagtacgccctgccgagacaggagtcccagcggccattcttttggattttcatggacaacttgctgctgaccgaggatgaccaggaaactaccactcggttcctgcagaccgaagccgtgaccctgcaggacgtgagaggccgggactaccagaacgccatgcgggtgtggtccaacatccctggactgaaaagcaagcacgcacctctgacccctaaagaagaggagtacctgcaggcccaggtgcggagcagaagcaagctggacgcccctaaggtggatctgctggtgaagaattgcctcctgcccctgagagagtacttcaagtatttcagccagaatagtctgcccctgggcggcccaagcagcggcgcccctcctcccagcggcggcagcccagccggctccccaacctctaccgaggagggcacctctgagtccgccacccccgagagcggccctggcacctccaccgagcccagcgagggcagcgcacccggcagccctgccggcagccccacctccacagaggagggaaccagcaccgagcccagcgaaggcagcgccccaggcaccagcaccgagcctagtgagggcggctctggcggcggcagcgcccaggagattaaacggatcaacaagatcagaagaagacttgtgaaagacagcaacaccaagaaggccggcaagacaggccccatgaaaaccctgctggttagagtgatgacacccgatctgagagagcggctggaaaacctgagaaagaagcctgaaaatatcccccagcccatcagcaatacatctagagccaacctgaataagctgctgaccgattacaccgaaatgaagaaggcgatcctgcatgtgtactgggaagagttccagaaggaccctgtgggcctgatgagccgggtggcccagcctgccagcaagaagatcgatcagaacaagctgaaacctgagatggacgagaagggcaacctgaccaccgccggctttgcctgctctcagtgtggccagcccctgttcgtgtacaagctggagcaggtgtctgagaagggcaaggcttacaccaactacttcggacggtgcaatgtggccgagcacgaaaagctgatcctgctggcccagctgaagcccgagaaggatagcgacgaagccgtgacatatagcctgggaaagtttgggcagagggccctggatttctacagcattcatgtgaccaaggagtccacccaccccgtgaagcccctggcccagatcgccggaaacagatacgcctccggacctgtgggaaaggccctgagcgacgcatgtatgggcacaatcgcctccttcctgtctaagtaccaggacatcatcatcgaacaccagaaggtggtgaagggcaaccagaagagactggagagcctgcgggagctggccggcaaggaaaacctggaataccctagcgtgaccctgccacctcagcctcacaccaaggagggcgttgatgcctacaacgaagtgatcgcccgggtgcgaatgtgggtgaacctgaacctgtggcagaagctgaagctaagcagagatgatgccaagcctctgctgagactgaagggattcccttcctttcctctggtcgagagacaggccaacgaagtggactggtgggacatggtgtgtaacgtgaagaagctgatcaacgagaaaaaggaggatggcaaggtgttttggcagaatctggctggctacaagagacaggaagccctgagaccatacctgagcagcgaggaagatcggaagaagggaaagaaattcgctcggtaccagctgggcgacctgctgctgcacctggaaaagaagcacggcgaggactggggaaaggtgtacgacgaggcctgggagcggattgacaagaaagtggaaggcctgagcaagcacatcaagctggaagaggaacggagaagcgaggacgcccagagcaaggccgccctgaccgactggctgcgggctaaggccagcttcgtgatcgagggcctgaaggaggccgacaaggacgagttctgcagatgcgagctgaagctgcagaagtggtacggggacctgcggggaaagcccttcgccatcgaagccgagaacagcatcctggacatcagcggcttcagcaagcagtacaactgtgccttcatctggcagaaggacggcgtgaagaagctgaacctgtacctgatcatcaactacttcaagggcggcaagctgcggttcaagaagatcaaacctgaagccttcgaagccaacagattctacaccgtgatcaacaaaaagagcggcgagatcgtgcccatggaggtgaacttcaacttcgacgaccccaacctgatcatcctgcctctggcctttggcaagagacagggcagagaattcatctggaacgacctgctgtccctggaaaccggcagcctgaagctggccaacggaagagtgatcgagaagacactgtacaacagaagaacccggcaggatgagcctgccctgttcgtggccctgaccttcgagcggcgggaggtcctggactcctccaatatcaaaccaatgaacctgatcggcgtggcaagaggcgaaaacatccccgccgtgatcgccctgaccgaccccgagggctgcccactgagccggtttaaggatagcctgggaaacccaacccacatcctgagaatcggcgagagctataaggagaagcagcggaccatccaggccaagaaggaggtggagcagcggagagccggcggctacagccggaagtacgccagcaaagccaagaatctggcagacgatatggtgagaaacaccgctagagatctgctgtactacgccgtgacccaggatgccatgctgatcttcgccaacctgagccggggcttcggccggcagggcaagcggaccttcatggccgagagacagtacacacggatggaggactggctgaccgccaagctggcctacgagggcctgagcaagacctacctgtccaagacactggcccagtacacctccaagacatgcagcaactgtgggtttaccatcaccagcgccgactacgacagggtgctggagaagctgaagaagacagcaacaggctggatgaccacaattaacggcaaggagctgaaggtggagggccagattacctactacaacagatacaagagacagaacgtagtcaaggacctgtccgtcgagctggatagactgagcgaagaatctgtgaacaacgacatctcctcctggacaaagggcagaagcggagaagctctgagcctcctgaagaaaagattctcccatagacccgtgcaggagaagttcgtgtgcctgaactgcggcttcgagacacacgcagccgagcaagccgccctgaacatcgccagatcctggctgttcctgcggagccaggagtacaagaaataccagacaaacaagacaaccggcaacaccgataagagagccttcgtcgagacctggcagtccttttaccggaagaagcttaaggaggtgtggaaacctgccgtgcggtctggcggatctggcggaggctccacaagcatggtgaccttcgaggacgtggccgtgcacttcaccaagaccgagtggaccggcctgagccccgcccagagggccctgtacaggagcgtgatgctggagaacttcggcaacctgaccgccctgggctaccccgtgcccaagcccgccctgatcagcctgctggagggcggcgacatggcctggggcctggaggcccaggacgacgcccccgccgagaggaccaagaacatctgcaagggcaggaccagccccaagaaaaagagaaaagtctaagctgccttctgcggggcttgccttctggccatgcccttcttctctcccttgcacctgtacctcttggtctttgaataaagcctgagtaggaaggctagcaaaaaaaaaaaaaaaaaaaaaaaaaaaaaaaaaaaaaaaaaaaaaaaaaaaaaaaaaaaaaaaaaaaaaaaaaaaaaaaa

SEQ ID NO: 6432 - RNA, 5797 nt, synthetic construct
  source 1..5797: mol_type = other RNA
aggaaataagagagaaaagaagagtaagaagaaatataagagccaccatggcccctaagaagaagcgtaaagtgagccggatggaacgcctcgtctacgaggtgcggcagaagtgcagaaacatcgaggacatctgcatctcctgcggatctctgaacgtgaccctggagcacccactgttcatcggcggcatgtgccagaactgtaaaaactgttttctggagtgtgcctatcaatacgacgatgacggctaccagagctactgcaccatctgttgcggcggaagagaggtgctgatgtgtggaaataacaactgctgccggtgcttctgcgtggaatgcgtggacctgctggtgggccccggcgccgcccaggccgctattaaggaagatccttggaactgctacatgtgcggccacaagggcacatacggcctgctgagacggagagaggactggcctagcagactgcagatgttcttcgccaataaccacgaccaggagttcgacccccctaaggtgtaccctcccgtccccgccgagaagagaaagcccatccgggtcctgagcctgttcgatggcatcgccaccggtctgctggtgctgaaggacctgggcatccaggtggataggtacattgcctccgaggtgtgcgaggactccatcaccgtgggaatggtgcgtcatcagggcaagatcatgtacgtgggcgacgtgcggagcgtgacacagaagcatatccaggagtggggccctttcgacctggtgatcggcggcagcccttgcaatgacctgagcatcgtgaacccagcccggaagggcctgtacgagggaaccggcagactgttcttcgagttttacagactgctgcacgacgcccggcctaaggaaggcgacgaccggcccttcttttggctgttcgagaatgtggtggccatgggagtcagcgacaagcgggatattagccggttcctggagagcaaccccgtgatgatcgatgccaaggaagtgagcgccgcccaccgggccagatacttctggggcaatctgcctggcatgaacagacccctggccagcaccgtgaacgacaagctggagctgcaggagtgcctggagcacggccggatcgccaagttcagcaaggtgagaaccatcaccacccgaagcaacagcatcaaacaaggcaaggaccagcactttcctgtgttcatgaacgagaaggaggacatcctgtggtgtaccgagatggagagagtgttcgggttcccagtccactacacagatgtcagcaacatgtctagactggccagacagagactgctgggaagaagctggtccgtccctgtgatcagacacctgttcgcccctctgaaggagtacttcgcctgcgtgagcagcggcaacagcaacgccaacagccggggccccagcttctctagcggcctggtgccactgtccctgagagggagccacatgggccccatggagatctacaaaaccgtgagcgcctggaagcggcagcctgtgcgcgtgctgagcctgtttcggaatatcgataaagtcctgaaaagcctgggattcctggagagcggctctggctccggcggtggcaccctgaagtacgtggaggatgtgacaaacgtggtcagacgggatgtggagaagtggggccccttcgatctggtgtacggcagcacccaacccctgggcagctcttgtgaccggtgccctggctggtacatgtttcagttccaccggatcctgcagtacgccctgccgagacaggagtcccagcggccattcttttggattttcatggacaacttgctgctgaccgaggatgaccaggaaactaccactcggttcctgcagaccgaagccgtgaccctgcaggacgtgagaggccgggactaccagaacgccatgcgggtgtggtccaacatccctggactgaaaagcaagcacgcacctctgacccctaaagaagaggagtacctgcaggcccaggtgcggagcagaagcaagctggacgcccctaaggtggatctgctggtgaagaattgcctcctgcccctgagagagtacttcaagtatttcagccagaatagtctgcccctgggcggcccaagcagcggcgcccctcctcccagcggcggcagcccagccggctccccaacctctaccgaggagggcacctctgagtccgccacccccgagagcggccctggcacctccaccgagcccagcgagggcagcgcacccggcagccctgccggcagccccacctccacagaggagggaaccagcaccgagcccagcgaaggcagcgccccaggcaccagcaccgagcctagtgagggcggctctggcggcggcagcgcccaggagattaaacggatcaacaagatcagaagaagacttgtgaaagacagcaacaccaagaaggccggcaagacaggccccatgaaaaccctgctggttagagtgatgacacccgatctgagagagcggctggaaaacctgagaaagaagcctgaaaatatcccccagcccatcagcaatacatctagagccaacctgaataagctgctgaccgattacaccgaaatgaagaaggcgatcctgcatgtgtactgggaagagttccagaaggaccctgtgggcctgatgagccgggtggcccagcctgccagcaagaagatcgatcagaacaagctgaaacctgagatggacgagaagggcaacctgaccaccgccggctttgcctgctctcagtgtggccagcccctgttcgtgtacaagctggagcaggtgtctgagaagggcaaggcttacaccaactacttcggacggtgcaatgtggccgagcacgaaaagctgatcctgctggcccagctgaagcccgagaaggatagcgacgaagccgtgacatatagcctgggaaagtttgggcagagggccctggatttctacagcattcatgtgaccaaggagtccacccaccccgtgaagcccctggcccagatcgccggaaacagatacgcctccggacctgtgggaaaggccctgagcgacgcatgtatgggcacaatcgcctccttcctgtctaagtaccaggacatcatcatcgaacaccagaaggtggtgaagggcaaccagaagagactggagagcctgcgggagctggccggcaaggaaaacctggaataccctagcgtgaccctgccacctcagcctcacaccaaggagggcgttgatgcctacaacgaagtgatcgcccgggtgcgaatgtgggtgaacctgaacctgtggcagaagctgaagctaagcagagatgatgccaagcctctgctgagactgaagggattcccttcctttcctctggtcgagagacaggccaacgaagtggactggtgggacatggtgtgtaacgtgaagaagctgatcaacgagaaaaaggaggatggcaaggtgttttggcagaatctggctggctacaagagacaggaagccctgagaccatacctgagcagcgaggaagatcggaagaagggaaagaaattcgctcggtaccagctgggcgacctgctgctgcacctggaaaagaagcacggcgaggactggggaaaggtgtacgacgaggcctgggagcggattgacaagaaagtggaaggcctgagcaagcacatcaagctggaagaggaacggagaagcgaggacgcccagagcaaggccgccctgaccgactggctgcgggctaaggccagcttcgtgatcgagggcctgaaggaggccgacaaggacgagttctgcagatgcgagctgaagctgcagaagtggtacggggacctgcggggaaagcccttcgccatcgaagccgagaacagcatcctggacatcagcggcttcagcaagcagtacaactgtgccttcatctggcagaaggacggcgtgaagaagctgaacctgtacctgatcatcaactacttcaagggcggcaagctgcggttcaagaagatcaaacctgaagccttcgaagccaacagattctacaccgtgatcaacaaaaagagcggcgagatcgtgcccatggaggtgaacttcaacttcgacgaccccaacctgatcatcctgcctctggcctttggcaagagacagggcagagaattcatctggaacgacctgctgtccctggaaaccggcagcctgaagctggccaacggaagagtgatcgagaagacactgtacaacagaagaacccggcaggatgagcctgccctgttcgtggccctgaccttcgagcggcgggaggtcctggactcctccaatatcaaaccaatgaacctgatcggcgtggcaagaggcgaaaacatccccgccgtgatcgccctgaccgaccccgagggctgcccactgagccggtttaaggatagcctgggaaacccaacccacatcctgagaatcggcgagagctataaggagaagcagcggaccatccaggccaagaaggaggtggagcagcggagagccggcggctacagccggaagtacgccagcaaagccaagaatctggcagacgatatggtgagaaacaccgctagagatctgctgtactacgccgtgacccaggatgccatgctgatcttcgccaacctgagccggggcttcggccggcagggcaagcggaccttcatggccgagagacagtacacacggatggaggactggctgaccgccaagctggcctacgagggcctgagcaagacctacctgtccaagacactggcccagtacacctccaagacatgcagcaactgtgggtttaccatcaccagcgccgactacgacagggtgctggagaagctgaagaagacagcaacaggctggatgaccacaattaacggcaaggagctgaaggtggagggccagattacctactacaacagatacaagagacagaacgtagtcaaggacctgtccgtcgagctggatagactgagcgaagaatctgtgaacaacgacatctcctcctggacaaagggcagaagcggagaagctctgagcctcctgaagaaaagattctcccatagacccgtgcaggagaagttcgtgtgcctgaactgcggcttcgagacacacgcagccgagcaagccgccctgaacatcgccagatcctggctgttcctgcggagccaggagtacaagaaataccagacaaacaagacaaccggcaacaccgataagagagccttcgtcgagacctggcagtccttttaccggaagaagcttaaggaggtgtggaaacctgccgtgcggtctggcggatctggcggaggctccacaagcggcgagagcctggagagcagggtgaccctgggcagcctgaccgccgagagccaggagctgctgaccttcaaggacgtgagcgtggacttcacccaggaggagtggggccagctggcccccgcccacaggaacctgtacagggaggtgatgctggagaactacggcaacctggtgagcgtgggctaccagctgagcaagcccggcgtgatcagccagctggagaagggcgaggagccctggctgaccagccccaagaaaaagagaaaagtctaagctgccttctgcggggcttgccttctggccatgcccttcttctctcccttgcacctgtacctcttggtctttgaataaagcctgagtaggaaggctagcaaaaaaaaaaaaaaaaaaaaaaaaaaaaaaaaaaaaaaaaaaaaaaaaaaaaaaaaaaaaaaaaaaaaaaaaaaaaaaaa

SEQ ID NO: 6433 - RNA, 5797 nt, synthetic construct
  source 1..5797: mol_type = other RNA
aggaaataagagagaaaagaagagtaagaagaaatataagagccaccatggcccctaagaagaagcgtaaagtgagccggatggaacgcctcgtctacgaggtgcggcagaagtgcagaaacatcgaggacatctgcatctcctgcggatctctgaacgtgaccctggagcacccactgttcatcggcggcatgtgccagaactgtaaaaactgttttctggagtgtgcctatcaatacgacgatgacggctaccagagctactgcaccatctgttgcggcggaagagaggtgctgatgtgtggaaataacaactgctgccggtgcttctgcgtggaatgcgtggacctgctggtgggccccggcgccgcccaggccgctattaaggaagatccttggaactgctacatgtgcggccacaagggcacatacggcctgctgagacggagagaggactggcctagcagactgcagatgttcttcgccaataaccacgaccaggagttcgacccccctaaggtgtaccctcccgtccccgccgagaagagaaagcccatccgggtcctgagcctgttcgatggcatcgccaccggtctgctggtgctgaaggacctgggcatccaggtggataggtacattgcctccgaggtgtgcgaggactccatcaccgtgggaatggtgcgtcatcagggcaagatcatgtacgtgggcgacgtgcggagcgtgacacagaagcatatccaggagtggggccctttcgacctggtgatcggcggcagcccttgcaatgacctgagcatcgtgaacccagcccggaagggcctgtacgagggaaccggcagactgttcttcgagttttacagactgctgcacgacgcccggcctaaggaaggcgacgaccggcccttcttttggctgttcgagaatgtggtggccatgggagtcagcgacaagcgggatattagccggttcctggagagcaaccccgtgatgatcgatgccaaggaagtgagcgccgcccaccgggccagatacttctggggcaatctgcctggcatgaacagacccctggccagcaccgtgaacgacaagctggagctgcaggagtgcctggagcacggccggatcgccaagttcagcaaggtgagaaccatcaccacccgaagcaacagcatcaaacaaggcaaggaccagcactttcctgtgttcatgaacgagaaggaggacatcctgtggtgtaccgagatggagagagtgttcgggttcccagtccactacacagatgtcagcaacatgtctagactggccagacagagactgctgggaagaagctggtccgtccctgtgatcagacacctgttcgcccctctgaaggagtacttcgcctgcgtgagcagcggcaacagcaacgccaacagccggggccccagcttctctagcggcctggtgccactgtccctgagagggagccacatgggccccatggagatctacaaaaccgtgagcgcctggaagcggcagcctgtgcgcgtgctgagcctgtttcggaatatcgataaagtcctgaaaagcctgggattcctggagagcggctctggctccggcggtggcaccctgaagtacgtggaggatgtgacaaacgtggtcagacgggatgtggagaagtggggccccttcgatctggtgtacggcagcacccaacccctgggcagctcttgtgaccggtgccctggctggtacatgtttcagttccaccggatcctgcagtacgccctgccgagacaggagtcccagcggccattcttttggattttcatggacaacttgctgctgaccgaggatgaccaggaaactaccactcggttcctgcagaccgaagccgtgaccctgcaggacgtgagaggccgggactaccagaacgccatgcgggtgtggtccaacatccctggactgaaaagcaagcacgcacctctgacccctaaagaagaggagtacctgcaggcccaggtgcggagcagaagcaagctggacgcccctaaggtggatctgctggtgaagaattgcctcctgcccctgagagagtacttcaagtatttcagccagaatagtctgcccctgggcggcccaagcagcggcgcccctcctcccagcggcggcagcccagccggctccccaacctctaccgaggagggcacctctgagtccgccacccccgagagcggccctggcacctccaccgagcccagcgagggcagcgcacccggcagccctgccggcagccccacctccacagaggagggaaccagcaccgagcccagcgaaggcagcgccccaggcaccagcaccgagcctagtgagggcggctctggcggcggcagcgcccaggagattaaacggatcaacaagatcagaagaagacttgtgaaagacagcaacaccaagaaggccggcaagacaggccccatgaaaaccctgctggttagagtgatgacacccgatctgagagagcggctggaaaacctgagaaagaagcctgaaaatatcccccagcccatcagcaatacatctagagccaacctgaataagctgctgaccgattacaccgaaatgaagaaggcgatcctgcatgtgtactgggaagagttccagaaggaccctgtgggcctgatgagccgggtggcccagcctgccagcaagaagatcgatcagaacaagctgaaacctgagatggacgagaagggcaacctgaccaccgccggctttgcctgctctcagtgtggccagcccctgttcgtgtacaagctggagcaggtgtctgagaagggcaaggcttacaccaactacttcggacggtgcaatgtggccgagcacgaaaagctgatcctgctggcccagctgaagcccgagaaggatagcgacgaagccgtgacatatagcctgggaaagtttgggcagagggccctggatttctacagcattcatgtgaccaaggagtccacccaccccgtgaagcccctggcccagatcgccggaaacagatacgcctccggacctgtgggaaaggccctgagcgacgcatgtatgggcacaatcgcctccttcctgtctaagtaccaggacatcatcatcgaacaccagaaggtggtgaagggcaaccagaagagactggagagcctgcgggagctggccggcaaggaaaacctggaataccctagcgtgaccctgccacctcagcctcacaccaaggagggcgttgatgcctacaacgaagtgatcgcccgggtgcgaatgtgggtgaacctgaacctgtggcagaagctgaagctaagcagagatgatgccaagcctctgctgagactgaagggattcccttcctttcctctggtcgagagacaggccaacgaagtggactggtgggacatggtgtgtaacgtgaagaagctgatcaacgagaaaaaggaggatggcaaggtgttttggcagaatctggctggctacaagagacaggaagccctgagaccatacctgagcagcgaggaagatcggaagaagggaaagaaattcgctcggtaccagctgggcgacctgctgctgcacctggaaaagaagcacggcgaggactggggaaaggtgtacgacgaggcctgggagcggattgacaagaaagtggaaggcctgagcaagcacatcaagctggaagaggaacggagaagcgaggacgcccagagcaaggccgccctgaccgactggctgcgggctaaggccagcttcgtgatcgagggcctgaaggaggccgacaaggacgagttctgcagatgcgagctgaagctgcagaagtggtacggggacctgcggggaaagcccttcgccatcgaagccgagaacagcatcctggacatcagcggcttcagcaagcagtacaactgtgccttcatctggcagaaggacggcgtgaagaagctgaacctgtacctgatcatcaactacttcaagggcggcaagctgcggttcaagaagatcaaacctgaagccttcgaagccaacagattctacaccgtgatcaacaaaaagagcggcgagatcgtgcccatggaggtgaacttcaacttcgacgaccccaacctgatcatcctgcctctggcctttggcaagagacagggcagagaattcatctggaacgacctgctgtccctggaaaccggcagcctgaagctggccaacggaagagtgatcgagaagacactgtacaacagaagaacccggcaggatgagcctgccctgttcgtggccctgaccttcgagcggcgggaggtcctggactcctccaatatcaaaccaatgaacctgatcggcgtggcaagaggcgaaaacatccccgccgtgatcgccctgaccgaccccgagggctgcccactgagccggtttaaggatagcctgggaaacccaacccacatcctgagaatcggcgagagctataaggagaagcagcggaccatccaggccaagaaggaggtggagcagcggagagccggcggctacagccggaagtacgccagcaaagccaagaatctggcagacgatatggtgagaaacaccgctagagatctgctgtactacgccgtgacccaggatgccatgctgatcttcgccaacctgagccggggcttcggccggcagggcaagcggaccttcatggccgagagacagtacacacggatggaggactggctgaccgccaagctggcctacgagggcctgagcaagacctacctgtccaagacactggcccagtacacctccaagacatgcagcaactgtgggtttaccatcaccagcgccgactacgacagggtgctggagaagctgaagaagacagcaacaggctggatgaccacaattaacggcaaggagctgaaggtggagggccagattacctactacaacagatacaagagacagaacgtagtcaaggacctgtccgtcgagctggatagactgagcgaagaatctgtgaacaacgacatctcctcctggacaaagggcagaagcggagaagctctgagcctcctgaagaaaagattctcccatagacccgtgcaggagaagttcgtgtgcctgaactgcggcttcgagacacacgcagccgagcaagccgccctgaacatcgccagatcctggctgttcctgcggagccaggagtacaagaaataccagacaaacaagacaaccggcaacaccgataagagagccttcgtcgagacctggcagtccttttaccggaagaagcttaaggaggtgtggaaacctgccgtgcggtctggcggatctggcggaggctccacaagcgccgccggcagggtgaccttcgaggacgtgaccgtgagcttcaccaagggcgagtggcagcagctgaaccccgagcagagggagctgtacagggacgtgatgctggagaactacggcaacctggtgagcgtgggcctggaggagaccagcaagcccagcgtgatcctgaggctggaggagggcaaggagccctggagcgaggaggaggtgctgaggggcggcaggcccgagaagaactgggacaccagccccaagaaaaagagaaaagtctaagctgccttctgcggggcttgccttctggccatgcccttcttctctcccttgcacctgtacctcttggtctttgaataaagcctgagtaggaaggctagcaaaaaaaaaaaaaaaaaaaaaaaaaaaaaaaaaaaaaaaaaaaaaaaaaaaaaaaaaaaaaaaaaaaaaaaaaaaaaaaa

SEQ ID NO: 6434 - RNA, 5797 nt, synthetic construct
  source 1..5797: mol_type = other RNA
aggaaataagagagaaaagaagagtaagaagaaatataagagccaccatggcccctaagaagaagcgtaaagtgagccggatggaacgcctcgtctacgaggtgcggcagaagtgcagaaacatcgaggacatctgcatctcctgcggatctctgaacgtgaccctggagcacccactgttcatcggcggcatgtgccagaactgtaaaaactgttttctggagtgtgcctatcaatacgacgatgacggctaccagagctactgcaccatctgttgcggcggaagagaggtgctgatgtgtggaaataacaactgctgccggtgcttctgcgtggaatgcgtggacctgctggtgggccccggcgccgcccaggccgctattaaggaagatccttggaactgctacatgtgcggccacaagggcacatacggcctgctgagacggagagaggactggcctagcagactgcagatgttcttcgccaataaccacgaccaggagttcgacccccctaaggtgtaccctcccgtccccgccgagaagagaaagcccatccgggtcctgagcctgttcgatggcatcgccaccggtctgctggtgctgaaggacctgggcatccaggtggataggtacattgcctccgaggtgtgcgaggactccatcaccgtgggaatggtgcgtcatcagggcaagatcatgtacgtgggcgacgtgcggagcgtgacacagaagcatatccaggagtggggccctttcgacctggtgatcggcggcagcccttgcaatgacctgagcatcgtgaacccagcccggaagggcctgtacgagggaaccggcagactgttcttcgagttttacagactgctgcacgacgcccggcctaaggaaggcgacgaccggcccttcttttggctgttcgagaatgtggtggccatgggagtcagcgacaagcgggatattagccggttcctggagagcaaccccgtgatgatcgatgccaaggaagtgagcgccgcccaccgggccagatacttctggggcaatctgcctggcatgaacagacccctggccagcaccgtgaacgacaagctggagctgcaggagtgcctggagcacggccggatcgccaagttcagcaaggtgagaaccatcaccacccgaagcaacagcatcaaacaaggcaaggaccagcactttcctgtgttcatgaacgagaaggaggacatcctgtggtgtaccgagatggagagagtgttcgggttcccagtccactacacagatgtcagcaacatgtctagactggccagacagagactgctgggaagaagctggtccgtccctgtgatcagacacctgttcgcccctctgaaggagtacttcgcctgcgtgagcagcggcaacagcaacgccaacagccggggccccagcttctctagcggcctggtgccactgtccctgagagggagccacatgggccccatggagatctacaaaaccgtgagcgcctggaagcggcagcctgtgcgcgtgctgagcctgtttcggaatatcgataaagtcctgaaaagcctgggattcctggagagcggctctggctccggcggtggcaccctgaagtacgtggaggatgtgacaaacgtggtcagacgggatgtggagaagtggggccccttcgatctggtgtacggcagcacccaacccctgggcagctcttgtgaccggtgccctggctggtacatgtttcagttccaccggatcctgcagtacgccctgccgagacaggagtcccagcggccattcttttggattttcatggacaacttgctgctgaccgaggatgaccaggaaactaccactcggttcctgcagaccgaagccgtgaccctgcaggacgtgagaggccgggactaccagaacgccatgcgggtgtggtccaacatccctggactgaaaagcaagcacgcacctctgacccctaaagaagaggagtacctgcaggcccaggtgcggagcagaagcaagctggacgcccctaaggtggatctgctggtgaagaattgcctcctgcccctgagagagtacttcaagtatttcagccagaatagtctgcccctgggcggcccaagcagcggcgcccctcctcccagcggcggcagcccagccggctccccaacctctaccgaggagggcacctctgagtccgccacccccgagagcggccctggcacctccaccgagcccagcgagggcagcgcacccggcagccctgccggcagccccacctccacagaggagggaaccagcaccgagcccagcgaaggcagcgccccaggcaccagcaccgagcctagtgagggcggctctggcggcggcagcgcccaggagattaaacggatcaacaagatcagaagaagacttgtgaaagacagcaacaccaagaaggccggcaagacaggccccatgaaaaccctgctggttagagtgatgacacccgatctgagagagcggctggaaaacctgagaaagaagcctgaaaatatcccccagcccatcagcaatacatctagagccaacctgaataagctgctgaccgattacaccgaaatgaagaaggcgatcctgcatgtgtactgggaagagttccagaaggaccctgtgggcctgatgagccgggtggcccagcctgccagcaagaagatcgatcagaacaagctgaaacctgagatggacgagaagggcaacctgaccaccgccggctttgcctgctctcagtgtggccagcccctgttcgtgtacaagctggagcaggtgtctgagaagggcaaggcttacaccaactacttcggacggtgcaatgtggccgagcacgaaaagctgatcctgctggcccagctgaagcccgagaaggatagcgacgaagccgtgacatatagcctgggaaagtttgggcagagggccctggatttctacagcattcatgtgaccaaggagtccacccaccccgtgaagcccctggcccagatcgccggaaacagatacgcctccggacctgtgggaaaggccctgagcgacgcatgtatgggcacaatcgcctccttcctgtctaagtaccaggacatcatcatcgaacaccagaaggtggtgaagggcaaccagaagagactggagagcctgcgggagctggccggcaaggaaaacctggaataccctagcgtgaccctgccacctcagcctcacaccaaggagggcgttgatgcctacaacgaagtgatcgcccgggtgcgaatgtgggtgaacctgaacctgtggcagaagctgaagctaagcagagatgatgccaagcctctgctgagactgaagggattcccttcctttcctctggtcgagagacaggccaacgaagtggactggtgggacatggtgtgtaacgtgaagaagctgatcaacgagaaaaaggaggatggcaaggtgttttggcagaatctggctggctacaagagacaggaagccctgagaccatacctgagcagcgaggaagatcggaagaagggaaagaaattcgctcggtaccagctgggcgacctgctgctgcacctggaaaagaagcacggcgaggactggggaaaggtgtacgacgaggcctgggagcggattgacaagaaagtggaaggcctgagcaagcacatcaagctggaagaggaacggagaagcgaggacgcccagagcaaggccgccctgaccgactggctgcgggctaaggccagcttcgtgatcgagggcctgaaggaggccgacaaggacgagttctgcagatgcgagctgaagctgcagaagtggtacggggacctgcggggaaagcccttcgccatcgaagccgagaacagcatcctggacatcagcggcttcagcaagcagtacaactgtgccttcatctggcagaaggacggcgtgaagaagctgaacctgtacctgatcatcaactacttcaagggcggcaagctgcggttcaagaagatcaaacctgaagccttcgaagccaacagattctacaccgtgatcaacaaaaagagcggcgagatcgtgcccatggaggtgaacttcaacttcgacgaccccaacctgatcatcctgcctctggcctttggcaagagacagggcagagaattcatctggaacgacctgctgtccctggaaaccggcagcctgaagctggccaacggaagagtgatcgagaagacactgtacaacagaagaacccggcaggatgagcctgccctgttcgtggccctgaccttcgagcggcgggaggtcctggactcctccaatatcaaaccaatgaacctgatcggcgtggcaagaggcgaaaacatccccgccgtgatcgccctgaccgaccccgagggctgcccactgagccggtttaaggatagcctgggaaacccaacccacatcctgagaatcggcgagagctataaggagaagcagcggaccatccaggccaagaaggaggtggagcagcggagagccggcggctacagccggaagtacgccagcaaagccaagaatctggcagacgatatggtgagaaacaccgctagagatctgctgtactacgccgtgacccaggatgccatgctgatcttcgccaacctgagccggggcttcggccggcagggcaagcggaccttcatggccgagagacagtacacacggatggaggactggctgaccgccaagctggcctacgagggcctgagcaagacctacctgtccaagacactggcccagtacacctccaagacatgcagcaactgtgggtttaccatcaccagcgccgactacgacagggtgctggagaagctgaagaagacagcaacaggctggatgaccacaattaacggcaaggagctgaaggtggagggccagattacctactacaacagatacaagagacagaacgtagtcaaggacctgtccgtcgagctggatagactgagcgaagaatctgtgaacaacgacatctcctcctggacaaagggcagaagcggagaagctctgagcctcctgaagaaaagattctcccatagacccgtgcaggagaagttcgtgtgcctgaactgcggcttcgagacacacgcagccgagcaagccgccctgaacatcgccagatcctggctgttcctgcggagccaggagtacaagaaataccagacaaacaagacaaccggcaacaccgataagagagccttcgtcgagacctggcagtccttttaccggaagaagcttaaggaggtgtggaaacctgccgtgcggtctggcggatctggcggaggctccacaagcgcccacaggagcctgatgttcagcgacgtgagcatcgtgttcagccaggaggagtgggagtacctggacctggagcagagggacctgtacagggacgtgatgctggagaactacagcaacctggtgagcctgggctgcttcatcagcaagcccgacgtgatcagcctgctggagcagggcaaggagccctggaaggtggtgaggaagggcaggaggaggtacgccgacctggagaccaggtacaccagccccaagaaaaagagaaaagtctaagctgccttctgcggggcttgccttctggccatgcccttcttctctcccttgcacctgtacctcttggtctttgaataaagcctgagtaggaaggctagcaaaaaaaaaaaaaaaaaaaaaaaaaaaaaaaaaaaaaaaaaaaaaaaaaaaaaaaaaaaaaaaaaaaaaaaaaaaaaaaa

SEQ ID NO: 6435 - RNA, 5797 nt, synthetic construct
  source 1..5797: mol_type = other RNA
aggaaataagagagaaaagaagagtaagaagaaatataagagccaccatggcccctaagaagaagcgtaaagtgagccggatggaacgcctcgtctacgaggtgcggcagaagtgcagaaacatcgaggacatctgcatctcctgcggatctctgaacgtgaccctggagcacccactgttcatcggcggcatgtgccagaactgtaaaaactgttttctggagtgtgcctatcaatacgacgatgacggctaccagagctactgcaccatctgttgcggcggaagagaggtgctgatgtgtggaaataacaactgctgccggtgcttctgcgtggaatgcgtggacctgctggtgggccccggcgccgcccaggccgctattaaggaagatccttggaactgctacatgtgcggccacaagggcacatacggcctgctgagacggagagaggactggcctagcagactgcagatgttcttcgccaataaccacgaccaggagttcgacccccctaaggtgtaccctcccgtccccgccgagaagagaaagcccatccgggtcctgagcctgttcgatggcatcgccaccggtctgctggtgctgaaggacctgggcatccaggtggataggtacattgcctccgaggtgtgcgaggactccatcaccgtgggaatggtgcgtcatcagggcaagatcatgtacgtgggcgacgtgcggagcgtgacacagaagcatatccaggagtggggccctttcgacctggtgatcggcggcagcccttgcaatgacctgagcatcgtgaacccagcccggaagggcctgtacgagggaaccggcagactgttcttcgagttttacagactgctgcacgacgcccggcctaaggaaggcgacgaccggcccttcttttggctgttcgagaatgtggtggccatgggagtcagcgacaagcgggatattagccggttcctggagagcaaccccgtgatgatcgatgccaaggaagtgagcgccgcccaccgggccagatacttctggggcaatctgcctggcatgaacagacccctggccagcaccgtgaacgacaagctggagctgcaggagtgcctggagcacggccggatcgccaagttcagcaaggtgagaaccatcaccacccgaagcaacagcatcaaacaaggcaaggaccagcactttcctgtgttcatgaacgagaaggaggacatcctgtggtgtaccgagatggagagagtgttcgggttcccagtccactacacagatgtcagcaacatgtctagactggccagacagagactgctgggaagaagctggtccgtccctgtgatcagacacctgttcgcccctctgaaggagtacttcgcctgcgtgagcagcggcaacagcaacgccaacagccggggccccagcttctctagcggcctggtgccactgtccctgagagggagccacatgggccccatggagatctacaaaaccgtgagcgcctggaagcggcagcctgtgcgcgtgctgagcctgtttcggaatatcgataaagtcctgaaaagcctgggattcctggagagcggctctggctccggcggtggcaccctgaagtacgtggaggatgtgacaaacgtggtcagacgggatgtggagaagtggggccccttcgatctggtgtacggcagcacccaacccctgggcagctcttgtgaccggtgccctggctggtacatgtttcagttccaccggatcctgcagtacgccctgccgagacaggagtcccagcggccattcttttggattttcatggacaacttgctgctgaccgaggatgaccaggaaactaccactcggttcctgcagaccgaagccgtgaccctgcaggacgtgagaggccgggactaccagaacgccatgcgggtgtggtccaacatccctggactgaaaagcaagcacgcacctctgacccctaaagaagaggagtacctgcaggcccaggtgcggagcagaagcaagctggacgcccctaaggtggatctgctggtgaagaattgcctcctgcccctgagagagtacttcaagtatttcagccagaatagtctgcccctgggcggcccaagcagcggcgcccctcctcccagcggcggcagcccagccggctccccaacctctaccgaggagggcacctctgagtccgccacccccgagagcggccctggcacctccaccgagcccagcgagggcagcgcacccggcagccctgccggcagccccacctccacagaggagggaaccagcaccgagcccagcgaaggcagcgccccaggcaccagcaccgagcctagtgagggcggctctggcggcggcagcgcccaggagattaaacggatcaacaagatcagaagaagacttgtgaaagacagcaacaccaagaaggccggcaagacaggccccatgaaaaccctgctggttagagtgatgacacccgatctgagagagcggctggaaaacctgagaaagaagcctgaaaatatcccccagcccatcagcaatacatctagagccaacctgaataagctgctgaccgattacaccgaaatgaagaaggcgatcctgcatgtgtactgggaagagttccagaaggaccctgtgggcctgatgagccgggtggcccagcctgccagcaagaagatcgatcagaacaagctgaaacctgagatggacgagaagggcaacctgaccaccgccggctttgcctgctctcagtgtggccagcccctgttcgtgtacaagctggagcaggtgtctgagaagggcaaggcttacaccaactacttcggacggtgcaatgtggccgagcacgaaaagctgatcctgctggcccagctgaagcccgagaaggatagcgacgaagccgtgacatatagcctgggaaagtttgggcagagggccctggatttctacagcattcatgtgaccaaggagtccacccaccccgtgaagcccctggcccagatcgccggaaacagatacgcctccggacctgtgggaaaggccctgagcgacgcatgtatgggcacaatcgcctccttcctgtctaagtaccaggacatcatcatcgaacaccagaaggtggtgaagggcaaccagaagagactggagagcctgcgggagctggccggcaaggaaaacctggaataccctagcgtgaccctgccacctcagcctcacaccaaggagggcgttgatgcctacaacgaagtgatcgcccgggtgcgaatgtgggtgaacctgaacctgtggcagaagctgaagctaagcagagatgatgccaagcctctgctgagactgaagggattcccttcctttcctctggtcgagagacaggccaacgaagtggactggtgggacatggtgtgtaacgtgaagaagctgatcaacgagaaaaaggaggatggcaaggtgttttggcagaatctggctggctacaagagacaggaagccctgagaccatacctgagcagcgaggaagatcggaagaagggaaagaaattcgctcggtaccagctgggcgacctgctgctgcacctggaaaagaagcacggcgaggactggggaaaggtgtacgacgaggcctgggagcggattgacaagaaagtggaaggcctgagcaagcacatcaagctggaagaggaacggagaagcgaggacgcccagagcaaggccgccctgaccgactggctgcgggctaaggccagcttcgtgatcgagggcctgaaggaggccgacaaggacgagttctgcagatgcgagctgaagctgcagaagtggtacggggacctgcggggaaagcccttcgccatcgaagccgagaacagcatcctggacatcagcggcttcagcaagcagtacaactgtgccttcatctggcagaaggacggcgtgaagaagctgaacctgtacctgatcatcaactacttcaagggcggcaagctgcggttcaagaagatcaaacctgaagccttcgaagccaacagattctacaccgtgatcaacaaaaagagcggcgagatcgtgcccatggaggtgaacttcaacttcgacgaccccaacctgatcatcctgcctctggcctttggcaagagacagggcagagaattcatctggaacgacctgctgtccctggaaaccggcagcctgaagctggccaacggaagagtgatcgagaagacactgtacaacagaagaacccggcaggatgagcctgccctgttcgtggccctgaccttcgagcggcgggaggtcctggactcctccaatatcaaaccaatgaacctgatcggcgtggcaagaggcgaaaacatccccgccgtgatcgccctgaccgaccccgagggctgcccactgagccggtttaaggatagcctgggaaacccaacccacatcctgagaatcggcgagagctataaggagaagcagcggaccatccaggccaagaaggaggtggagcagcggagagccggcggctacagccggaagtacgccagcaaagccaagaatctggcagacgatatggtgagaaacaccgctagagatctgctgtactacgccgtgacccaggatgccatgctgatcttcgccaacctgagccggggcttcggccggcagggcaagcggaccttcatggccgagagacagtacacacggatggaggactggctgaccgccaagctggcctacgagggcctgagcaagacctacctgtccaagacactggcccagtacacctccaagacatgcagcaactgtgggtttaccatcaccagcgccgactacgacagggtgctggagaagctgaagaagacagcaacaggctggatgaccacaattaacggcaaggagctgaaggtggagggccagattacctactacaacagatacaagagacagaacgtagtcaaggacctgtccgtcgagctggatagactgagcgaagaatctgtgaacaacgacatctcctcctggacaaagggcagaagcggagaagctctgagcctcctgaagaaaagattctcccatagacccgtgcaggagaagttcgtgtgcctgaactgcggcttcgagacacacgcagccgagcaagccgccctgaacatcgccagatcctggctgttcctgcggagccaggagtacaagaaataccagacaaacaagacaaccggcaacaccgataagagagccttcgtcgagacctggcagtccttttaccggaagaagcttaaggaggtgtggaaacctgccgtgcggtctggcggatctggcggaggctccacaagcatgaccaaggcccaggagagcctgaccctgaaggacgtggccgtggacttcacctgggaggagtggcagctgctgggccccgcccagaagaggctgtacagggacgtgatgctggagaactacagcaacctggtgagcgtgggctaccaggccagcaagcccgacgccctgaccaagctggagcagggcgagcccctgtggaccctggaggacgagatccacagccccgcccaccccgagatcaccagccccaagaaaaagagaaaagtctaagctgccttctgcggggcttgccttctggccatgcccttcttctctcccttgcacctgtacctcttggtctttgaataaagcctgagtaggaaggctagcaaaaaaaaaaaaaaaaaaaaaaaaaaaaaaaaaaaaaaaaaaaaaaaaaaaaaaaaaaaaaaaaaaaaaaaaaaaaaaaa

SEQ ID NO: 6436 - RNA, 5797 nt, synthetic construct
  source 1..5797: mol_type = other RNA
aggaaataagagagaaaagaagagtaagaagaaatataagagccaccatggcccctaagaagaagcgtaaagtgagccggatggaacgcctcgtctacgaggtgcggcagaagtgcagaaacatcgaggacatctgcatctcctgcggatctctgaacgtgaccctggagcacccactgttcatcggcggcatgtgccagaactgtaaaaactgttttctggagtgtgcctatcaatacgacgatgacggctaccagagctactgcaccatctgttgcggcggaagagaggtgctgatgtgtggaaataacaactgctgccggtgcttctgcgtggaatgcgtggacctgctggtgggccccggcgccgcccaggccgctattaaggaagatccttggaactgctacatgtgcggccacaagggcacatacggcctgctgagacggagagaggactggcctagcagactgcagatgttcttcgccaataaccacgaccaggagttcgacccccctaaggtgtaccctcccgtccccgccgagaagagaaagcccatccgggtcctgagcctgttcgatggcatcgccaccggtctgctggtgctgaaggacctgggcatccaggtggataggtacattgcctccgaggtgtgcgaggactccatcaccgtgggaatggtgcgtcatcagggcaagatcatgtacgtgggcgacgtgcggagcgtgacacagaagcatatccaggagtggggccctttcgacctggtgatcggcggcagcccttgcaatgacctgagcatcgtgaacccagcccggaagggcctgtacgagggaaccggcagactgttcttcgagttttacagactgctgcacgacgcccggcctaaggaaggcgacgaccggcccttcttttggctgttcgagaatgtggtggccatgggagtcagcgacaagcgggatattagccggttcctggagagcaaccccgtgatgatcgatgccaaggaagtgagcgccgcccaccgggccagatacttctggggcaatctgcctggcatgaacagacccctggccagcaccgtgaacgacaagctggagctgcaggagtgcctggagcacggccggatcgccaagttcagcaaggtgagaaccatcaccacccgaagcaacagcatcaaacaaggcaaggaccagcactttcctgtgttcatgaacgagaaggaggacatcctgtggtgtaccgagatggagagagtgttcgggttcccagtccactacacagatgtcagcaacatgtctagactggccagacagagactgctgggaagaagctggtccgtccctgtgatcagacacctgttcgcccctctgaaggagtacttcgcctgcgtgagcagcggcaacagcaacgccaacagccggggccccagcttctctagcggcctggtgccactgtccctgagagggagccacatgggccccatggagatctacaaaaccgtgagcgcctggaagcggcagcctgtgcgcgtgctgagcctgtttcggaatatcgataaagtcctgaaaagcctgggattcctggagagcggctctggctccggcggtggcaccctgaagtacgtggaggatgtgacaaacgtggtcagacgggatgtggagaagtggggccccttcgatctggtgtacggcagcacccaacccctgggcagctcttgtgaccggtgccctggctggtacatgtttcagttccaccggatcctgcagtacgccctgccgagacaggagtcccagcggccattcttttggattttcatggacaacttgctgctgaccgaggatgaccaggaaactaccactcggttcctgcagaccgaagccgtgaccctgcaggacgtgagaggccgggactaccagaacgccatgcgggtgtggtccaacatccctggactgaaaagcaagcacgcacctctgacccctaaagaagaggagtacctgcaggcccaggtgcggagcagaagcaagctggacgcccctaaggtggatctgctggtgaagaattgcctcctgcccctgagagagtacttcaagtatttcagccagaatagtctgcccctgggcggcccaagcagcggcgcccctcctcccagcggcggcagcccagccggctccccaacctctaccgaggagggcacctctgagtccgccacccccgagagcggccctggcacctccaccgagcccagcgagggcagcgcacccggcagccctgccggcagccccacctccacagaggagggaaccagcaccgagcccagcgaaggcagcgccccaggcaccagcaccgagcctagtgagggcggctctggcggcggcagcgcccaggagattaaacggatcaacaagatcagaagaagacttgtgaaagacagcaacaccaagaaggccggcaagacaggccccatgaaaaccctgctggttagagtgatgacacccgatctgagagagcggctggaaaacctgagaaagaagcctgaaaatatcccccagcccatcagcaatacatctagagccaacctgaataagctgctgaccgattacaccgaaatgaagaaggcgatcctgcatgtgtactgggaagagttccagaaggaccctgtgggcctgatgagccgggtggcccagcctgccagcaagaagatcgatcagaacaagctgaaacctgagatggacgagaagggcaacctgaccaccgccggctttgcctgctctcagtgtggccagcccctgttcgtgtacaagctggagcaggtgtctgagaagggcaaggcttacaccaactacttcggacggtgcaatgtggccgagcacgaaaagctgatcctgctggcccagctgaagcccgagaaggatagcgacgaagccgtgacatatagcctgggaaagtttgggcagagggccctggatttctacagcattcatgtgaccaaggagtccacccaccccgtgaagcccctggcccagatcgccggaaacagatacgcctccggacctgtgggaaaggccctgagcgacgcatgtatgggcacaatcgcctccttcctgtctaagtaccaggacatcatcatcgaacaccagaaggtggtgaagggcaaccagaagagactggagagcctgcgggagctggccggcaaggaaaacctggaataccctagcgtgaccctgccacctcagcctcacaccaaggagggcgttgatgcctacaacgaagtgatcgcccgggtgcgaatgtgggtgaacctgaacctgtggcagaagctgaagctaagcagagatgatgccaagcctctgctgagactgaagggattcccttcctttcctctggtcgagagacaggccaacgaagtggactggtgggacatggtgtgtaacgtgaagaagctgatcaacgagaaaaaggaggatggcaaggtgttttggcagaatctggctggctacaagagacaggaagccctgagaccatacctgagcagcgaggaagatcggaagaagggaaagaaattcgctcggtaccagctgggcgacctgctgctgcacctggaaaagaagcacggcgaggactggggaaaggtgtacgacgaggcctgggagcggattgacaagaaagtggaaggcctgagcaagcacatcaagctggaagaggaacggagaagcgaggacgcccagagcaaggccgccctgaccgactggctgcgggctaaggccagcttcgtgatcgagggcctgaaggaggccgacaaggacgagttctgcagatgcgagctgaagctgcagaagtggtacggggacctgcggggaaagcccttcgccatcgaagccgagaacagcatcctggacatcagcggcttcagcaagcagtacaactgtgccttcatctggcagaaggacggcgtgaagaagctgaacctgtacctgatcatcaactacttcaagggcggcaagctgcggttcaagaagatcaaacctgaagccttcgaagccaacagattctacaccgtgatcaacaaaaagagcggcgagatcgtgcccatggaggtgaacttcaacttcgacgaccccaacctgatcatcctgcctctggcctttggcaagagacagggcagagaattcatctggaacgacctgctgtccctggaaaccggcagcctgaagctggccaacggaagagtgatcgagaagacactgtacaacagaagaacccggcaggatgagcctgccctgttcgtggccctgaccttcgagcggcgggaggtcctggactcctccaatatcaaaccaatgaacctgatcggcgtggcaagaggcgaaaacatccccgccgtgatcgccctgaccgaccccgagggctgcccactgagccggtttaaggatagcctgggaaacccaacccacatcctgagaatcggcgagagctataaggagaagcagcggaccatccaggccaagaaggaggtggagcagcggagagccggcggctacagccggaagtacgccagcaaagccaagaatctggcagacgatatggtgagaaacaccgctagagatctgctgtactacgccgtgacccaggatgccatgctgatcttcgccaacctgagccggggcttcggccggcagggcaagcggaccttcatggccgagagacagtacacacggatggaggactggctgaccgccaagctggcctacgagggcctgagcaagacctacctgtccaagacactggcccagtacacctccaagacatgcagcaactgtgggtttaccatcaccagcgccgactacgacagggtgctggagaagctgaagaagacagcaacaggctggatgaccacaattaacggcaaggagctgaaggtggagggccagattacctactacaacagatacaagagacagaacgtagtcaaggacctgtccgtcgagctggatagactgagcgaagaatctgtgaacaacgacatctcctcctggacaaagggcagaagcggagaagctctgagcctcctgaagaaaagattctcccatagacccgtgcaggagaagttcgtgtgcctgaactgcggcttcgagacacacgcagccgagcaagccgccctgaacatcgccagatcctggctgttcctgcggagccaggagtacaagaaataccagacaaacaagacaaccggcaacaccgataagagagccttcgtcgagacctggcagtccttttaccggaagaagcttaaggaggtgtggaaacctgccgtgcggtctggcggatctggcggaggctccacaagcatgatgaccgccgtgagcctgaccaccaggccccaggagagcgtggccttcgaggacgtggccgtgtacttcaccaccaaggagtgggccatcatggtgcccgccgagagggccctgtacagggacgtgatgctggagaactacgaggccgtggccttcgtggtgccccccaccagcaagcccgccctggtgagccacctggagcagggcaaggagagctgcttcacccagccccagggcgtgaccagccccaagaaaaagagaaaagtctaagctgccttctgcggggcttgccttctggccatgcccttcttctctcccttgcacctgtacctcttggtctttgaataaagcctgagtaggaaggctagcaaaaaaaaaaaaaaaaaaaaaaaaaaaaaaaaaaaaaaaaaaaaaaaaaaaaaaaaaaaaaaaaaaaaaaaaaaaaaaaa

SEQ ID NO: 6437 - RNA, 5797 nt, synthetic construct
  source 1..5797: mol_type = other RNA
aggaaataagagagaaaagaagagtaagaagaaatataagagccaccatggcccctaagaagaagcgtaaagtgagccggatggaacgcctcgtctacgaggtgcggcagaagtgcagaaacatcgaggacatctgcatctcctgcggatctctgaacgtgaccctggagcacccactgttcatcggcggcatgtgccagaactgtaaaaactgttttctggagtgtgcctatcaatacgacgatgacggctaccagagctactgcaccatctgttgcggcggaagagaggtgctgatgtgtggaaataacaactgctgccggtgcttctgcgtggaatgcgtggacctgctggtgggccccggcgccgcccaggccgctattaaggaagatccttggaactgctacatgtgcggccacaagggcacatacggcctgctgagacggagagaggactggcctagcagactgcagatgttcttcgccaataaccacgaccaggagttcgacccccctaaggtgtaccctcccgtccccgccgagaagagaaagcccatccgggtcctgagcctgttcgatggcatcgccaccggtctgctggtgctgaaggacctgggcatccaggtggataggtacattgcctccgaggtgtgcgaggactccatcaccgtgggaatggtgcgtcatcagggcaagatcatgtacgtgggcgacgtgcggagcgtgacacagaagcatatccaggagtggggccctttcgacctggtgatcggcggcagcccttgcaatgacctgagcatcgtgaacccagcccggaagggcctgtacgagggaaccggcagactgttcttcgagttttacagactgctgcacgacgcccggcctaaggaaggcgacgaccggcccttcttttggctgttcgagaatgtggtggccatgggagtcagcgacaagcgggatattagccggttcctggagagcaaccccgtgatgatcgatgccaaggaagtgagcgccgcccaccgggccagatacttctggggcaatctgcctggcatgaacagacccctggccagcaccgtgaacgacaagctggagctgcaggagtgcctggagcacggccggatcgccaagttcagcaaggtgagaaccatcaccacccgaagcaacagcatcaaacaaggcaaggaccagcactttcctgtgttcatgaacgagaaggaggacatcctgtggtgtaccgagatggagagagtgttcgggttcccagtccactacacagatgtcagcaacatgtctagactggccagacagagactgctgggaagaagctggtccgtccctgtgatcagacacctgttcgcccctctgaaggagtacttcgcctgcgtgagcagcggcaacagcaacgccaacagccggggccccagcttctctagcggcctggtgccactgtccctgagagggagccacatgggccccatggagatctacaaaaccgtgagcgcctggaagcggcagcctgtgcgcgtgctgagcctgtttcggaatatcgataaagtcctgaaaagcctgggattcctggagagcggctctggctccggcggtggcaccctgaagtacgtggaggatgtgacaaacgtggtcagacgggatgtggagaagtggggccccttcgatctggtgtacggcagcacccaacccctgggcagctcttgtgaccggtgccctggctggtacatgtttcagttccaccggatcctgcagtacgccctgccgagacaggagtcccagcggccattcttttggattttcatggacaacttgctgctgaccgaggatgaccaggaaactaccactcggttcctgcagaccgaagccgtgaccctgcaggacgtgagaggccgggactaccagaacgccatgcgggtgtggtccaacatccctggactgaaaagcaagcacgcacctctgacccctaaagaagaggagtacctgcaggcccaggtgcggagcagaagcaagctggacgcccctaaggtggatctgctggtgaagaattgcctcctgcccctgagagagtacttcaagtatttcagccagaatagtctgcccctgggcggcccaagcagcggcgcccctcctcccagcggcggcagcccagccggctccccaacctctaccgaggagggcacctctgagtccgccacccccgagagcggccctggcacctccaccgagcccagcgagggcagcgcacccggcagccctgccggcagccccacctccacagaggagggaaccagcaccgagcccagcgaaggcagcgccccaggcaccagcaccgagcctagtgagggcggctctggcggcggcagcgcccaggagattaaacggatcaacaagatcagaagaagacttgtgaaagacagcaacaccaagaaggccggcaagacaggccccatgaaaaccctgctggttagagtgatgacacccgatctgagagagcggctggaaaacctgagaaagaagcctgaaaatatcccccagcccatcagcaatacatctagagccaacctgaataagctgctgaccgattacaccgaaatgaagaaggcgatcctgcatgtgtactgggaagagttccagaaggaccctgtgggcctgatgagccgggtggcccagcctgccagcaagaagatcgatcagaacaagctgaaacctgagatggacgagaagggcaacctgaccaccgccggctttgcctgctctcagtgtggccagcccctgttcgtgtacaagctggagcaggtgtctgagaagggcaaggcttacaccaactacttcggacggtgcaatgtggccgagcacgaaaagctgatcctgctggcccagctgaagcccgagaaggatagcgacgaagccgtgacatatagcctgggaaagtttgggcagagggccctggatttctacagcattcatgtgaccaaggagtccacccaccccgtgaagcccctggcccagatcgccggaaacagatacgcctccggacctgtgggaaaggccctgagcgacgcatgtatgggcacaatcgcctccttcctgtctaagtaccaggacatcatcatcgaacaccagaaggtggtgaagggcaaccagaagagactggagagcctgcgggagctggccggcaaggaaaacctggaataccctagcgtgaccctgccacctcagcctcacaccaaggagggcgttgatgcctacaacgaagtgatcgcccgggtgcgaatgtgggtgaacctgaacctgtggcagaagctgaagctaagcagagatgatgccaagcctctgctgagactgaagggattcccttcctttcctctggtcgagagacaggccaacgaagtggactggtgggacatggtgtgtaacgtgaagaagctgatcaacgagaaaaaggaggatggcaaggtgttttggcagaatctggctggctacaagagacaggaagccctgagaccatacctgagcagcgaggaagatcggaagaagggaaagaaattcgctcggtaccagctgggcgacctgctgctgcacctggaaaagaagcacggcgaggactggggaaaggtgtacgacgaggcctgggagcggattgacaagaaagtggaaggcctgagcaagcacatcaagctggaagaggaacggagaagcgaggacgcccagagcaaggccgccctgaccgactggctgcgggctaaggccagcttcgtgatcgagggcctgaaggaggccgacaaggacgagttctgcagatgcgagctgaagctgcagaagtggtacggggacctgcggggaaagcccttcgccatcgaagccgagaacagcatcctggacatcagcggcttcagcaagcagtacaactgtgccttcatctggcagaaggacggcgtgaagaagctgaacctgtacctgatcatcaactacttcaagggcggcaagctgcggttcaagaagatcaaacctgaagccttcgaagccaacagattctacaccgtgatcaacaaaaagagcggcgagatcgtgcccatggaggtgaacttcaacttcgacgaccccaacctgatcatcctgcctctggcctttggcaagagacagggcagagaattcatctggaacgacctgctgtccctggaaaccggcagcctgaagctggccaacggaagagtgatcgagaagacactgtacaacagaagaacccggcaggatgagcctgccctgttcgtggccctgaccttcgagcggcgggaggtcctggactcctccaatatcaaaccaatgaacctgatcggcgtggcaagaggcgaaaacatccccgccgtgatcgccctgaccgaccccgagggctgcccactgagccggtttaaggatagcctgggaaacccaacccacatcctgagaatcggcgagagctataaggagaagcagcggaccatccaggccaagaaggaggtggagcagcggagagccggcggctacagccggaagtacgccagcaaagccaagaatctggcagacgatatggtgagaaacaccgctagagatctgctgtactacgccgtgacccaggatgccatgctgatcttcgccaacctgagccggggcttcggccggcagggcaagcggaccttcatggccgagagacagtacacacggatggaggactggctgaccgccaagctggcctacgagggcctgagcaagacctacctgtccaagacactggcccagtacacctccaagacatgcagcaactgtgggtttaccatcaccagcgccgactacgacagggtgctggagaagctgaagaagacagcaacaggctggatgaccacaattaacggcaaggagctgaaggtggagggccagattacctactacaacagatacaagagacagaacgtagtcaaggacctgtccgtcgagctggatagactgagcgaagaatctgtgaacaacgacatctcctcctggacaaagggcagaagcggagaagctctgagcctcctgaagaaaagattctcccatagacccgtgcaggagaagttcgtgtgcctgaactgcggcttcgagacacacgcagccgagcaagccgccctgaacatcgccagatcctggctgttcctgcggagccaggagtacaagaaataccagacaaacaagacaaccggcaacaccgataagagagccttcgtcgagacctggcagtccttttaccggaagaagcttaaggaggtgtggaaacctgccgtgcggtctggcggatctggcggaggctccacaagccagatgcaggtgaagttcgaggacatcgccatcagcttcagccaggaggagtgggagtacctgaacgaggagcagaaggagctgtacagggaggtgatggaggagaactaccagaccctgctgagcctggccaccgacagccccaccttcacccccaagatcatcagctacatcaagaggggcgaggagccctacatcaggggcgagcccgacagcgaggagagggagagcggcaagagcagcaccagccccaagaaaaagagaaaagtctaagctgccttctgcggggcttgccttctggccatgcccttcttctctcccttgcacctgtacctcttggtctttgaataaagcctgagtaggaaggctagcaaaaaaaaaaaaaaaaaaaaaaaaaaaaaaaaaaaaaaaaaaaaaaaaaaaaaaaaaaaaaaaaaaaaaaaaaaaaaaaa

SEQ ID NO: 6438 - RNA, 5797 nt, synthetic construct
  source 1..5797: mol_type = other RNA
aggaaataagagagaaaagaagagtaagaagaaatataagagccaccatggcccctaagaagaagcgtaaagtgagccggatggaacgcctcgtctacgaggtgcggcagaagtgcagaaacatcgaggacatctgcatctcctgcggatctctgaacgtgaccctggagcacccactgttcatcggcggcatgtgccagaactgtaaaaactgttttctggagtgtgcctatcaatacgacgatgacggctaccagagctactgcaccatctgttgcggcggaagagaggtgctgatgtgtggaaataacaactgctgccggtgcttctgcgtggaatgcgtggacctgctggtgggccccggcgccgcccaggccgctattaaggaagatccttggaactgctacatgtgcggccacaagggcacatacggcctgctgagacggagagaggactggcctagcagactgcagatgttcttcgccaataaccacgaccaggagttcgacccccctaaggtgtaccctcccgtccccgccgagaagagaaagcccatccgggtcctgagcctgttcgatggcatcgccaccggtctgctggtgctgaaggacctgggcatccaggtggataggtacattgcctccgaggtgtgcgaggactccatcaccgtgggaatggtgcgtcatcagggcaagatcatgtacgtgggcgacgtgcggagcgtgacacagaagcatatccaggagtggggccctttcgacctggtgatcggcggcagcccttgcaatgacctgagcatcgtgaacccagcccggaagggcctgtacgagggaaccggcagactgttcttcgagttttacagactgctgcacgacgcccggcctaaggaaggcgacgaccggcccttcttttggctgttcgagaatgtggtggccatgggagtcagcgacaagcgggatattagccggttcctggagagcaaccccgtgatgatcgatgccaaggaagtgagcgccgcccaccgggccagatacttctggggcaatctgcctggcatgaacagacccctggccagcaccgtgaacgacaagctggagctgcaggagtgcctggagcacggccggatcgccaagttcagcaaggtgagaaccatcaccacccgaagcaacagcatcaaacaaggcaaggaccagcactttcctgtgttcatgaacgagaaggaggacatcctgtggtgtaccgagatggagagagtgttcgggttcccagtccactacacagatgtcagcaacatgtctagactggccagacagagactgctgggaagaagctggtccgtccctgtgatcagacacctgttcgcccctctgaaggagtacttcgcctgcgtgagcagcggcaacagcaacgccaacagccggggccccagcttctctagcggcctggtgccactgtccctgagagggagccacatgggccccatggagatctacaaaaccgtgagcgcctggaagcggcagcctgtgcgcgtgctgagcctgtttcggaatatcgataaagtcctgaaaagcctgggattcctggagagcggctctggctccggcggtggcaccctgaagtacgtggaggatgtgacaaacgtggtcagacgggatgtggagaagtggggccccttcgatctggtgtacggcagcacccaacccctgggcagctcttgtgaccggtgccctggctggtacatgtttcagttccaccggatcctgcagtacgccctgccgagacaggagtcccagcggccattcttttggattttcatggacaacttgctgctgaccgaggatgaccaggaaactaccactcggttcctgcagaccgaagccgtgaccctgcaggacgtgagaggccgggactaccagaacgccatgcgggtgtggtccaacatccctggactgaaaagcaagcacgcacctctgacccctaaagaagaggagtacctgcaggcccaggtgcggagcagaagcaagctggacgcccctaaggtggatctgctggtgaagaattgcctcctgcccctgagagagtacttcaagtatttcagccagaatagtctgcccctgggcggcccaagcagcggcgcccctcctcccagcggcggcagcccagccggctccccaacctctaccgaggagggcacctctgagtccgccacccccgagagcggccctggcacctccaccgagcccagcgagggcagcgcacccggcagccctgccggcagccccacctccacagaggagggaaccagcaccgagcccagcgaaggcagcgccccaggcaccagcaccgagcctagtgagggcggctctggcggcggcagcgcccaggagattaaacggatcaacaagatcagaagaagacttgtgaaagacagcaacaccaagaaggccggcaagacaggccccatgaaaaccctgctggttagagtgatgacacccgatctgagagagcggctggaaaacctgagaaagaagcctgaaaatatcccccagcccatcagcaatacatctagagccaacctgaataagctgctgaccgattacaccgaaatgaagaaggcgatcctgcatgtgtactgggaagagttccagaaggaccctgtgggcctgatgagccgggtggcccagcctgccagcaagaagatcgatcagaacaagctgaaacctgagatggacgagaagggcaacctgaccaccgccggctttgcctgctctcagtgtggccagcccctgttcgtgtacaagctggagcaggtgtctgagaagggcaaggcttacaccaactacttcggacggtgcaatgtggccgagcacgaaaagctgatcctgctggcccagctgaagcccgagaaggatagcgacgaagccgtgacatatagcctgggaaagtttgggcagagggccctggatttctacagcattcatgtgaccaaggagtccacccaccccgtgaagcccctggcccagatcgccggaaacagatacgcctccggacctgtgggaaaggccctgagcgacgcatgtatgggcacaatcgcctccttcctgtctaagtaccaggacatcatcatcgaacaccagaaggtggtgaagggcaaccagaagagactggagagcctgcgggagctggccggcaaggaaaacctggaataccctagcgtgaccctgccacctcagcctcacaccaaggagggcgttgatgcctacaacgaagtgatcgcccgggtgcgaatgtgggtgaacctgaacctgtggcagaagctgaagctaagcagagatgatgccaagcctctgctgagactgaagggattcccttcctttcctctggtcgagagacaggccaacgaagtggactggtgggacatggtgtgtaacgtgaagaagctgatcaacgagaaaaaggaggatggcaaggtgttttggcagaatctggctggctacaagagacaggaagccctgagaccatacctgagcagcgaggaagatcggaagaagggaaagaaattcgctcggtaccagctgggcgacctgctgctgcacctggaaaagaagcacggcgaggactggggaaaggtgtacgacgaggcctgggagcggattgacaagaaagtggaaggcctgagcaagcacatcaagctggaagaggaacggagaagcgaggacgcccagagcaaggccgccctgaccgactggctgcgggctaaggccagcttcgtgatcgagggcctgaaggaggccgacaaggacgagttctgcagatgcgagctgaagctgcagaagtggtacggggacctgcggggaaagcccttcgccatcgaagccgagaacagcatcctggacatcagcggcttcagcaagcagtacaactgtgccttcatctggcagaaggacggcgtgaagaagctgaacctgtacctgatcatcaactacttcaagggcggcaagctgcggttcaagaagatcaaacctgaagccttcgaagccaacagattctacaccgtgatcaacaaaaagagcggcgagatcgtgcccatggaggtgaacttcaacttcgacgaccccaacctgatcatcctgcctctggcctttggcaagagacagggcagagaattcatctggaacgacctgctgtccctggaaaccggcagcctgaagctggccaacggaagagtgatcgagaagacactgtacaacagaagaacccggcaggatgagcctgccctgttcgtggccctgaccttcgagcggcgggaggtcctggactcctccaatatcaaaccaatgaacctgatcggcgtggcaagaggcgaaaacatccccgccgtgatcgccctgaccgaccccgagggctgcccactgagccggtttaaggatagcctgggaaacccaacccacatcctgagaatcggcgagagctataaggagaagcagcggaccatccaggccaagaaggaggtggagcagcggagagccggcggctacagccggaagtacgccagcaaagccaagaatctggcagacgatatggtgagaaacaccgctagagatctgctgtactacgccgtgacccaggatgccatgctgatcttcgccaacctgagccggggcttcggccggcagggcaagcggaccttcatggccgagagacagtacacacggatggaggactggctgaccgccaagctggcctacgagggcctgagcaagacctacctgtccaagacactggcccagtacacctccaagacatgcagcaactgtgggtttaccatcaccagcgccgactacgacagggtgctggagaagctgaagaagacagcaacaggctggatgaccacaattaacggcaaggagctgaaggtggagggccagattacctactacaacagatacaagagacagaacgtagtcaaggacctgtccgtcgagctggatagactgagcgaagaatctgtgaacaacgacatctcctcctggacaaagggcagaagcggagaagctctgagcctcctgaagaaaagattctcccatagacccgtgcaggagaagttcgtgtgcctgaactgcggcttcgagacacacgcagccgagcaagccgccctgaacatcgccagatcctggctgttcctgcggagccaggagtacaagaaataccagacaaacaagacaaccggcaacaccgataagagagccttcgtcgagacctggcagtccttttaccggaagaagcttaaggaggtgtggaaacctgccgtgcggtctggcggatctggcggaggctccacaagcgtgcaggccagcctgagcttcgaggacgtggccgtgcacttcacctgggaggagtggcagctgctggaccccagccagaaggacctgtacaggaacgtgatgtgggagaactactgcaacctggtgagcgtgggctaccagacccccaagcccgacagcttcttccagctggagcagggcgagcccccctggaccgtggagggcgccggccagagccagacctgccccggcaccagggccagcaccagccccaagaaaaagagaaaagtctaagctgccttctgcggggcttgccttctggccatgcccttcttctctcccttgcacctgtacctcttggtctttgaataaagcctgagtaggaaggctagcaaaaaaaaaaaaaaaaaaaaaaaaaaaaaaaaaaaaaaaaaaaaaaaaaaaaaaaaaaaaaaaaaaaaaaaaaaaaaaaa

SEQ ID NO: 6439 - RNA, 5797 nt, synthetic construct
  source 1..5797: mol_type = other RNA
aggaaataagagagaaaagaagagtaagaagaaatataagagccaccatggcccctaagaagaagcgtaaagtgagccggatggaacgcctcgtctacgaggtgcggcagaagtgcagaaacatcgaggacatctgcatctcctgcggatctctgaacgtgaccctggagcacccactgttcatcggcggcatgtgccagaactgtaaaaactgttttctggagtgtgcctatcaatacgacgatgacggctaccagagctactgcaccatctgttgcggcggaagagaggtgctgatgtgtggaaataacaactgctgccggtgcttctgcgtggaatgcgtggacctgctggtgggccccggcgccgcccaggccgctattaaggaagatccttggaactgctacatgtgcggccacaagggcacatacggcctgctgagacggagagaggactggcctagcagactgcagatgttcttcgccaataaccacgaccaggagttcgacccccctaaggtgtaccctcccgtccccgccgagaagagaaagcccatccgggtcctgagcctgttcgatggcatcgccaccggtctgctggtgctgaaggacctgggcatccaggtggataggtacattgcctccgaggtgtgcgaggactccatcaccgtgggaatggtgcgtcatcagggcaagatcatgtacgtgggcgacgtgcggagcgtgacacagaagcatatccaggagtggggccctttcgacctggtgatcggcggcagcccttgcaatgacctgagcatcgtgaacccagcccggaagggcctgtacgagggaaccggcagactgttcttcgagttttacagactgctgcacgacgcccggcctaaggaaggcgacgaccggcccttcttttggctgttcgagaatgtggtggccatgggagtcagcgacaagcgggatattagccggttcctggagagcaaccccgtgatgatcgatgccaaggaagtgagcgccgcccaccgggccagatacttctggggcaatctgcctggcatgaacagacccctggccagcaccgtgaacgacaagctggagctgcaggagtgcctggagcacggccggatcgccaagttcagcaaggtgagaaccatcaccacccgaagcaacagcatcaaacaaggcaaggaccagcactttcctgtgttcatgaacgagaaggaggacatcctgtggtgtaccgagatggagagagtgttcgggttcccagtccactacacagatgtcagcaacatgtctagactggccagacagagactgctgggaagaagctggtccgtccctgtgatcagacacctgttcgcccctctgaaggagtacttcgcctgcgtgagcagcggcaacagcaacgccaacagccggggccccagcttctctagcggcctggtgccactgtccctgagagggagccacatgggccccatggagatctacaaaaccgtgagcgcctggaagcggcagcctgtgcgcgtgctgagcctgtttcggaatatcgataaagtcctgaaaagcctgggattcctggagagcggctctggctccggcggtggcaccctgaagtacgtggaggatgtgacaaacgtggtcagacgggatgtggagaagtggggccccttcgatctggtgtacggcagcacccaacccctgggcagctcttgtgaccggtgccctggctggtacatgtttcagttccaccggatcctgcagtacgccctgccgagacaggagtcccagcggccattcttttggattttcatggacaacttgctgctgaccgaggatgaccaggaaactaccactcggttcctgcagaccgaagccgtgaccctgcaggacgtgagaggccgggactaccagaacgccatgcgggtgtggtccaacatccctggactgaaaagcaagcacgcacctctgacccctaaagaagaggagtacctgcaggcccaggtgcggagcagaagcaagctggacgcccctaaggtggatctgctggtgaagaattgcctcctgcccctgagagagtacttcaagtatttcagccagaatagtctgcccctgggcggcccaagcagcggcgcccctcctcccagcggcggcagcccagccggctccccaacctctaccgaggagggcacctctgagtccgccacccccgagagcggccctggcacctccaccgagcccagcgagggcagcgcacccggcagccctgccggcagccccacctccacagaggagggaaccagcaccgagcccagcgaaggcagcgccccaggcaccagcaccgagcctagtgagggcggctctggcggcggcagcgcccaggagattaaacggatcaacaagatcagaagaagacttgtgaaagacagcaacaccaagaaggccggcaagacaggccccatgaaaaccctgctggttagagtgatgacacccgatctgagagagcggctggaaaacctgagaaagaagcctgaaaatatcccccagcccatcagcaatacatctagagccaacctgaataagctgctgaccgattacaccgaaatgaagaaggcgatcctgcatgtgtactgggaagagttccagaaggaccctgtgggcctgatgagccgggtggcccagcctgccagcaagaagatcgatcagaacaagctgaaacctgagatggacgagaagggcaacctgaccaccgccggctttgcctgctctcagtgtggccagcccctgttcgtgtacaagctggagcaggtgtctgagaagggcaaggcttacaccaactacttcggacggtgcaatgtggccgagcacgaaaagctgatcctgctggcccagctgaagcccgagaaggatagcgacgaagccgtgacatatagcctgggaaagtttgggcagagggccctggatttctacagcattcatgtgaccaaggagtccacccaccccgtgaagcccctggcccagatcgccggaaacagatacgcctccggacctgtgggaaaggccctgagcgacgcatgtatgggcacaatcgcctccttcctgtctaagtaccaggacatcatcatcgaacaccagaaggtggtgaagggcaaccagaagagactggagagcctgcgggagctggccggcaaggaaaacctggaataccctagcgtgaccctgccacctcagcctcacaccaaggagggcgttgatgcctacaacgaagtgatcgcccgggtgcgaatgtgggtgaacctgaacctgtggcagaagctgaagctaagcagagatgatgccaagcctctgctgagactgaagggattcccttcctttcctctggtcgagagacaggccaacgaagtggactggtgggacatggtgtgtaacgtgaagaagctgatcaacgagaaaaaggaggatggcaaggtgttttggcagaatctggctggctacaagagacaggaagccctgagaccatacctgagcagcgaggaagatcggaagaagggaaagaaattcgctcggtaccagctgggcgacctgctgctgcacctggaaaagaagcacggcgaggactggggaaaggtgtacgacgaggcctgggagcggattgacaagaaagtggaaggcctgagcaagcacatcaagctggaagaggaacggagaagcgaggacgcccagagcaaggccgccctgaccgactggctgcgggctaaggccagcttcgtgatcgagggcctgaaggaggccgacaaggacgagttctgcagatgcgagctgaagctgcagaagtggtacggggacctgcggggaaagcccttcgccatcgaagccgagaacagcatcctggacatcagcggcttcagcaagcagtacaactgtgccttcatctggcagaaggacggcgtgaagaagctgaacctgtacctgatcatcaactacttcaagggcggcaagctgcggttcaagaagatcaaacctgaagccttcgaagccaacagattctacaccgtgatcaacaaaaagagcggcgagatcgtgcccatggaggtgaacttcaacttcgacgaccccaacctgatcatcctgcctctggcctttggcaagagacagggcagagaattcatctggaacgacctgctgtccctggaaaccggcagcctgaagctggccaacggaagagtgatcgagaagacactgtacaacagaagaacccggcaggatgagcctgccctgttcgtggccctgaccttcgagcggcgggaggtcctggactcctccaatatcaaaccaatgaacctgatcggcgtggcaagaggcgaaaacatccccgccgtgatcgccctgaccgaccccgagggctgcccactgagccggtttaaggatagcctgggaaacccaacccacatcctgagaatcggcgagagctataaggagaagcagcggaccatccaggccaagaaggaggtggagcagcggagagccggcggctacagccggaagtacgccagcaaagccaagaatctggcagacgatatggtgagaaacaccgctagagatctgctgtactacgccgtgacccaggatgccatgctgatcttcgccaacctgagccggggcttcggccggcagggcaagcggaccttcatggccgagagacagtacacacggatggaggactggctgaccgccaagctggcctacgagggcctgagcaagacctacctgtccaagacactggcccagtacacctccaagacatgcagcaactgtgggtttaccatcaccagcgccgactacgacagggtgctggagaagctgaagaagacagcaacaggctggatgaccacaattaacggcaaggagctgaaggtggagggccagattacctactacaacagatacaagagacagaacgtagtcaaggacctgtccgtcgagctggatagactgagcgaagaatctgtgaacaacgacatctcctcctggacaaagggcagaagcggagaagctctgagcctcctgaagaaaagattctcccatagacccgtgcaggagaagttcgtgtgcctgaactgcggcttcgagacacacgcagccgagcaagccgccctgaacatcgccagatcctggctgttcctgcggagccaggagtacaagaaataccagacaaacaagacaaccggcaacaccgataagagagccttcgtcgagacctggcagtccttttaccggaagaagcttaaggaggtgtggaaacctgccgtgcggtctggcggatctggcggaggctccacaagcatgatgttccaggacagcgtggccttcgaggacgtggccgtgaccttcacccaggaggagtgggccctgctggaccccagccagaagaacctgtacagggacgtgatgcaggagaccttcaagaacctggccagcatcggcaagaagtggaaggcccagaacatctacgtggagtacaagaacctgaggaggaacctgaggatcgtgggcgagaggctgttcgagagcaaggagggccaccagaccagccccaagaaaaagagaaaagtctaagctgccttctgcggggcttgccttctggccatgcccttcttctctcccttgcacctgtacctcttggtctttgaataaagcctgagtaggaaggctagcaaaaaaaaaaaaaaaaaaaaaaaaaaaaaaaaaaaaaaaaaaaaaaaaaaaaaaaaaaaaaaaaaaaaaaaaaaaaaaaa

SEQ ID NO: 6440 - RNA, 5797 nt, synthetic construct
  source 1..5797: mol_type = other RNA
aggaaataagagagaaaagaagagtaagaagaaatataagagccaccatggcccctaagaagaagcgtaaagtgagccggatggaacgcctcgtctacgaggtgcggcagaagtgcagaaacatcgaggacatctgcatctcctgcggatctctgaacgtgaccctggagcacccactgttcatcggcggcatgtgccagaactgtaaaaactgttttctggagtgtgcctatcaatacgacgatgacggctaccagagctactgcaccatctgttgcggcggaagagaggtgctgatgtgtggaaataacaactgctgccggtgcttctgcgtggaatgcgtggacctgctggtgggccccggcgccgcccaggccgctattaaggaagatccttggaactgctacatgtgcggccacaagggcacatacggcctgctgagacggagagaggactggcctagcagactgcagatgttcttcgccaataaccacgaccaggagttcgacccccctaaggtgtaccctcccgtccccgccgagaagagaaagcccatccgggtcctgagcctgttcgatggcatcgccaccggtctgctggtgctgaaggacctgggcatccaggtggataggtacattgcctccgaggtgtgcgaggactccatcaccgtgggaatggtgcgtcatcagggcaagatcatgtacgtgggcgacgtgcggagcgtgacacagaagcatatccaggagtggggccctttcgacctggtgatcggcggcagcccttgcaatgacctgagcatcgtgaacccagcccggaagggcctgtacgagggaaccggcagactgttcttcgagttttacagactgctgcacgacgcccggcctaaggaaggcgacgaccggcccttcttttggctgttcgagaatgtggtggccatgggagtcagcgacaagcgggatattagccggttcctggagagcaaccccgtgatgatcgatgccaaggaagtgagcgccgcccaccgggccagatacttctggggcaatctgcctggcatgaacagacccctggccagcaccgtgaacgacaagctggagctgcaggagtgcctggagcacggccggatcgccaagttcagcaaggtgagaaccatcaccacccgaagcaacagcatcaaacaaggcaaggaccagcactttcctgtgttcatgaacgagaaggaggacatcctgtggtgtaccgagatggagagagtgttcgggttcccagtccactacacagatgtcagcaacatgtctagactggccagacagagactgctgggaagaagctggtccgtccctgtgatcagacacctgttcgcccctctgaaggagtacttcgcctgcgtgagcagcggcaacagcaacgccaacagccggggccccagcttctctagcggcctggtgccactgtccctgagagggagccacatgggccccatggagatctacaaaaccgtgagcgcctggaagcggcagcctgtgcgcgtgctgagcctgtttcggaatatcgataaagtcctgaaaagcctgggattcctggagagcggctctggctccggcggtggcaccctgaagtacgtggaggatgtgacaaacgtggtcagacgggatgtggagaagtggggccccttcgatctggtgtacggcagcacccaacccctgggcagctcttgtgaccggtgccctggctggtacatgtttcagttccaccggatcctgcagtacgccctgccgagacaggagtcccagcggccattcttttggattttcatggacaacttgctgctgaccgaggatgaccaggaaactaccactcggttcctgcagaccgaagccgtgaccctgcaggacgtgagaggccgggactaccagaacgccatgcgggtgtggtccaacatccctggactgaaaagcaagcacgcacctctgacccctaaagaagaggagtacctgcaggcccaggtgcggagcagaagcaagctggacgcccctaaggtggatctgctggtgaagaattgcctcctgcccctgagagagtacttcaagtatttcagccagaatagtctgcccctgggcggcccaagcagcggcgcccctcctcccagcggcggcagcccagccggctccccaacctctaccgaggagggcacctctgagtccgccacccccgagagcggccctggcacctccaccgagcccagcgagggcagcgcacccggcagccctgccggcagccccacctccacagaggagggaaccagcaccgagcccagcgaaggcagcgccccaggcaccagcaccgagcctagtgagggcggctctggcggcggcagcgcccaggagattaaacggatcaacaagatcagaagaagacttgtgaaagacagcaacaccaagaaggccggcaagacaggccccatgaaaaccctgctggttagagtgatgacacccgatctgagagagcggctggaaaacctgagaaagaagcctgaaaatatcccccagcccatcagcaatacatctagagccaacctgaataagctgctgaccgattacaccgaaatgaagaaggcgatcctgcatgtgtactgggaagagttccagaaggaccctgtgggcctgatgagccgggtggcccagcctgccagcaagaagatcgatcagaacaagctgaaacctgagatggacgagaagggcaacctgaccaccgccggctttgcctgctctcagtgtggccagcccctgttcgtgtacaagctggagcaggtgtctgagaagggcaaggcttacaccaactacttcggacggtgcaatgtggccgagcacgaaaagctgatcctgctggcccagctgaagcccgagaaggatagcgacgaagccgtgacatatagcctgggaaagtttgggcagagggccctggatttctacagcattcatgtgaccaaggagtccacccaccccgtgaagcccctggcccagatcgccggaaacagatacgcctccggacctgtgggaaaggccctgagcgacgcatgtatgggcacaatcgcctccttcctgtctaagtaccaggacatcatcatcgaacaccagaaggtggtgaagggcaaccagaagagactggagagcctgcgggagctggccggcaaggaaaacctggaataccctagcgtgaccctgccacctcagcctcacaccaaggagggcgttgatgcctacaacgaagtgatcgcccgggtgcgaatgtgggtgaacctgaacctgtggcagaagctgaagctaagcagagatgatgccaagcctctgctgagactgaagggattcccttcctttcctctggtcgagagacaggccaacgaagtggactggtgggacatggtgtgtaacgtgaagaagctgatcaacgagaaaaaggaggatggcaaggtgttttggcagaatctggctggctacaagagacaggaagccctgagaccatacctgagcagcgaggaagatcggaagaagggaaagaaattcgctcggtaccagctgggcgacctgctgctgcacctggaaaagaagcacggcgaggactggggaaaggtgtacgacgaggcctgggagcggattgacaagaaagtggaaggcctgagcaagcacatcaagctggaagaggaacggagaagcgaggacgcccagagcaaggccgccctgaccgactggctgcgggctaaggccagcttcgtgatcgagggcctgaaggaggccgacaaggacgagttctgcagatgcgagctgaagctgcagaagtggtacggggacctgcggggaaagcccttcgccatcgaagccgagaacagcatcctggacatcagcggcttcagcaagcagtacaactgtgccttcatctggcagaaggacggcgtgaagaagctgaacctgtacctgatcatcaactacttcaagggcggcaagctgcggttcaagaagatcaaacctgaagccttcgaagccaacagattctacaccgtgatcaacaaaaagagcggcgagatcgtgcccatggaggtgaacttcaacttcgacgaccccaacctgatcatcctgcctctggcctttggcaagagacagggcagagaattcatctggaacgacctgctgtccctggaaaccggcagcctgaagctggccaacggaagagtgatcgagaagacactgtacaacagaagaacccggcaggatgagcctgccctgttcgtggccctgaccttcgagcggcgggaggtcctggactcctccaatatcaaaccaatgaacctgatcggcgtggcaagaggcgaaaacatccccgccgtgatcgccctgaccgaccccgagggctgcccactgagccggtttaaggatagcctgggaaacccaacccacatcctgagaatcggcgagagctataaggagaagcagcggaccatccaggccaagaaggaggtggagcagcggagagccggcggctacagccggaagtacgccagcaaagccaagaatctggcagacgatatggtgagaaacaccgctagagatctgctgtactacgccgtgacccaggatgccatgctgatcttcgccaacctgagccggggcttcggccggcagggcaagcggaccttcatggccgagagacagtacacacggatggaggactggctgaccgccaagctggcctacgagggcctgagcaagacctacctgtccaagacactggcccagtacacctccaagacatgcagcaactgtgggtttaccatcaccagcgccgactacgacagggtgctggagaagctgaagaagacagcaacaggctggatgaccacaattaacggcaaggagctgaaggtggagggccagattacctactacaacagatacaagagacagaacgtagtcaaggacctgtccgtcgagctggatagactgagcgaagaatctgtgaacaacgacatctcctcctggacaaagggcagaagcggagaagctctgagcctcctgaagaaaagattctcccatagacccgtgcaggagaagttcgtgtgcctgaactgcggcttcgagacacacgcagccgagcaagccgccctgaacatcgccagatcctggctgttcctgcggagccaggagtacaagaaataccagacaaacaagacaaccggcaacaccgataagagagccttcgtcgagacctggcagtccttttaccggaagaagcttaaggaggtgtggaaacctgccgtgcggtctggcggatctggcggaggctccacaagcggcctggtgatgttcaaggacgtggccatcgacgtgagccaggaggagtgggagtgcctgaaccccgcccagaggaacctgtacaaggacgtgatgctggagaactacagcaacctggtgagcctgggcctgagcgtgagcaagcccgccatgatcaccagcctggagcagggcaaggagccctggatggtgctgagggaggtgaccggcgagaggtgccccgacctggtgagcaagtgcgagaccagccccaagaaaaagagaaaagtctaagctgccttctgcggggcttgccttctggccatgcccttcttctctcccttgcacctgtacctcttggtctttgaataaagcctgagtaggaaggctagcaaaaaaaaaaaaaaaaaaaaaaaaaaaaaaaaaaaaaaaaaaaaaaaaaaaaaaaaaaaaaaaaaaaaaaaaaaaaaaaa

SEQ ID NO: 6441 - RNA, 5797 nt, synthetic construct
  source 1..5797: mol_type = other RNA
aggaaataagagagaaaagaagagtaagaagaaatataagagccaccatggcccctaagaagaagcgtaaagtgagccggatggaacgcctcgtctacgaggtgcggcagaagtgcagaaacatcgaggacatctgcatctcctgcggatctctgaacgtgaccctggagcacccactgttcatcggcggcatgtgccagaactgtaaaaactgttttctggagtgtgcctatcaatacgacgatgacggctaccagagctactgcaccatctgttgcggcggaagagaggtgctgatgtgtggaaataacaactgctgccggtgcttctgcgtggaatgcgtggacctgctggtgggccccggcgccgcccaggccgctattaaggaagatccttggaactgctacatgtgcggccacaagggcacatacggcctgctgagacggagagaggactggcctagcagactgcagatgttcttcgccaataaccacgaccaggagttcgacccccctaaggtgtaccctcccgtccccgccgagaagagaaagcccatccgggtcctgagcctgttcgatggcatcgccaccggtctgctggtgctgaaggacctgggcatccaggtggataggtacattgcctccgaggtgtgcgaggactccatcaccgtgggaatggtgcgtcatcagggcaagatcatgtacgtgggcgacgtgcggagcgtgacacagaagcatatccaggagtggggccctttcgacctggtgatcggcggcagcccttgcaatgacctgagcatcgtgaacccagcccggaagggcctgtacgagggaaccggcagactgttcttcgagttttacagactgctgcacgacgcccggcctaaggaaggcgacgaccggcccttcttttggctgttcgagaatgtggtggccatgggagtcagcgacaagcgggatattagccggttcctggagagcaaccccgtgatgatcgatgccaaggaagtgagcgccgcccaccgggccagatacttctggggcaatctgcctggcatgaacagacccctggccagcaccgtgaacgacaagctggagctgcaggagtgcctggagcacggccggatcgccaagttcagcaaggtgagaaccatcaccacccgaagcaacagcatcaaacaaggcaaggaccagcactttcctgtgttcatgaacgagaaggaggacatcctgtggtgtaccgagatggagagagtgttcgggttcccagtccactacacagatgtcagcaacatgtctagactggccagacagagactgctgggaagaagctggtccgtccctgtgatcagacacctgttcgcccctctgaaggagtacttcgcctgcgtgagcagcggcaacagcaacgccaacagccggggccccagcttctctagcggcctggtgccactgtccctgagagggagccacatgggccccatggagatctacaaaaccgtgagcgcctggaagcggcagcctgtgcgcgtgctgagcctgtttcggaatatcgataaagtcctgaaaagcctgggattcctggagagcggctctggctccggcggtggcaccctgaagtacgtggaggatgtgacaaacgtggtcagacgggatgtggagaagtggggccccttcgatctggtgtacggcagcacccaacccctgggcagctcttgtgaccggtgccctggctggtacatgtttcagttccaccggatcctgcagtacgccctgccgagacaggagtcccagcggccattcttttggattttcatggacaacttgctgctgaccgaggatgaccaggaaactaccactcggttcctgcagaccgaagccgtgaccctgcaggacgtgagaggccgggactaccagaacgccatgcgggtgtggtccaacatccctggactgaaaagcaagcacgcacctctgacccctaaagaagaggagtacctgcaggcccaggtgcggagcagaagcaagctggacgcccctaaggtggatctgctggtgaagaattgcctcctgcccctgagagagtacttcaagtatttcagccagaatagtctgcccctgggcggcccaagcagcggcgcccctcctcccagcggcggcagcccagccggctccccaacctctaccgaggagggcacctctgagtccgccacccccgagagcggccctggcacctccaccgagcccagcgagggcagcgcacccggcagccctgccggcagccccacctccacagaggagggaaccagcaccgagcccagcgaaggcagcgccccaggcaccagcaccgagcctagtgagggcggctctggcggcggcagcgcccaggagattaaacggatcaacaagatcagaagaagacttgtgaaagacagcaacaccaagaaggccggcaagacaggccccatgaaaaccctgctggttagagtgatgacacccgatctgagagagcggctggaaaacctgagaaagaagcctgaaaatatcccccagcccatcagcaatacatctagagccaacctgaataagctgctgaccgattacaccgaaatgaagaaggcgatcctgcatgtgtactgggaagagttccagaaggaccctgtgggcctgatgagccgggtggcccagcctgccagcaagaagatcgatcagaacaagctgaaacctgagatggacgagaagggcaacctgaccaccgccggctttgcctgctctcagtgtggccagcccctgttcgtgtacaagctggagcaggtgtctgagaagggcaaggcttacaccaactacttcggacggtgcaatgtggccgagcacgaaaagctgatcctgctggcccagctgaagcccgagaaggatagcgacgaagccgtgacatatagcctgggaaagtttgggcagagggccctggatttctacagcattcatgtgaccaaggagtccacccaccccgtgaagcccctggcccagatcgccggaaacagatacgcctccggacctgtgggaaaggccctgagcgacgcatgtatgggcacaatcgcctccttcctgtctaagtaccaggacatcatcatcgaacaccagaaggtggtgaagggcaaccagaagagactggagagcctgcgggagctggccggcaaggaaaacctggaataccctagcgtgaccctgccacctcagcctcacaccaaggagggcgttgatgcctacaacgaagtgatcgcccgggtgcgaatgtgggtgaacctgaacctgtggcagaagctgaagctaagcagagatgatgccaagcctctgctgagactgaagggattcccttcctttcctctggtcgagagacaggccaacgaagtggactggtgggacatggtgtgtaacgtgaagaagctgatcaacgagaaaaaggaggatggcaaggtgttttggcagaatctggctggctacaagagacaggaagccctgagaccatacctgagcagcgaggaagatcggaagaagggaaagaaattcgctcggtaccagctgggcgacctgctgctgcacctggaaaagaagcacggcgaggactggggaaaggtgtacgacgaggcctgggagcggattgacaagaaagtggaaggcctgagcaagcacatcaagctggaagaggaacggagaagcgaggacgcccagagcaaggccgccctgaccgactggctgcgggctaaggccagcttcgtgatcgagggcctgaaggaggccgacaaggacgagttctgcagatgcgagctgaagctgcagaagtggtacggggacctgcggggaaagcccttcgccatcgaagccgagaacagcatcctggacatcagcggcttcagcaagcagtacaactgtgccttcatctggcagaaggacggcgtgaagaagctgaacctgtacctgatcatcaactacttcaagggcggcaagctgcggttcaagaagatcaaacctgaagccttcgaagccaacagattctacaccgtgatcaacaaaaagagcggcgagatcgtgcccatggaggtgaacttcaacttcgacgaccccaacctgatcatcctgcctctggcctttggcaagagacagggcagagaattcatctggaacgacctgctgtccctggaaaccggcagcctgaagctggccaacggaagagtgatcgagaagacactgtacaacagaagaacccggcaggatgagcctgccctgttcgtggccctgaccttcgagcggcgggaggtcctggactcctccaatatcaaaccaatgaacctgatcggcgtggcaagaggcgaaaacatccccgccgtgatcgccctgaccgaccccgagggctgcccactgagccggtttaaggatagcctgggaaacccaacccacatcctgagaatcggcgagagctataaggagaagcagcggaccatccaggccaagaaggaggtggagcagcggagagccggcggctacagccggaagtacgccagcaaagccaagaatctggcagacgatatggtgagaaacaccgctagagatctgctgtactacgccgtgacccaggatgccatgctgatcttcgccaacctgagccggggcttcggccggcagggcaagcggaccttcatggccgagagacagtacacacggatggaggactggctgaccgccaagctggcctacgagggcctgagcaagacctacctgtccaagacactggcccagtacacctccaagacatgcagcaactgtgggtttaccatcaccagcgccgactacgacagggtgctggagaagctgaagaagacagcaacaggctggatgaccacaattaacggcaaggagctgaaggtggagggccagattacctactacaacagatacaagagacagaacgtagtcaaggacctgtccgtcgagctggatagactgagcgaagaatctgtgaacaacgacatctcctcctggacaaagggcagaagcggagaagctctgagcctcctgaagaaaagattctcccatagacccgtgcaggagaagttcgtgtgcctgaactgcggcttcgagacacacgcagccgagcaagccgccctgaacatcgccagatcctggctgttcctgcggagccaggagtacaagaaataccagacaaacaagacaaccggcaacaccgataagagagccttcgtcgagacctggcagtccttttaccggaagaagcttaaggaggtgtggaaacctgccgtgcggtctggcggatctggcggaggctccacaagcgcccaggagaccgtgaccttcaaggacgtggccgtggacttcacccaggaggagtggggccagctggaccccgtgcagaggaccctgtacagggacgtgatgctggagacctacggccacctgctgagcgtgggcaaccagatcgccaagcccgaggtgatcagcctgctggagcagggcgaggagccctggagcatggagagggtgtaccccccccagaggacctgccccgagtggatgaggaccagccccaagaaaaagagaaaagtctaagctgccttctgcggggcttgccttctggccatgcccttcttctctcccttgcacctgtacctcttggtctttgaataaagcctgagtaggaaggctagcaaaaaaaaaaaaaaaaaaaaaaaaaaaaaaaaaaaaaaaaaaaaaaaaaaaaaaaaaaaaaaaaaaaaaaaaaaaaaaaa

SEQ ID NO: 6442 - RNA, 5797 nt, synthetic construct
  source 1..5797: mol_type = other RNA
aggaaataagagagaaaagaagagtaagaagaaatataagagccaccatggcccctaagaagaagcgtaaagtgagccggatggaacgcctcgtctacgaggtgcggcagaagtgcagaaacatcgaggacatctgcatctcctgcggatctctgaacgtgaccctggagcacccactgttcatcggcggcatgtgccagaactgtaaaaactgttttctggagtgtgcctatcaatacgacgatgacggctaccagagctactgcaccatctgttgcggcggaagagaggtgctgatgtgtggaaataacaactgctgccggtgcttctgcgtggaatgcgtggacctgctggtgggccccggcgccgcccaggccgctattaaggaagatccttggaactgctacatgtgcggccacaagggcacatacggcctgctgagacggagagaggactggcctagcagactgcagatgttcttcgccaataaccacgaccaggagttcgacccccctaaggtgtaccctcccgtccccgccgagaagagaaagcccatccgggtcctgagcctgttcgatggcatcgccaccggtctgctggtgctgaaggacctgggcatccaggtggataggtacattgcctccgaggtgtgcgaggactccatcaccgtgggaatggtgcgtcatcagggcaagatcatgtacgtgggcgacgtgcggagcgtgacacagaagcatatccaggagtggggccctttcgacctggtgatcggcggcagcccttgcaatgacctgagcatcgtgaacccagcccggaagggcctgtacgagggaaccggcagactgttcttcgagttttacagactgctgcacgacgcccggcctaaggaaggcgacgaccggcccttcttttggctgttcgagaatgtggtggccatgggagtcagcgacaagcgggatattagccggttcctggagagcaaccccgtgatgatcgatgccaaggaagtgagcgccgcccaccgggccagatacttctggggcaatctgcctggcatgaacagacccctggccagcaccgtgaacgacaagctggagctgcaggagtgcctggagcacggccggatcgccaagttcagcaaggtgagaaccatcaccacccgaagcaacagcatcaaacaaggcaaggaccagcactttcctgtgttcatgaacgagaaggaggacatcctgtggtgtaccgagatggagagagtgttcgggttcccagtccactacacagatgtcagcaacatgtctagactggccagacagagactgctgggaagaagctggtccgtccctgtgatcagacacctgttcgcccctctgaaggagtacttcgcctgcgtgagcagcggcaacagcaacgccaacagccggggccccagcttctctagcggcctggtgccactgtccctgagagggagccacatgggccccatggagatctacaaaaccgtgagcgcctggaagcggcagcctgtgcgcgtgctgagcctgtttcggaatatcgataaagtcctgaaaagcctgggattcctggagagcggctctggctccggcggtggcaccctgaagtacgtggaggatgtgacaaacgtggtcagacgggatgtggagaagtggggccccttcgatctggtgtacggcagcacccaacccctgggcagctcttgtgaccggtgccctggctggtacatgtttcagttccaccggatcctgcagtacgccctgccgagacaggagtcccagcggccattcttttggattttcatggacaacttgctgctgaccgaggatgaccaggaaactaccactcggttcctgcagaccgaagccgtgaccctgcaggacgtgagaggccgggactaccagaacgccatgcgggtgtggtccaacatccctggactgaaaagcaagcacgcacctctgacccctaaagaagaggagtacctgcaggcccaggtgcggagcagaagcaagctggacgcccctaaggtggatctgctggtgaagaattgcctcctgcccctgagagagtacttcaagtatttcagccagaatagtctgcccctgggcggcccaagcagcggcgcccctcctcccagcggcggcagcccagccggctccccaacctctaccgaggagggcacctctgagtccgccacccccgagagcggccctggcacctccaccgagcccagcgagggcagcgcacccggcagccctgccggcagccccacctccacagaggagggaaccagcaccgagcccagcgaaggcagcgccccaggcaccagcaccgagcctagtgagggcggctctggcggcggcagcgcccaggagattaaacggatcaacaagatcagaagaagacttgtgaaagacagcaacaccaagaaggccggcaagacaggccccatgaaaaccctgctggttagagtgatgacacccgatctgagagagcggctggaaaacctgagaaagaagcctgaaaatatcccccagcccatcagcaatacatctagagccaacctgaataagctgctgaccgattacaccgaaatgaagaaggcgatcctgcatgtgtactgggaagagttccagaaggaccctgtgggcctgatgagccgggtggcccagcctgccagcaagaagatcgatcagaacaagctgaaacctgagatggacgagaagggcaacctgaccaccgccggctttgcctgctctcagtgtggccagcccctgttcgtgtacaagctggagcaggtgtctgagaagggcaaggcttacaccaactacttcggacggtgcaatgtggccgagcacgaaaagctgatcctgctggcccagctgaagcccgagaaggatagcgacgaagccgtgacatatagcctgggaaagtttgggcagagggccctggatttctacagcattcatgtgaccaaggagtccacccaccccgtgaagcccctggcccagatcgccggaaacagatacgcctccggacctgtgggaaaggccctgagcgacgcatgtatgggcacaatcgcctccttcctgtctaagtaccaggacatcatcatcgaacaccagaaggtggtgaagggcaaccagaagagactggagagcctgcgggagctggccggcaaggaaaacctggaataccctagcgtgaccctgccacctcagcctcacaccaaggagggcgttgatgcctacaacgaagtgatcgcccgggtgcgaatgtgggtgaacctgaacctgtggcagaagctgaagctaagcagagatgatgccaagcctctgctgagactgaagggattcccttcctttcctctggtcgagagacaggccaacgaagtggactggtgggacatggtgtgtaacgtgaagaagctgatcaacgagaaaaaggaggatggcaaggtgttttggcagaatctggctggctacaagagacaggaagccctgagaccatacctgagcagcgaggaagatcggaagaagggaaagaaattcgctcggtaccagctgggcgacctgctgctgcacctggaaaagaagcacggcgaggactggggaaaggtgtacgacgaggcctgggagcggattgacaagaaagtggaaggcctgagcaagcacatcaagctggaagaggaacggagaagcgaggacgcccagagcaaggccgccctgaccgactggctgcgggctaaggccagcttcgtgatcgagggcctgaaggaggccgacaaggacgagttctgcagatgcgagctgaagctgcagaagtggtacggggacctgcggggaaagcccttcgccatcgaagccgagaacagcatcctggacatcagcggcttcagcaagcagtacaactgtgccttcatctggcagaaggacggcgtgaagaagctgaacctgtacctgatcatcaactacttcaagggcggcaagctgcggttcaagaagatcaaacctgaagccttcgaagccaacagattctacaccgtgatcaacaaaaagagcggcgagatcgtgcccatggaggtgaacttcaacttcgacgaccccaacctgatcatcctgcctctggcctttggcaagagacagggcagagaattcatctggaacgacctgctgtccctggaaaccggcagcctgaagctggccaacggaagagtgatcgagaagacactgtacaacagaagaacccggcaggatgagcctgccctgttcgtggccctgaccttcgagcggcgggaggtcctggactcctccaatatcaaaccaatgaacctgatcggcgtggcaagaggcgaaaacatccccgccgtgatcgccctgaccgaccccgagggctgcccactgagccggtttaaggatagcctgggaaacccaacccacatcctgagaatcggcgagagctataaggagaagcagcggaccatccaggccaagaaggaggtggagcagcggagagccggcggctacagccggaagtacgccagcaaagccaagaatctggcagacgatatggtgagaaacaccgctagagatctgctgtactacgccgtgacccaggatgccatgctgatcttcgccaacctgagccggggcttcggccggcagggcaagcggaccttcatggccgagagacagtacacacggatggaggactggctgaccgccaagctggcctacgagggcctgagcaagacctacctgtccaagacactggcccagtacacctccaagacatgcagcaactgtgggtttaccatcaccagcgccgactacgacagggtgctggagaagctgaagaagacagcaacaggctggatgaccacaattaacggcaaggagctgaaggtggagggccagattacctactacaacagatacaagagacagaacgtagtcaaggacctgtccgtcgagctggatagactgagcgaagaatctgtgaacaacgacatctcctcctggacaaagggcagaagcggagaagctctgagcctcctgaagaaaagattctcccatagacccgtgcaggagaagttcgtgtgcctgaactgcggcttcgagacacacgcagccgagcaagccgccctgaacatcgccagatcctggctgttcctgcggagccaggagtacaagaaataccagacaaacaagacaaccggcaacaccgataagagagccttcgtcgagacctggcagtccttttaccggaagaagcttaaggaggtgtggaaacctgccgtgcggtctggcggatctggcggaggctccacaagcgccagggccagcctgagcttcgaggacgtggccgtgggcttcagctgggaggagtggcagctgctggcccccagccagaaggacctgtacagggacgtgatgctggagaactacaggaacctggtgagcgtgggctaccaggccagcaagcccgacagcgtgttccagctggagcagggcgagcccccctggatggtggagggcgccgcccagagccagacctgccagggctaccccgccaccaccagccccaagaaaaagagaaaagtctaagctgccttctgcggggcttgccttctggccatgcccttcttctctcccttgcacctgtacctcttggtctttgaataaagcctgagtaggaaggctagcaaaaaaaaaaaaaaaaaaaaaaaaaaaaaaaaaaaaaaaaaaaaaaaaaaaaaaaaaaaaaaaaaaaaaaaaaaaaaaaa

SEQ ID NO: 6443 - RNA, 5797 nt, synthetic construct
  source 1..5797: mol_type = other RNA
aggaaataagagagaaaagaagagtaagaagaaatataagagccaccatggcccctaagaagaagcgtaaagtgagccggatggaacgcctcgtctacgaggtgcggcagaagtgcagaaacatcgaggacatctgcatctcctgcggatctctgaacgtgaccctggagcacccactgttcatcggcggcatgtgccagaactgtaaaaactgttttctggagtgtgcctatcaatacgacgatgacggctaccagagctactgcaccatctgttgcggcggaagagaggtgctgatgtgtggaaataacaactgctgccggtgcttctgcgtggaatgcgtggacctgctggtgggccccggcgccgcccaggccgctattaaggaagatccttggaactgctacatgtgcggccacaagggcacatacggcctgctgagacggagagaggactggcctagcagactgcagatgttcttcgccaataaccacgaccaggagttcgacccccctaaggtgtaccctcccgtccccgccgagaagagaaagcccatccgggtcctgagcctgttcgatggcatcgccaccggtctgctggtgctgaaggacctgggcatccaggtggataggtacattgcctccgaggtgtgcgaggactccatcaccgtgggaatggtgcgtcatcagggcaagatcatgtacgtgggcgacgtgcggagcgtgacacagaagcatatccaggagtggggccctttcgacctggtgatcggcggcagcccttgcaatgacctgagcatcgtgaacccagcccggaagggcctgtacgagggaaccggcagactgttcttcgagttttacagactgctgcacgacgcccggcctaaggaaggcgacgaccggcccttcttttggctgttcgagaatgtggtggccatgggagtcagcgacaagcgggatattagccggttcctggagagcaaccccgtgatgatcgatgccaaggaagtgagcgccgcccaccgggccagatacttctggggcaatctgcctggcatgaacagacccctggccagcaccgtgaacgacaagctggagctgcaggagtgcctggagcacggccggatcgccaagttcagcaaggtgagaaccatcaccacccgaagcaacagcatcaaacaaggcaaggaccagcactttcctgtgttcatgaacgagaaggaggacatcctgtggtgtaccgagatggagagagtgttcgggttcccagtccactacacagatgtcagcaacatgtctagactggccagacagagactgctgggaagaagctggtccgtccctgtgatcagacacctgttcgcccctctgaaggagtacttcgcctgcgtgagcagcggcaacagcaacgccaacagccggggccccagcttctctagcggcctggtgccactgtccctgagagggagccacatgggccccatggagatctacaaaaccgtgagcgcctggaagcggcagcctgtgcgcgtgctgagcctgtttcggaatatcgataaagtcctgaaaagcctgggattcctggagagcggctctggctccggcggtggcaccctgaagtacgtggaggatgtgacaaacgtggtcagacgggatgtggagaagtggggccccttcgatctggtgtacggcagcacccaacccctgggcagctcttgtgaccggtgccctggctggtacatgtttcagttccaccggatcctgcagtacgccctgccgagacaggagtcccagcggccattcttttggattttcatggacaacttgctgctgaccgaggatgaccaggaaactaccactcggttcctgcagaccgaagccgtgaccctgcaggacgtgagaggccgggactaccagaacgccatgcgggtgtggtccaacatccctggactgaaaagcaagcacgcacctctgacccctaaagaagaggagtacctgcaggcccaggtgcggagcagaagcaagctggacgcccctaaggtggatctgctggtgaagaattgcctcctgcccctgagagagtacttcaagtatttcagccagaatagtctgcccctgggcggcccaagcagcggcgcccctcctcccagcggcggcagcccagccggctccccaacctctaccgaggagggcacctctgagtccgccacccccgagagcggccctggcacctccaccgagcccagcgagggcagcgcacccggcagccctgccggcagccccacctccacagaggagggaaccagcaccgagcccagcgaaggcagcgccccaggcaccagcaccgagcctagtgagggcggctctggcggcggcagcgcccaggagattaaacggatcaacaagatcagaagaagacttgtgaaagacagcaacaccaagaaggccggcaagacaggccccatgaaaaccctgctggttagagtgatgacacccgatctgagagagcggctggaaaacctgagaaagaagcctgaaaatatcccccagcccatcagcaatacatctagagccaacctgaataagctgctgaccgattacaccgaaatgaagaaggcgatcctgcatgtgtactgggaagagttccagaaggaccctgtgggcctgatgagccgggtggcccagcctgccagcaagaagatcgatcagaacaagctgaaacctgagatggacgagaagggcaacctgaccaccgccggctttgcctgctctcagtgtggccagcccctgttcgtgtacaagctggagcaggtgtctgagaagggcaaggcttacaccaactacttcggacggtgcaatgtggccgagcacgaaaagctgatcctgctggcccagctgaagcccgagaaggatagcgacgaagccgtgacatatagcctgggaaagtttgggcagagggccctggatttctacagcattcatgtgaccaaggagtccacccaccccgtgaagcccctggcccagatcgccggaaacagatacgcctccggacctgtgggaaaggccctgagcgacgcatgtatgggcacaatcgcctccttcctgtctaagtaccaggacatcatcatcgaacaccagaaggtggtgaagggcaaccagaagagactggagagcctgcgggagctggccggcaaggaaaacctggaataccctagcgtgaccctgccacctcagcctcacaccaaggagggcgttgatgcctacaacgaagtgatcgcccgggtgcgaatgtgggtgaacctgaacctgtggcagaagctgaagctaagcagagatgatgccaagcctctgctgagactgaagggattcccttcctttcctctggtcgagagacaggccaacgaagtggactggtgggacatggtgtgtaacgtgaagaagctgatcaacgagaaaaaggaggatggcaaggtgttttggcagaatctggctggctacaagagacaggaagccctgagaccatacctgagcagcgaggaagatcggaagaagggaaagaaattcgctcggtaccagctgggcgacctgctgctgcacctggaaaagaagcacggcgaggactggggaaaggtgtacgacgaggcctgggagcggattgacaagaaagtggaaggcctgagcaagcacatcaagctggaagaggaacggagaagcgaggacgcccagagcaaggccgccctgaccgactggctgcgggctaaggccagcttcgtgatcgagggcctgaaggaggccgacaaggacgagttctgcagatgcgagctgaagctgcagaagtggtacggggacctgcggggaaagcccttcgccatcgaagccgagaacagcatcctggacatcagcggcttcagcaagcagtacaactgtgccttcatctggcagaaggacggcgtgaagaagctgaacctgtacctgatcatcaactacttcaagggcggcaagctgcggttcaagaagatcaaacctgaagccttcgaagccaacagattctacaccgtgatcaacaaaaagagcggcgagatcgtgcccatggaggtgaacttcaacttcgacgaccccaacctgatcatcctgcctctggcctttggcaagagacagggcagagaattcatctggaacgacctgctgtccctggaaaccggcagcctgaagctggccaacggaagagtgatcgagaagacactgtacaacagaagaacccggcaggatgagcctgccctgttcgtggccctgaccttcgagcggcgggaggtcctggactcctccaatatcaaaccaatgaacctgatcggcgtggcaagaggcgaaaacatccccgccgtgatcgccctgaccgaccccgagggctgcccactgagccggtttaaggatagcctgggaaacccaacccacatcctgagaatcggcgagagctataaggagaagcagcggaccatccaggccaagaaggaggtggagcagcggagagccggcggctacagccggaagtacgccagcaaagccaagaatctggcagacgatatggtgagaaacaccgctagagatctgctgtactacgccgtgacccaggatgccatgctgatcttcgccaacctgagccggggcttcggccggcagggcaagcggaccttcatggccgagagacagtacacacggatggaggactggctgaccgccaagctggcctacgagggcctgagcaagacctacctgtccaagacactggcccagtacacctccaagacatgcagcaactgtgggtttaccatcaccagcgccgactacgacagggtgctggagaagctgaagaagacagcaacaggctggatgaccacaattaacggcaaggagctgaaggtggagggccagattacctactacaacagatacaagagacagaacgtagtcaaggacctgtccgtcgagctggatagactgagcgaagaatctgtgaacaacgacatctcctcctggacaaagggcagaagcggagaagctctgagcctcctgaagaaaagattctcccatagacccgtgcaggagaagttcgtgtgcctgaactgcggcttcgagacacacgcagccgagcaagccgccctgaacatcgccagatcctggctgttcctgcggagccaggagtacaagaaataccagacaaacaagacaaccggcaacaccgataagagagccttcgtcgagacctggcagtccttttaccggaagaagcttaaggaggtgtggaaacctgccgtgcggtctggcggatctggcggaggctccacaagcctgcaggtgagcgtgagcttcgaggacgtgaccgtggacttcagcagggaggagtggcagcacctggaccccgcccagaggaggctgtactgggacgtgaccctggagaactacagccacctgctgagcgtgggctaccaggtgcccaagcccgaggtgatcctgaagctggagcagggcgagggcccctggaccctggagggcgagaccccccaccagagctgcagcgacgaggacatcggcaccagccccaagaaaaagagaaaagtctaagctgccttctgcggggcttgccttctggccatgcccttcttctctcccttgcacctgtacctcttggtctttgaataaagcctgagtaggaaggctagcaaaaaaaaaaaaaaaaaaaaaaaaaaaaaaaaaaaaaaaaaaaaaaaaaaaaaaaaaaaaaaaaaaaaaaaaaaaaaaaa

SEQ ID NO: 6444 - RNA, 5797 nt, synthetic construct
  source 1..5797: mol_type = other RNA
aggaaataagagagaaaagaagagtaagaagaaatataagagccaccatggcccctaagaagaagcgtaaagtgagccggatggaacgcctcgtctacgaggtgcggcagaagtgcagaaacatcgaggacatctgcatctcctgcggatctctgaacgtgaccctggagcacccactgttcatcggcggcatgtgccagaactgtaaaaactgttttctggagtgtgcctatcaatacgacgatgacggctaccagagctactgcaccatctgttgcggcggaagagaggtgctgatgtgtggaaataacaactgctgccggtgcttctgcgtggaatgcgtggacctgctggtgggccccggcgccgcccaggccgctattaaggaagatccttggaactgctacatgtgcggccacaagggcacatacggcctgctgagacggagagaggactggcctagcagactgcagatgttcttcgccaataaccacgaccaggagttcgacccccctaaggtgtaccctcccgtccccgccgagaagagaaagcccatccgggtcctgagcctgttcgatggcatcgccaccggtctgctggtgctgaaggacctgggcatccaggtggataggtacattgcctccgaggtgtgcgaggactccatcaccgtgggaatggtgcgtcatcagggcaagatcatgtacgtgggcgacgtgcggagcgtgacacagaagcatatccaggagtggggccctttcgacctggtgatcggcggcagcccttgcaatgacctgagcatcgtgaacccagcccggaagggcctgtacgagggaaccggcagactgttcttcgagttttacagactgctgcacgacgcccggcctaaggaaggcgacgaccggcccttcttttggctgttcgagaatgtggtggccatgggagtcagcgacaagcgggatattagccggttcctggagagcaaccccgtgatgatcgatgccaaggaagtgagcgccgcccaccgggccagatacttctggggcaatctgcctggcatgaacagacccctggccagcaccgtgaacgacaagctggagctgcaggagtgcctggagcacggccggatcgccaagttcagcaaggtgagaaccatcaccacccgaagcaacagcatcaaacaaggcaaggaccagcactttcctgtgttcatgaacgagaaggaggacatcctgtggtgtaccgagatggagagagtgttcgggttcccagtccactacacagatgtcagcaacatgtctagactggccagacagagactgctgggaagaagctggtccgtccctgtgatcagacacctgttcgcccctctgaaggagtacttcgcctgcgtgagcagcggcaacagcaacgccaacagccggggccccagcttctctagcggcctggtgccactgtccctgagagggagccacatgggccccatggagatctacaaaaccgtgagcgcctggaagcggcagcctgtgcgcgtgctgagcctgtttcggaatatcgataaagtcctgaaaagcctgggattcctggagagcggctctggctccggcggtggcaccctgaagtacgtggaggatgtgacaaacgtggtcagacgggatgtggagaagtggggccccttcgatctggtgtacggcagcacccaacccctgggcagctcttgtgaccggtgccctggctggtacatgtttcagttccaccggatcctgcagtacgccctgccgagacaggagtcccagcggccattcttttggattttcatggacaacttgctgctgaccgaggatgaccaggaaactaccactcggttcctgcagaccgaagccgtgaccctgcaggacgtgagaggccgggactaccagaacgccatgcgggtgtggtccaacatccctggactgaaaagcaagcacgcacctctgacccctaaagaagaggagtacctgcaggcccaggtgcggagcagaagcaagctggacgcccctaaggtggatctgctggtgaagaattgcctcctgcccctgagagagtacttcaagtatttcagccagaatagtctgcccctgggcggcccaagcagcggcgcccctcctcccagcggcggcagcccagccggctccccaacctctaccgaggagggcacctctgagtccgccacccccgagagcggccctggcacctccaccgagcccagcgagggcagcgcacccggcagccctgccggcagccccacctccacagaggagggaaccagcaccgagcccagcgaaggcagcgccccaggcaccagcaccgagcctagtgagggcggctctggcggcggcagcgcccaggagattaaacggatcaacaagatcagaagaagacttgtgaaagacagcaacaccaagaaggccggcaagacaggccccatgaaaaccctgctggttagagtgatgacacccgatctgagagagcggctggaaaacctgagaaagaagcctgaaaatatcccccagcccatcagcaatacatctagagccaacctgaataagctgctgaccgattacaccgaaatgaagaaggcgatcctgcatgtgtactgggaagagttccagaaggaccctgtgggcctgatgagccgggtggcccagcctgccagcaagaagatcgatcagaacaagctgaaacctgagatggacgagaagggcaacctgaccaccgccggctttgcctgctctcagtgtggccagcccctgttcgtgtacaagctggagcaggtgtctgagaagggcaaggcttacaccaactacttcggacggtgcaatgtggccgagcacgaaaagctgatcctgctggcccagctgaagcccgagaaggatagcgacgaagccgtgacatatagcctgggaaagtttgggcagagggccctggatttctacagcattcatgtgaccaaggagtccacccaccccgtgaagcccctggcccagatcgccggaaacagatacgcctccggacctgtgggaaaggccctgagcgacgcatgtatgggcacaatcgcctccttcctgtctaagtaccaggacatcatcatcgaacaccagaaggtggtgaagggcaaccagaagagactggagagcctgcgggagctggccggcaaggaaaacctggaataccctagcgtgaccctgccacctcagcctcacaccaaggagggcgttgatgcctacaacgaagtgatcgcccgggtgcgaatgtgggtgaacctgaacctgtggcagaagctgaagctaagcagagatgatgccaagcctctgctgagactgaagggattcccttcctttcctctggtcgagagacaggccaacgaagtggactggtgggacatggtgtgtaacgtgaagaagctgatcaacgagaaaaaggaggatggcaaggtgttttggcagaatctggctggctacaagagacaggaagccctgagaccatacctgagcagcgaggaagatcggaagaagggaaagaaattcgctcggtaccagctgggcgacctgctgctgcacctggaaaagaagcacggcgaggactggggaaaggtgtacgacgaggcctgggagcggattgacaagaaagtggaaggcctgagcaagcacatcaagctggaagaggaacggagaagcgaggacgcccagagcaaggccgccctgaccgactggctgcgggctaaggccagcttcgtgatcgagggcctgaaggaggccgacaaggacgagttctgcagatgcgagctgaagctgcagaagtggtacggggacctgcggggaaagcccttcgccatcgaagccgagaacagcatcctggacatcagcggcttcagcaagcagtacaactgtgccttcatctggcagaaggacggcgtgaagaagctgaacctgtacctgatcatcaactacttcaagggcggcaagctgcggttcaagaagatcaaacctgaagccttcgaagccaacagattctacaccgtgatcaacaaaaagagcggcgagatcgtgcccatggaggtgaacttcaacttcgacgaccccaacctgatcatcctgcctctggcctttggcaagagacagggcagagaattcatctggaacgacctgctgtccctggaaaccggcagcctgaagctggccaacggaagagtgatcgagaagacactgtacaacagaagaacccggcaggatgagcctgccctgttcgtggccctgaccttcgagcggcgggaggtcctggactcctccaatatcaaaccaatgaacctgatcggcgtggcaagaggcgaaaacatccccgccgtgatcgccctgaccgaccccgagggctgcccactgagccggtttaaggatagcctgggaaacccaacccacatcctgagaatcggcgagagctataaggagaagcagcggaccatccaggccaagaaggaggtggagcagcggagagccggcggctacagccggaagtacgccagcaaagccaagaatctggcagacgatatggtgagaaacaccgctagagatctgctgtactacgccgtgacccaggatgccatgctgatcttcgccaacctgagccggggcttcggccggcagggcaagcggaccttcatggccgagagacagtacacacggatggaggactggctgaccgccaagctggcctacgagggcctgagcaagacctacctgtccaagacactggcccagtacacctccaagacatgcagcaactgtgggtttaccatcaccagcgccgactacgacagggtgctggagaagctgaagaagacagcaacaggctggatgaccacaattaacggcaaggagctgaaggtggagggccagattacctactacaacagatacaagagacagaacgtagtcaaggacctgtccgtcgagctggatagactgagcgaagaatctgtgaacaacgacatctcctcctggacaaagggcagaagcggagaagctctgagcctcctgaagaaaagattctcccatagacccgtgcaggagaagttcgtgtgcctgaactgcggcttcgagacacacgcagccgagcaagccgccctgaacatcgccagatcctggctgttcctgcggagccaggagtacaagaaataccagacaaacaagacaaccggcaacaccgataagagagccttcgtcgagacctggcagtccttttaccggaagaagcttaaggaggtgtggaaacctgccgtgcggtctggcggatctggcggaggctccacaagcagctggggccccctgagcttcatggacgtgttcgtggacttcacctgggaggagtggcagctgctggaccccgcccagaagtgcctgtacaggagcgtgatgctggagaactacagcaacctggtgagcctgggctaccagcacaccaagcccgacatcatcttcaagctggagcagggcgaggagctgtgcatggtgcaggcccaggtgcccaaccagacctgccccaacaccgtgtggaagaccagccccaagaaaaagagaaaagtctaagctgccttctgcggggcttgccttctggccatgcccttcttctctcccttgcacctgtacctcttggtctttgaataaagcctgagtaggaaggctagcaaaaaaaaaaaaaaaaaaaaaaaaaaaaaaaaaaaaaaaaaaaaaaaaaaaaaaaaaaaaaaaaaaaaaaaaaaaaaaaa

SEQ ID NO: 6445 - RNA, 5797 nt, synthetic construct
  source 1..5797: mol_type = other RNA
aggaaataagagagaaaagaagagtaagaagaaatataagagccaccatggcccctaagaagaagcgtaaagtgagccggatggaacgcctcgtctacgaggtgcggcagaagtgcagaaacatcgaggacatctgcatctcctgcggatctctgaacgtgaccctggagcacccactgttcatcggcggcatgtgccagaactgtaaaaactgttttctggagtgtgcctatcaatacgacgatgacggctaccagagctactgcaccatctgttgcggcggaagagaggtgctgatgtgtggaaataacaactgctgccggtgcttctgcgtggaatgcgtggacctgctggtgggccccggcgccgcccaggccgctattaaggaagatccttggaactgctacatgtgcggccacaagggcacatacggcctgctgagacggagagaggactggcctagcagactgcagatgttcttcgccaataaccacgaccaggagttcgacccccctaaggtgtaccctcccgtccccgccgagaagagaaagcccatccgggtcctgagcctgttcgatggcatcgccaccggtctgctggtgctgaaggacctgggcatccaggtggataggtacattgcctccgaggtgtgcgaggactccatcaccgtgggaatggtgcgtcatcagggcaagatcatgtacgtgggcgacgtgcggagcgtgacacagaagcatatccaggagtggggccctttcgacctggtgatcggcggcagcccttgcaatgacctgagcatcgtgaacccagcccggaagggcctgtacgagggaaccggcagactgttcttcgagttttacagactgctgcacgacgcccggcctaaggaaggcgacgaccggcccttcttttggctgttcgagaatgtggtggccatgggagtcagcgacaagcgggatattagccggttcctggagagcaaccccgtgatgatcgatgccaaggaagtgagcgccgcccaccgggccagatacttctggggcaatctgcctggcatgaacagacccctggccagcaccgtgaacgacaagctggagctgcaggagtgcctggagcacggccggatcgccaagttcagcaaggtgagaaccatcaccacccgaagcaacagcatcaaacaaggcaaggaccagcactttcctgtgttcatgaacgagaaggaggacatcctgtggtgtaccgagatggagagagtgttcgggttcccagtccactacacagatgtcagcaacatgtctagactggccagacagagactgctgggaagaagctggtccgtccctgtgatcagacacctgttcgcccctctgaaggagtacttcgcctgcgtgagcagcggcaacagcaacgccaacagccggggccccagcttctctagcggcctggtgccactgtccctgagagggagccacatgggccccatggagatctacaaaaccgtgagcgcctggaagcggcagcctgtgcgcgtgctgagcctgtttcggaatatcgataaagtcctgaaaagcctgggattcctggagagcggctctggctccggcggtggcaccctgaagtacgtggaggatgtgacaaacgtggtcagacgggatgtggagaagtggggccccttcgatctggtgtacggcagcacccaacccctgggcagctcttgtgaccggtgccctggctggtacatgtttcagttccaccggatcctgcagtacgccctgccgagacaggagtcccagcggccattcttttggattttcatggacaacttgctgctgaccgaggatgaccaggaaactaccactcggttcctgcagaccgaagccgtgaccctgcaggacgtgagaggccgggactaccagaacgccatgcgggtgtggtccaacatccctggactgaaaagcaagcacgcacctctgacccctaaagaagaggagtacctgcaggcccaggtgcggagcagaagcaagctggacgcccctaaggtggatctgctggtgaagaattgcctcctgcccctgagagagtacttcaagtatttcagccagaatagtctgcccctgggcggcccaagcagcggcgcccctcctcccagcggcggcagcccagccggctccccaacctctaccgaggagggcacctctgagtccgccacccccgagagcggccctggcacctccaccgagcccagcgagggcagcgcacccggcagccctgccggcagccccacctccacagaggagggaaccagcaccgagcccagcgaaggcagcgccccaggcaccagcaccgagcctagtgagggcggctctggcggcggcagcgcccaggagattaaacggatcaacaagatcagaagaagacttgtgaaagacagcaacaccaagaaggccggcaagacaggccccatgaaaaccctgctggttagagtgatgacacccgatctgagagagcggctggaaaacctgagaaagaagcctgaaaatatcccccagcccatcagcaatacatctagagccaacctgaataagctgctgaccgattacaccgaaatgaagaaggcgatcctgcatgtgtactgggaagagttccagaaggaccctgtgggcctgatgagccgggtggcccagcctgccagcaagaagatcgatcagaacaagctgaaacctgagatggacgagaagggcaacctgaccaccgccggctttgcctgctctcagtgtggccagcccctgttcgtgtacaagctggagcaggtgtctgagaagggcaaggcttacaccaactacttcggacggtgcaatgtggccgagcacgaaaagctgatcctgctggcccagctgaagcccgagaaggatagcgacgaagccgtgacatatagcctgggaaagtttgggcagagggccctggatttctacagcattcatgtgaccaaggagtccacccaccccgtgaagcccctggcccagatcgccggaaacagatacgcctccggacctgtgggaaaggccctgagcgacgcatgtatgggcacaatcgcctccttcctgtctaagtaccaggacatcatcatcgaacaccagaaggtggtgaagggcaaccagaagagactggagagcctgcgggagctggccggcaaggaaaacctggaataccctagcgtgaccctgccacctcagcctcacaccaaggagggcgttgatgcctacaacgaagtgatcgcccgggtgcgaatgtgggtgaacctgaacctgtggcagaagctgaagctaagcagagatgatgccaagcctctgctgagactgaagggattcccttcctttcctctggtcgagagacaggccaacgaagtggactggtgggacatggtgtgtaacgtgaagaagctgatcaacgagaaaaaggaggatggcaaggtgttttggcagaatctggctggctacaagagacaggaagccctgagaccatacctgagcagcgaggaagatcggaagaagggaaagaaattcgctcggtaccagctgggcgacctgctgctgcacctggaaaagaagcacggcgaggactggggaaaggtgtacgacgaggcctgggagcggattgacaagaaagtggaaggcctgagcaagcacatcaagctggaagaggaacggagaagcgaggacgcccagagcaaggccgccctgaccgactggctgcgggctaaggccagcttcgtgatcgagggcctgaaggaggccgacaaggacgagttctgcagatgcgagctgaagctgcagaagtggtacggggacctgcggggaaagcccttcgccatcgaagccgagaacagcatcctggacatcagcggcttcagcaagcagtacaactgtgccttcatctggcagaaggacggcgtgaagaagctgaacctgtacctgatcatcaactacttcaagggcggcaagctgcggttcaagaagatcaaacctgaagccttcgaagccaacagattctacaccgtgatcaacaaaaagagcggcgagatcgtgcccatggaggtgaacttcaacttcgacgaccccaacctgatcatcctgcctctggcctttggcaagagacagggcagagaattcatctggaacgacctgctgtccctggaaaccggcagcctgaagctggccaacggaagagtgatcgagaagacactgtacaacagaagaacccggcaggatgagcctgccctgttcgtggccctgaccttcgagcggcgggaggtcctggactcctccaatatcaaaccaatgaacctgatcggcgtggcaagaggcgaaaacatccccgccgtgatcgccctgaccgaccccgagggctgcccactgagccggtttaaggatagcctgggaaacccaacccacatcctgagaatcggcgagagctataaggagaagcagcggaccatccaggccaagaaggaggtggagcagcggagagccggcggctacagccggaagtacgccagcaaagccaagaatctggcagacgatatggtgagaaacaccgctagagatctgctgtactacgccgtgacccaggatgccatgctgatcttcgccaacctgagccggggcttcggccggcagggcaagcggaccttcatggccgagagacagtacacacggatggaggactggctgaccgccaagctggcctacgagggcctgagcaagacctacctgtccaagacactggcccagtacacctccaagacatgcagcaactgtgggtttaccatcaccagcgccgactacgacagggtgctggagaagctgaagaagacagcaacaggctggatgaccacaattaacggcaaggagctgaaggtggagggccagattacctactacaacagatacaagagacagaacgtagtcaaggacctgtccgtcgagctggatagactgagcgaagaatctgtgaacaacgacatctcctcctggacaaagggcagaagcggagaagctctgagcctcctgaagaaaagattctcccatagacccgtgcaggagaagttcgtgtgcctgaactgcggcttcgagacacacgcagccgagcaagccgccctgaacatcgccagatcctggctgttcctgcggagccaggagtacaagaaataccagacaaacaagacaaccggcaacaccgataagagagccttcgtcgagacctggcagtccttttaccggaagaagcttaaggaggtgtggaaacctgccgtgcggtctggcggatctggcggaggctccacaagcgcccaggtggccttcgaggacgtggccgtgtacttcaccgaggagcagtgggccctgctggaccacagccagagggccctgtacagggacgtgatgcaggagaactacgagaccgtggccagcctgggcctgcccatccccggccccgacagcatcagcaggctgcagcagagggaggagagcaggatcgaggcccagcccgtgctggagggcaacgacgtgagcagcgacgacgacctgggcaccagccccaagaaaaagagaaaagtctaagctgccttctgcggggcttgccttctggccatgcccttcttctctcccttgcacctgtacctcttggtctttgaataaagcctgagtaggaaggctagcaaaaaaaaaaaaaaaaaaaaaaaaaaaaaaaaaaaaaaaaaaaaaaaaaaaaaaaaaaaaaaaaaaaaaaaaaaaaaaaa

SEQ ID NO: 6446 - RNA, 5797 nt, synthetic construct
  source 1..5797: mol_type = other RNA
aggaaataagagagaaaagaagagtaagaagaaatataagagccaccatggcccctaagaagaagcgtaaagtgagccggatggaacgcctcgtctacgaggtgcggcagaagtgcagaaacatcgaggacatctgcatctcctgcggatctctgaacgtgaccctggagcacccactgttcatcggcggcatgtgccagaactgtaaaaactgttttctggagtgtgcctatcaatacgacgatgacggctaccagagctactgcaccatctgttgcggcggaagagaggtgctgatgtgtggaaataacaactgctgccggtgcttctgcgtggaatgcgtggacctgctggtgggccccggcgccgcccaggccgctattaaggaagatccttggaactgctacatgtgcggccacaagggcacatacggcctgctgagacggagagaggactggcctagcagactgcagatgttcttcgccaataaccacgaccaggagttcgacccccctaaggtgtaccctcccgtccccgccgagaagagaaagcccatccgggtcctgagcctgttcgatggcatcgccaccggtctgctggtgctgaaggacctgggcatccaggtggataggtacattgcctccgaggtgtgcgaggactccatcaccgtgggaatggtgcgtcatcagggcaagatcatgtacgtgggcgacgtgcggagcgtgacacagaagcatatccaggagtggggccctttcgacctggtgatcggcggcagcccttgcaatgacctgagcatcgtgaacccagcccggaagggcctgtacgagggaaccggcagactgttcttcgagttttacagactgctgcacgacgcccggcctaaggaaggcgacgaccggcccttcttttggctgttcgagaatgtggtggccatgggagtcagcgacaagcgggatattagccggttcctggagagcaaccccgtgatgatcgatgccaaggaagtgagcgccgcccaccgggccagatacttctggggcaatctgcctggcatgaacagacccctggccagcaccgtgaacgacaagctggagctgcaggagtgcctggagcacggccggatcgccaagttcagcaaggtgagaaccatcaccacccgaagcaacagcatcaaacaaggcaaggaccagcactttcctgtgttcatgaacgagaaggaggacatcctgtggtgtaccgagatggagagagtgttcgggttcccagtccactacacagatgtcagcaacatgtctagactggccagacagagactgctgggaagaagctggtccgtccctgtgatcagacacctgttcgcccctctgaaggagtacttcgcctgcgtgagcagcggcaacagcaacgccaacagccggggccccagcttctctagcggcctggtgccactgtccctgagagggagccacatgggccccatggagatctacaaaaccgtgagcgcctggaagcggcagcctgtgcgcgtgctgagcctgtttcggaatatcgataaagtcctgaaaagcctgggattcctggagagcggctctggctccggcggtggcaccctgaagtacgtggaggatgtgacaaacgtggtcagacgggatgtggagaagtggggccccttcgatctggtgtacggcagcacccaacccctgggcagctcttgtgaccggtgccctggctggtacatgtttcagttccaccggatcctgcagtacgccctgccgagacaggagtcccagcggccattcttttggattttcatggacaacttgctgctgaccgaggatgaccaggaaactaccactcggttcctgcagaccgaagccgtgaccctgcaggacgtgagaggccgggactaccagaacgccatgcgggtgtggtccaacatccctggactgaaaagcaagcacgcacctctgacccctaaagaagaggagtacctgcaggcccaggtgcggagcagaagcaagctggacgcccctaaggtggatctgctggtgaagaattgcctcctgcccctgagagagtacttcaagtatttcagccagaatagtctgcccctgggcggcccaagcagcggcgcccctcctcccagcggcggcagcccagccggctccccaacctctaccgaggagggcacctctgagtccgccacccccgagagcggccctggcacctccaccgagcccagcgagggcagcgcacccggcagccctgccggcagccccacctccacagaggagggaaccagcaccgagcccagcgaaggcagcgccccaggcaccagcaccgagcctagtgagggcggctctggcggcggcagcgcccaggagattaaacggatcaacaagatcagaagaagacttgtgaaagacagcaacaccaagaaggccggcaagacaggccccatgaaaaccctgctggttagagtgatgacacccgatctgagagagcggctggaaaacctgagaaagaagcctgaaaatatcccccagcccatcagcaatacatctagagccaacctgaataagctgctgaccgattacaccgaaatgaagaaggcgatcctgcatgtgtactgggaagagttccagaaggaccctgtgggcctgatgagccgggtggcccagcctgccagcaagaagatcgatcagaacaagctgaaacctgagatggacgagaagggcaacctgaccaccgccggctttgcctgctctcagtgtggccagcccctgttcgtgtacaagctggagcaggtgtctgagaagggcaaggcttacaccaactacttcggacggtgcaatgtggccgagcacgaaaagctgatcctgctggcccagctgaagcccgagaaggatagcgacgaagccgtgacatatagcctgggaaagtttgggcagagggccctggatttctacagcattcatgtgaccaaggagtccacccaccccgtgaagcccctggcccagatcgccggaaacagatacgcctccggacctgtgggaaaggccctgagcgacgcatgtatgggcacaatcgcctccttcctgtctaagtaccaggacatcatcatcgaacaccagaaggtggtgaagggcaaccagaagagactggagagcctgcgggagctggccggcaaggaaaacctggaataccctagcgtgaccctgccacctcagcctcacaccaaggagggcgttgatgcctacaacgaagtgatcgcccgggtgcgaatgtgggtgaacctgaacctgtggcagaagctgaagctaagcagagatgatgccaagcctctgctgagactgaagggattcccttcctttcctctggtcgagagacaggccaacgaagtggactggtgggacatggtgtgtaacgtgaagaagctgatcaacgagaaaaaggaggatggcaaggtgttttggcagaatctggctggctacaagagacaggaagccctgagaccatacctgagcagcgaggaagatcggaagaagggaaagaaattcgctcggtaccagctgggcgacctgctgctgcacctggaaaagaagcacggcgaggactggggaaaggtgtacgacgaggcctgggagcggattgacaagaaagtggaaggcctgagcaagcacatcaagctggaagaggaacggagaagcgaggacgcccagagcaaggccgccctgaccgactggctgcgggctaaggccagcttcgtgatcgagggcctgaaggaggccgacaaggacgagttctgcagatgcgagctgaagctgcagaagtggtacggggacctgcggggaaagcccttcgccatcgaagccgagaacagcatcctggacatcagcggcttcagcaagcagtacaactgtgccttcatctggcagaaggacggcgtgaagaagctgaacctgtacctgatcatcaactacttcaagggcggcaagctgcggttcaagaagatcaaacctgaagccttcgaagccaacagattctacaccgtgatcaacaaaaagagcggcgagatcgtgcccatggaggtgaacttcaacttcgacgaccccaacctgatcatcctgcctctggcctttggcaagagacagggcagagaattcatctggaacgacctgctgtccctggaaaccggcagcctgaagctggccaacggaagagtgatcgagaagacactgtacaacagaagaacccggcaggatgagcctgccctgttcgtggccctgaccttcgagcggcgggaggtcctggactcctccaatatcaaaccaatgaacctgatcggcgtggcaagaggcgaaaacatccccgccgtgatcgccctgaccgaccccgagggctgcccactgagccggtttaaggatagcctgggaaacccaacccacatcctgagaatcggcgagagctataaggagaagcagcggaccatccaggccaagaaggaggtggagcagcggagagccggcggctacagccggaagtacgccagcaaagccaagaatctggcagacgatatggtgagaaacaccgctagagatctgctgtactacgccgtgacccaggatgccatgctgatcttcgccaacctgagccggggcttcggccggcagggcaagcggaccttcatggccgagagacagtacacacggatggaggactggctgaccgccaagctggcctacgagggcctgagcaagacctacctgtccaagacactggcccagtacacctccaagacatgcagcaactgtgggtttaccatcaccagcgccgactacgacagggtgctggagaagctgaagaagacagcaacaggctggatgaccacaattaacggcaaggagctgaaggtggagggccagattacctactacaacagatacaagagacagaacgtagtcaaggacctgtccgtcgagctggatagactgagcgaagaatctgtgaacaacgacatctcctcctggacaaagggcagaagcggagaagctctgagcctcctgaagaaaagattctcccatagacccgtgcaggagaagttcgtgtgcctgaactgcggcttcgagacacacgcagccgagcaagccgccctgaacatcgccagatcctggctgttcctgcggagccaggagtacaagaaataccagacaaacaagacaaccggcaacaccgataagagagccttcgtcgagacctggcagtccttttaccggaagaagcttaaggaggtgtggaaacctgccgtgcggtctggcggatctggcggaggctccacaagcttcaggggccccgtgaccttcaaggacatcaccgtggagttcacccaggaggagtggcagctgctggacaacgcccagaggaccctgtacagggaggtgatgcaggagaactaccaccacctgatcagcgtgggctactgcgtgaacaagcccaacgccgtgttcaagctgaagcagggcaaggagccctggatcctggaggtggagttccccaggaggaacaaccccgaggacctgtggaacaccagccccaagaaaaagagaaaagtctaagctgccttctgcggggcttgccttctggccatgcccttcttctctcccttgcacctgtacctcttggtctttgaataaagcctgagtaggaaggctagcaaaaaaaaaaaaaaaaaaaaaaaaaaaaaaaaaaaaaaaaaaaaaaaaaaaaaaaaaaaaaaaaaaaaaaaaaaaaaaaa

SEQ ID NO: 6447 - RNA, 5833 nt, synthetic construct
  source 1..5833: mol_type = other RNA
aggaaataagagagaaaagaagagtaagaagaaatataagagccaccatggcccctaagaagaagcgtaaagtgagccggatggaacgcctcgtctacgaggtgcggcagaagtgcagaaacatcgaggacatctgcatctcctgcggatctctgaacgtgaccctggagcacccactgttcatcggcggcatgtgccagaactgtaaaaactgttttctggagtgtgcctatcaatacgacgatgacggctaccagagctactgcaccatctgttgcggcggaagagaggtgctgatgtgtggaaataacaactgctgccggtgcttctgcgtggaatgcgtggacctgctggtgggccccggcgccgcccaggccgctattaaggaagatccttggaactgctacatgtgcggccacaagggcacatacggcctgctgagacggagagaggactggcctagcagactgcagatgttcttcgccaataaccacgaccaggagttcgacccccctaaggtgtaccctcccgtccccgccgagaagagaaagcccatccgggtcctgagcctgttcgatggcatcgccaccggtctgctggtgctgaaggacctgggcatccaggtggataggtacattgcctccgaggtgtgcgaggactccatcaccgtgggaatggtgcgtcatcagggcaagatcatgtacgtgggcgacgtgcggagcgtgacacagaagcatatccaggagtggggccctttcgacctggtgatcggcggcagcccttgcaatgacctgagcatcgtgaacccagcccggaagggcctgtacgagggaaccggcagactgttcttcgagttttacagactgctgcacgacgcccggcctaaggaaggcgacgaccggcccttcttttggctgttcgagaatgtggtggccatgggagtcagcgacaagcgggatattagccggttcctggagagcaaccccgtgatgatcgatgccaaggaagtgagcgccgcccaccgggccagatacttctggggcaatctgcctggcatgaacagacccctggccagcaccgtgaacgacaagctggagctgcaggagtgcctggagcacggccggatcgccaagttcagcaaggtgagaaccatcaccacccgaagcaacagcatcaaacaaggcaaggaccagcactttcctgtgttcatgaacgagaaggaggacatcctgtggtgtaccgagatggagagagtgttcgggttcccagtccactacacagatgtcagcaacatgtctagactggccagacagagactgctgggaagaagctggtccgtccctgtgatcagacacctgttcgcccctctgaaggagtacttcgcctgcgtgagcagcggcaacagcaacgccaacagccggggccccagcttctctagcggcctggtgccactgtccctgagagggagccacatgggccccatggagatctacaaaaccgtgagcgcctggaagcggcagcctgtgcgcgtgctgagcctgtttcggaatatcgataaagtcctgaaaagcctgggattcctggagagcggctctggctccggcggtggcaccctgaagtacgtggaggatgtgacaaacgtggtcagacgggatgtggagaagtggggccccttcgatctggtgtacggcagcacccaacccctgggcagctcttgtgaccggtgccctggctggtacatgtttcagttccaccggatcctgcagtacgccctgccgagacaggagtcccagcggccattcttttggattttcatggacaacttgctgctgaccgaggatgaccaggaaactaccactcggttcctgcagaccgaagccgtgaccctgcaggacgtgagaggccgggactaccagaacgccatgcgggtgtggtccaacatccctggactgaaaagcaagcacgcacctctgacccctaaagaagaggagtacctgcaggcccaggtgcggagcagaagcaagctggacgcccctaaggtggatctgctggtgaagaattgcctcctgcccctgagagagtacttcaagtatttcagccagaatagtctgcccctgggcggcccaagcagcggcgcccctcctcccagcggcggcagcccagccggctccccaacctctaccgaggagggcacctctgagtccgccacccccgagagcggccctggcacctccaccgagcccagcgagggcagcgcacccggcagccctgccggcagccccacctccacagaggagggaaccagcaccgagcccagcgaaggcagcgccccaggcaccagcaccgagcctagtgagggcggctctggcggcggcagcgcccaggagattaaacggatcaacaagatcagaagaagacttgtgaaagacagcaacaccaagaaggccggcaagacaggccccatgaaaaccctgctggttagagtgatgacacccgatctgagagagcggctggaaaacctgagaaagaagcctgaaaatatcccccagcccatcagcaatacatctagagccaacctgaataagctgctgaccgattacaccgaaatgaagaaggcgatcctgcatgtgtactgggaagagttccagaaggaccctgtgggcctgatgagccgggtggcccagcctgccagcaagaagatcgatcagaacaagctgaaacctgagatggacgagaagggcaacctgaccaccgccggctttgcctgctctcagtgtggccagcccctgttcgtgtacaagctggagcaggtgtctgagaagggcaaggcttacaccaactacttcggacggtgcaatgtggccgagcacgaaaagctgatcctgctggcccagctgaagcccgagaaggatagcgacgaagccgtgacatatagcctgggaaagtttgggcagagggccctggatttctacagcattcatgtgaccaaggagtccacccaccccgtgaagcccctggcccagatcgccggaaacagatacgcctccggacctgtgggaaaggccctgagcgacgcatgtatgggcacaatcgcctccttcctgtctaagtaccaggacatcatcatcgaacaccagaaggtggtgaagggcaaccagaagagactggagagcctgcgggagctggccggcaaggaaaacctggaataccctagcgtgaccctgccacctcagcctcacaccaaggagggcgttgatgcctacaacgaagtgatcgcccgggtgcgaatgtgggtgaacctgaacctgtggcagaagctgaagctaagcagagatgatgccaagcctctgctgagactgaagggattcccttcctttcctctggtcgagagacaggccaacgaagtggactggtgggacatggtgtgtaacgtgaagaagctgatcaacgagaaaaaggaggatggcaaggtgttttggcagaatctggctggctacaagagacaggaagccctgagaccatacctgagcagcgaggaagatcggaagaagggaaagaaattcgctcggtaccagctgggcgacctgctgctgcacctggaaaagaagcacggcgaggactggggaaaggtgtacgacgaggcctgggagcggattgacaagaaagtggaaggcctgagcaagcacatcaagctggaagaggaacggagaagcgaggacgcccagagcaaggccgccctgaccgactggctgcgggctaaggccagcttcgtgatcgagggcctgaaggaggccgacaaggacgagttctgcagatgcgagctgaagctgcagaagtggtacggggacctgcggggaaagcccttcgccatcgaagccgagaacagcatcctggacatcagcggcttcagcaagcagtacaactgtgccttcatctggcagaaggacggcgtgaagaagctgaacctgtacctgatcatcaactacttcaagggcggcaagctgcggttcaagaagatcaaacctgaagccttcgaagccaacagattctacaccgtgatcaacaaaaagagcggcgagatcgtgcccatggaggtgaacttcaacttcgacgaccccaacctgatcatcctgcctctggcctttggcaagagacagggcagagaattcatctggaacgacctgctgtccctggaaaccggcagcctgaagctggccaacggaagagtgatcgagaagacactgtacaacagaagaacccggcaggatgagcctgccctgttcgtggccctgaccttcgagcggcgggaggtcctggactcctccaatatcaaaccaatgaacctgatcggcgtggcaagaggcgaaaacatccccgccgtgatcgccctgaccgaccccgagggctgcccactgagccggtttaaggatagcctgggaaacccaacccacatcctgagaatcggcgagagctataaggagaagcagcggaccatccaggccaagaaggaggtggagcagcggagagccggcggctacagccggaagtacgccagcaaagccaagaatctggcagacgatatggtgagaaacaccgctagagatctgctgtactacgccgtgacccaggatgccatgctgatcttcgccaacctgagccggggcttcggccggcagggcaagcggaccttcatggccgagagacagtacacacggatggaggactggctgaccgccaagctggcctacgagggcctgagcaagacctacctgtccaagacactggcccagtacacctccaagacatgcagcaactgtgggtttaccatcaccagcgccgactacgacagggtgctggagaagctgaagaagacagcaacaggctggatgaccacaattaacggcaaggagctgaaggtggagggccagattacctactacaacagatacaagagacagaacgtagtcaaggacctgtccgtcgagctggatagactgagcgaagaatctgtgaacaacgacatctcctcctggacaaagggcagaagcggagaagctctgagcctcctgaagaaaagattctcccatagacccgtgcaggagaagttcgtgtgcctgaactgcggcttcgagacacacgcagccgagcaagccgccctgaacatcgccagatcctggctgttcctgcggagccaggagtacaagaaataccagacaaacaagacaaccggcaacaccgataagagagccttcgtcgagacctggcagtccttttaccggaagaagcttaaggaggtgtggaaacctgccgtgcggtctggcggatctggcggaggctccacaagcttcagggaggtgagcgtgtacttcagcgaggaggagtggagctggctggaccccgaccagaaggccctgtactgggaggtgatgctggagaaccacaggaacatggccagcctgggcgacgacggccaggagaacaaggacagctacgagctgctgcagggcatcaccgccagggacaccatggagaccagcgccatcgagatggaggtggagaggtacaaggagaagcagagcgacgactggaaccaggagagcagcagctgcaccgacgacagcgtgaccagccccaagaaaaagagaaaagtctaagctgccttctgcggggcttgccttctggccatgcccttcttctctcccttgcacctgtacctcttggtctttgaataaagcctgagtaggaaggctagcaaaaaaaaaaaaaaaaaaaaaaaaaaaaaaaaaaaaaaaaaaaaaaaaaaaaaaaaaaaaaaaaaaaaaaaaaaaaaaaa

SEQ ID NO: 6448 - RNA, 5797 nt, synthetic construct
  source 1..5797: mol_type = other RNA
aggaaataagagagaaaagaagagtaagaagaaatataagagccaccatggcccctaagaagaagcgtaaagtgagccggatggaacgcctcgtctacgaggtgcggcagaagtgcagaaacatcgaggacatctgcatctcctgcggatctctgaacgtgaccctggagcacccactgttcatcggcggcatgtgccagaactgtaaaaactgttttctggagtgtgcctatcaatacgacgatgacggctaccagagctactgcaccatctgttgcggcggaagagaggtgctgatgtgtggaaataacaactgctgccggtgcttctgcgtggaatgcgtggacctgctggtgggccccggcgccgcccaggccgctattaaggaagatccttggaactgctacatgtgcggccacaagggcacatacggcctgctgagacggagagaggactggcctagcagactgcagatgttcttcgccaataaccacgaccaggagttcgacccccctaaggtgtaccctcccgtccccgccgagaagagaaagcccatccgggtcctgagcctgttcgatggcatcgccaccggtctgctggtgctgaaggacctgggcatccaggtggataggtacattgcctccgaggtgtgcgaggactccatcaccgtgggaatggtgcgtcatcagggcaagatcatgtacgtgggcgacgtgcggagcgtgacacagaagcatatccaggagtggggccctttcgacctggtgatcggcggcagcccttgcaatgacctgagcatcgtgaacccagcccggaagggcctgtacgagggaaccggcagactgttcttcgagttttacagactgctgcacgacgcccggcctaaggaaggcgacgaccggcccttcttttggctgttcgagaatgtggtggccatgggagtcagcgacaagcgggatattagccggttcctggagagcaaccccgtgatgatcgatgccaaggaagtgagcgccgcccaccgggccagatacttctggggcaatctgcctggcatgaacagacccctggccagcaccgtgaacgacaagctggagctgcaggagtgcctggagcacggccggatcgccaagttcagcaaggtgagaaccatcaccacccgaagcaacagcatcaaacaaggcaaggaccagcactttcctgtgttcatgaacgagaaggaggacatcctgtggtgtaccgagatggagagagtgttcgggttcccagtccactacacagatgtcagcaacatgtctagactggccagacagagactgctgggaagaagctggtccgtccctgtgatcagacacctgttcgcccctctgaaggagtacttcgcctgcgtgagcagcggcaacagcaacgccaacagccggggccccagcttctctagcggcctggtgccactgtccctgagagggagccacatgggccccatggagatctacaaaaccgtgagcgcctggaagcggcagcctgtgcgcgtgctgagcctgtttcggaatatcgataaagtcctgaaaagcctgggattcctggagagcggctctggctccggcggtggcaccctgaagtacgtggaggatgtgacaaacgtggtcagacgggatgtggagaagtggggccccttcgatctggtgtacggcagcacccaacccctgggcagctcttgtgaccggtgccctggctggtacatgtttcagttccaccggatcctgcagtacgccctgccgagacaggagtcccagcggccattcttttggattttcatggacaacttgctgctgaccgaggatgaccaggaaactaccactcggttcctgcagaccgaagccgtgaccctgcaggacgtgagaggccgggactaccagaacgccatgcgggtgtggtccaacatccctggactgaaaagcaagcacgcacctctgacccctaaagaagaggagtacctgcaggcccaggtgcggagcagaagcaagctggacgcccctaaggtggatctgctggtgaagaattgcctcctgcccctgagagagtacttcaagtatttcagccagaatagtctgcccctgggcggcccaagcagcggcgcccctcctcccagcggcggcagcccagccggctccccaacctctaccgaggagggcacctctgagtccgccacccccgagagcggccctggcacctccaccgagcccagcgagggcagcgcacccggcagccctgccggcagccccacctccacagaggagggaaccagcaccgagcccagcgaaggcagcgccccaggcaccagcaccgagcctagtgagggcggctctggcggcggcagcgcccaggagattaaacggatcaacaagatcagaagaagacttgtgaaagacagcaacaccaagaaggccggcaagacaggccccatgaaaaccctgctggttagagtgatgacacccgatctgagagagcggctggaaaacctgagaaagaagcctgaaaatatcccccagcccatcagcaatacatctagagccaacctgaataagctgctgaccgattacaccgaaatgaagaaggcgatcctgcatgtgtactgggaagagttccagaaggaccctgtgggcctgatgagccgggtggcccagcctgccagcaagaagatcgatcagaacaagctgaaacctgagatggacgagaagggcaacctgaccaccgccggctttgcctgctctcagtgtggccagcccctgttcgtgtacaagctggagcaggtgtctgagaagggcaaggcttacaccaactacttcggacggtgcaatgtggccgagcacgaaaagctgatcctgctggcccagctgaagcccgagaaggatagcgacgaagccgtgacatatagcctgggaaagtttgggcagagggccctggatttctacagcattcatgtgaccaaggagtccacccaccccgtgaagcccctggcccagatcgccggaaacagatacgcctccggacctgtgggaaaggccctgagcgacgcatgtatgggcacaatcgcctccttcctgtctaagtaccaggacatcatcatcgaacaccagaaggtggtgaagggcaaccagaagagactggagagcctgcgggagctggccggcaaggaaaacctggaataccctagcgtgaccctgccacctcagcctcacaccaaggagggcgttgatgcctacaacgaagtgatcgcccgggtgcgaatgtgggtgaacctgaacctgtggcagaagctgaagctaagcagagatgatgccaagcctctgctgagactgaagggattcccttcctttcctctggtcgagagacaggccaacgaagtggactggtgggacatggtgtgtaacgtgaagaagctgatcaacgagaaaaaggaggatggcaaggtgttttggcagaatctggctggctacaagagacaggaagccctgagaccatacctgagcagcgaggaagatcggaagaagggaaagaaattcgctcggtaccagctgggcgacctgctgctgcacctggaaaagaagcacggcgaggactggggaaaggtgtacgacgaggcctgggagcggattgacaagaaagtggaaggcctgagcaagcacatcaagctggaagaggaacggagaagcgaggacgcccagagcaaggccgccctgaccgactggctgcgggctaaggccagcttcgtgatcgagggcctgaaggaggccgacaaggacgagttctgcagatgcgagctgaagctgcagaagtggtacggggacctgcggggaaagcccttcgccatcgaagccgagaacagcatcctggacatcagcggcttcagcaagcagtacaactgtgccttcatctggcagaaggacggcgtgaagaagctgaacctgtacctgatcatcaactacttcaagggcggcaagctgcggttcaagaagatcaaacctgaagccttcgaagccaacagattctacaccgtgatcaacaaaaagagcggcgagatcgtgcccatggaggtgaacttcaacttcgacgaccccaacctgatcatcctgcctctggcctttggcaagagacagggcagagaattcatctggaacgacctgctgtccctggaaaccggcagcctgaagctggccaacggaagagtgatcgagaagacactgtacaacagaagaacccggcaggatgagcctgccctgttcgtggccctgaccttcgagcggcgggaggtcctggactcctccaatatcaaaccaatgaacctgatcggcgtggcaagaggcgaaaacatccccgccgtgatcgccctgaccgaccccgagggctgcccactgagccggtttaaggatagcctgggaaacccaacccacatcctgagaatcggcgagagctataaggagaagcagcggaccatccaggccaagaaggaggtggagcagcggagagccggcggctacagccggaagtacgccagcaaagccaagaatctggcagacgatatggtgagaaacaccgctagagatctgctgtactacgccgtgacccaggatgccatgctgatcttcgccaacctgagccggggcttcggccggcagggcaagcggaccttcatggccgagagacagtacacacggatggaggactggctgaccgccaagctggcctacgagggcctgagcaagacctacctgtccaagacactggcccagtacacctccaagacatgcagcaactgtgggtttaccatcaccagcgccgactacgacagggtgctggagaagctgaagaagacagcaacaggctggatgaccacaattaacggcaaggagctgaaggtggagggccagattacctactacaacagatacaagagacagaacgtagtcaaggacctgtccgtcgagctggatagactgagcgaagaatctgtgaacaacgacatctcctcctggacaaagggcagaagcggagaagctctgagcctcctgaagaaaagattctcccatagacccgtgcaggagaagttcgtgtgcctgaactgcggcttcgagacacacgcagccgagcaagccgccctgaacatcgccagatcctggctgttcctgcggagccaggagtacaagaaataccagacaaacaagacaaccggcaacaccgataagagagccttcgtcgagacctggcagtccttttaccggaagaagcttaaggaggtgtggaaacctgccgtgcggtctggcggatctggcggaggctccacaagcgacaccgtggtgttcgaggacgtggtggtgggcttcaccctggaggagtgggccctgctgaaccccgcccagaggaacctgtacagggaggtgatgctggagaccttcaagcacctggccagcgtggacaacgaggcccagcccaagaccaacggcagcatcagccagcaggacaccagcggcgagaagctgagcctgaagcagaagatcgagaagttcaccaggaagcacacctgggccagcaccagccccaagaaaaagagaaaagtctaagctgccttctgcggggcttgccttctggccatgcccttcttctctcccttgcacctgtacctcttggtctttgaataaagcctgagtaggaaggctagcaaaaaaaaaaaaaaaaaaaaaaaaaaaaaaaaaaaaaaaaaaaaaaaaaaaaaaaaaaaaaaaaaaaaaaaaaaaaaaaa

SEQ ID NO: 6449 - RNA, 5797 nt, synthetic construct
  source 1..5797: mol_type = other RNA
aggaaataagagagaaaagaagagtaagaagaaatataagagccaccatggcccctaagaagaagcgtaaagtgagccggatggaacgcctcgtctacgaggtgcggcagaagtgcagaaacatcgaggacatctgcatctcctgcggatctctgaacgtgaccctggagcacccactgttcatcggcggcatgtgccagaactgtaaaaactgttttctggagtgtgcctatcaatacgacgatgacggctaccagagctactgcaccatctgttgcggcggaagagaggtgctgatgtgtggaaataacaactgctgccggtgcttctgcgtggaatgcgtggacctgctggtgggccccggcgccgcccaggccgctattaaggaagatccttggaactgctacatgtgcggccacaagggcacatacggcctgctgagacggagagaggactggcctagcagactgcagatgttcttcgccaataaccacgaccaggagttcgacccccctaaggtgtaccctcccgtccccgccgagaagagaaagcccatccgggtcctgagcctgttcgatggcatcgccaccggtctgctggtgctgaaggacctgggcatccaggtggataggtacattgcctccgaggtgtgcgaggactccatcaccgtgggaatggtgcgtcatcagggcaagatcatgtacgtgggcgacgtgcggagcgtgacacagaagcatatccaggagtggggccctttcgacctggtgatcggcggcagcccttgcaatgacctgagcatcgtgaacccagcccggaagggcctgtacgagggaaccggcagactgttcttcgagttttacagactgctgcacgacgcccggcctaaggaaggcgacgaccggcccttcttttggctgttcgagaatgtggtggccatgggagtcagcgacaagcgggatattagccggttcctggagagcaaccccgtgatgatcgatgccaaggaagtgagcgccgcccaccgggccagatacttctggggcaatctgcctggcatgaacagacccctggccagcaccgtgaacgacaagctggagctgcaggagtgcctggagcacggccggatcgccaagttcagcaaggtgagaaccatcaccacccgaagcaacagcatcaaacaaggcaaggaccagcactttcctgtgttcatgaacgagaaggaggacatcctgtggtgtaccgagatggagagagtgttcgggttcccagtccactacacagatgtcagcaacatgtctagactggccagacagagactgctgggaagaagctggtccgtccctgtgatcagacacctgttcgcccctctgaaggagtacttcgcctgcgtgagcagcggcaacagcaacgccaacagccggggccccagcttctctagcggcctggtgccactgtccctgagagggagccacatgggccccatggagatctacaaaaccgtgagcgcctggaagcggcagcctgtgcgcgtgctgagcctgtttcggaatatcgataaagtcctgaaaagcctgggattcctggagagcggctctggctccggcggtggcaccctgaagtacgtggaggatgtgacaaacgtggtcagacgggatgtggagaagtggggccccttcgatctggtgtacggcagcacccaacccctgggcagctcttgtgaccggtgccctggctggtacatgtttcagttccaccggatcctgcagtacgccctgccgagacaggagtcccagcggccattcttttggattttcatggacaacttgctgctgaccgaggatgaccaggaaactaccactcggttcctgcagaccgaagccgtgaccctgcaggacgtgagaggccgggactaccagaacgccatgcgggtgtggtccaacatccctggactgaaaagcaagcacgcacctctgacccctaaagaagaggagtacctgcaggcccaggtgcggagcagaagcaagctggacgcccctaaggtggatctgctggtgaagaattgcctcctgcccctgagagagtacttcaagtatttcagccagaatagtctgcccctgggcggcccaagcagcggcgcccctcctcccagcggcggcagcccagccggctccccaacctctaccgaggagggcacctctgagtccgccacccccgagagcggccctggcacctccaccgagcccagcgagggcagcgcacccggcagccctgccggcagccccacctccacagaggagggaaccagcaccgagcccagcgaaggcagcgccccaggcaccagcaccgagcctagtgagggcggctctggcggcggcagcgcccaggagattaaacggatcaacaagatcagaagaagacttgtgaaagacagcaacaccaagaaggccggcaagacaggccccatgaaaaccctgctggttagagtgatgacacccgatctgagagagcggctggaaaacctgagaaagaagcctgaaaatatcccccagcccatcagcaatacatctagagccaacctgaataagctgctgaccgattacaccgaaatgaagaaggcgatcctgcatgtgtactgggaagagttccagaaggaccctgtgggcctgatgagccgggtggcccagcctgccagcaagaagatcgatcagaacaagctgaaacctgagatggacgagaagggcaacctgaccaccgccggctttgcctgctctcagtgtggccagcccctgttcgtgtacaagctggagcaggtgtctgagaagggcaaggcttacaccaactacttcggacggtgcaatgtggccgagcacgaaaagctgatcctgctggcccagctgaagcccgagaaggatagcgacgaagccgtgacatatagcctgggaaagtttgggcagagggccctggatttctacagcattcatgtgaccaaggagtccacccaccccgtgaagcccctggcccagatcgccggaaacagatacgcctccggacctgtgggaaaggccctgagcgacgcatgtatgggcacaatcgcctccttcctgtctaagtaccaggacatcatcatcgaacaccagaaggtggtgaagggcaaccagaagagactggagagcctgcgggagctggccggcaaggaaaacctggaataccctagcgtgaccctgccacctcagcctcacaccaaggagggcgttgatgcctacaacgaagtgatcgcccgggtgcgaatgtgggtgaacctgaacctgtggcagaagctgaagctaagcagagatgatgccaagcctctgctgagactgaagggattcccttcctttcctctggtcgagagacaggccaacgaagtggactggtgggacatggtgtgtaacgtgaagaagctgatcaacgagaaaaaggaggatggcaaggtgttttggcagaatctggctggctacaagagacaggaagccctgagaccatacctgagcagcgaggaagatcggaagaagggaaagaaattcgctcggtaccagctgggcgacctgctgctgcacctggaaaagaagcacggcgaggactggggaaaggtgtacgacgaggcctgggagcggattgacaagaaagtggaaggcctgagcaagcacatcaagctggaagaggaacggagaagcgaggacgcccagagcaaggccgccctgaccgactggctgcgggctaaggccagcttcgtgatcgagggcctgaaggaggccgacaaggacgagttctgcagatgcgagctgaagctgcagaagtggtacggggacctgcggggaaagcccttcgccatcgaagccgagaacagcatcctggacatcagcggcttcagcaagcagtacaactgtgccttcatctggcagaaggacggcgtgaagaagctgaacctgtacctgatcatcaactacttcaagggcggcaagctgcggttcaagaagatcaaacctgaagccttcgaagccaacagattctacaccgtgatcaacaaaaagagcggcgagatcgtgcccatggaggtgaacttcaacttcgacgaccccaacctgatcatcctgcctctggcctttggcaagagacagggcagagaattcatctggaacgacctgctgtccctggaaaccggcagcctgaagctggccaacggaagagtgatcgagaagacactgtacaacagaagaacccggcaggatgagcctgccctgttcgtggccctgaccttcgagcggcgggaggtcctggactcctccaatatcaaaccaatgaacctgatcggcgtggcaagaggcgaaaacatccccgccgtgatcgccctgaccgaccccgagggctgcccactgagccggtttaaggatagcctgggaaacccaacccacatcctgagaatcggcgagagctataaggagaagcagcggaccatccaggccaagaaggaggtggagcagcggagagccggcggctacagccggaagtacgccagcaaagccaagaatctggcagacgatatggtgagaaacaccgctagagatctgctgtactacgccgtgacccaggatgccatgctgatcttcgccaacctgagccggggcttcggccggcagggcaagcggaccttcatggccgagagacagtacacacggatggaggactggctgaccgccaagctggcctacgagggcctgagcaagacctacctgtccaagacactggcccagtacacctccaagacatgcagcaactgtgggtttaccatcaccagcgccgactacgacagggtgctggagaagctgaagaagacagcaacaggctggatgaccacaattaacggcaaggagctgaaggtggagggccagattacctactacaacagatacaagagacagaacgtagtcaaggacctgtccgtcgagctggatagactgagcgaagaatctgtgaacaacgacatctcctcctggacaaagggcagaagcggagaagctctgagcctcctgaagaaaagattctcccatagacccgtgcaggagaagttcgtgtgcctgaactgcggcttcgagacacacgcagccgagcaagccgccctgaacatcgccagatcctggctgttcctgcggagccaggagtacaagaaataccagacaaacaagacaaccggcaacaccgataagagagccttcgtcgagacctggcagtccttttaccggaagaagcttaaggaggtgtggaaacctgccgtgcggtctggcggatctggcggaggctccacaagcgcccacgccctggtgaccttcagggacgtggccatcgacttcagccagaaggagtgggagtgcctggacaccacccagaggaagctgtacagggacgtgatgctggagaactacaacaacctggtgagcctggccggctacagcggcagcaagcccgacgtgatcaccctgctggagcagggcaaggagccctgcgtggtggccagggacgtgaccggcaggcagtgccccggcctgctgagcaccagccccaagaaaaagagaaaagtctaagctgccttctgcggggcttgccttctggccatgcccttcttctctcccttgcacctgtacctcttggtctttgaataaagcctgagtaggaaggctagcaaaaaaaaaaaaaaaaaaaaaaaaaaaaaaaaaaaaaaaaaaaaaaaaaaaaaaaaaaaaaaaaaaaaaaaaaaaaaaaa

SEQ ID NO: 6450 - RNA, 5797 nt, synthetic construct
  source 1..5797: mol_type = other RNA
aggaaataagagagaaaagaagagtaagaagaaatataagagccaccatggcccctaagaagaagcgtaaagtgagccggatggaacgcctcgtctacgaggtgcggcagaagtgcagaaacatcgaggacatctgcatctcctgcggatctctgaacgtgaccctggagcacccactgttcatcggcggcatgtgccagaactgtaaaaactgttttctggagtgtgcctatcaatacgacgatgacggctaccagagctactgcaccatctgttgcggcggaagagaggtgctgatgtgtggaaataacaactgctgccggtgcttctgcgtggaatgcgtggacctgctggtgggccccggcgccgcccaggccgctattaaggaagatccttggaactgctacatgtgcggccacaagggcacatacggcctgctgagacggagagaggactggcctagcagactgcagatgttcttcgccaataaccacgaccaggagttcgacccccctaaggtgtaccctcccgtccccgccgagaagagaaagcccatccgggtcctgagcctgttcgatggcatcgccaccggtctgctggtgctgaaggacctgggcatccaggtggataggtacattgcctccgaggtgtgcgaggactccatcaccgtgggaatggtgcgtcatcagggcaagatcatgtacgtgggcgacgtgcggagcgtgacacagaagcatatccaggagtggggccctttcgacctggtgatcggcggcagcccttgcaatgacctgagcatcgtgaacccagcccggaagggcctgtacgagggaaccggcagactgttcttcgagttttacagactgctgcacgacgcccggcctaaggaaggcgacgaccggcccttcttttggctgttcgagaatgtggtggccatgggagtcagcgacaagcgggatattagccggttcctggagagcaaccccgtgatgatcgatgccaaggaagtgagcgccgcccaccgggccagatacttctggggcaatctgcctggcatgaacagacccctggccagcaccgtgaacgacaagctggagctgcaggagtgcctggagcacggccggatcgccaagttcagcaaggtgagaaccatcaccacccgaagcaacagcatcaaacaaggcaaggaccagcactttcctgtgttcatgaacgagaaggaggacatcctgtggtgtaccgagatggagagagtgttcgggttcccagtccactacacagatgtcagcaacatgtctagactggccagacagagactgctgggaagaagctggtccgtccctgtgatcagacacctgttcgcccctctgaaggagtacttcgcctgcgtgagcagcggcaacagcaacgccaacagccggggccccagcttctctagcggcctggtgccactgtccctgagagggagccacatgggccccatggagatctacaaaaccgtgagcgcctggaagcggcagcctgtgcgcgtgctgagcctgtttcggaatatcgataaagtcctgaaaagcctgggattcctggagagcggctctggctccggcggtggcaccctgaagtacgtggaggatgtgacaaacgtggtcagacgggatgtggagaagtggggccccttcgatctggtgtacggcagcacccaacccctgggcagctcttgtgaccggtgccctggctggtacatgtttcagttccaccggatcctgcagtacgccctgccgagacaggagtcccagcggccattcttttggattttcatggacaacttgctgctgaccgaggatgaccaggaaactaccactcggttcctgcagaccgaagccgtgaccctgcaggacgtgagaggccgggactaccagaacgccatgcgggtgtggtccaacatccctggactgaaaagcaagcacgcacctctgacccctaaagaagaggagtacctgcaggcccaggtgcggagcagaagcaagctggacgcccctaaggtggatctgctggtgaagaattgcctcctgcccctgagagagtacttcaagtatttcagccagaatagtctgcccctgggcggcccaagcagcggcgcccctcctcccagcggcggcagcccagccggctccccaacctctaccgaggagggcacctctgagtccgccacccccgagagcggccctggcacctccaccgagcccagcgagggcagcgcacccggcagccctgccggcagccccacctccacagaggagggaaccagcaccgagcccagcgaaggcagcgccccaggcaccagcaccgagcctagtgagggcggctctggcggcggcagcgcccaggagattaaacggatcaacaagatcagaagaagacttgtgaaagacagcaacaccaagaaggccggcaagacaggccccatgaaaaccctgctggttagagtgatgacacccgatctgagagagcggctggaaaacctgagaaagaagcctgaaaatatcccccagcccatcagcaatacatctagagccaacctgaataagctgctgaccgattacaccgaaatgaagaaggcgatcctgcatgtgtactgggaagagttccagaaggaccctgtgggcctgatgagccgggtggcccagcctgccagcaagaagatcgatcagaacaagctgaaacctgagatggacgagaagggcaacctgaccaccgccggctttgcctgctctcagtgtggccagcccctgttcgtgtacaagctggagcaggtgtctgagaagggcaaggcttacaccaactacttcggacggtgcaatgtggccgagcacgaaaagctgatcctgctggcccagctgaagcccgagaaggatagcgacgaagccgtgacatatagcctgggaaagtttgggcagagggccctggatttctacagcattcatgtgaccaaggagtccacccaccccgtgaagcccctggcccagatcgccggaaacagatacgcctccggacctgtgggaaaggccctgagcgacgcatgtatgggcacaatcgcctccttcctgtctaagtaccaggacatcatcatcgaacaccagaaggtggtgaagggcaaccagaagagactggagagcctgcgggagctggccggcaaggaaaacctggaataccctagcgtgaccctgccacctcagcctcacaccaaggagggcgttgatgcctacaacgaagtgatcgcccgggtgcgaatgtgggtgaacctgaacctgtggcagaagctgaagctaagcagagatgatgccaagcctctgctgagactgaagggattcccttcctttcctctggtcgagagacaggccaacgaagtggactggtgggacatggtgtgtaacgtgaagaagctgatcaacgagaaaaaggaggatggcaaggtgttttggcagaatctggctggctacaagagacaggaagccctgagaccatacctgagcagcgaggaagatcggaagaagggaaagaaattcgctcggtaccagctgggcgacctgctgctgcacctggaaaagaagcacggcgaggactggggaaaggtgtacgacgaggcctgggagcggattgacaagaaagtggaaggcctgagcaagcacatcaagctggaagaggaacggagaagcgaggacgcccagagcaaggccgccctgaccgactggctgcgggctaaggccagcttcgtgatcgagggcctgaaggaggccgacaaggacgagttctgcagatgcgagctgaagctgcagaagtggtacggggacctgcggggaaagcccttcgccatcgaagccgagaacagcatcctggacatcagcggcttcagcaagcagtacaactgtgccttcatctggcagaaggacggcgtgaagaagctgaacctgtacctgatcatcaactacttcaagggcggcaagctgcggttcaagaagatcaaacctgaagccttcgaagccaacagattctacaccgtgatcaacaaaaagagcggcgagatcgtgcccatggaggtgaacttcaacttcgacgaccccaacctgatcatcctgcctctggcctttggcaagagacagggcagagaattcatctggaacgacctgctgtccctggaaaccggcagcctgaagctggccaacggaagagtgatcgagaagacactgtacaacagaagaacccggcaggatgagcctgccctgttcgtggccctgaccttcgagcggcgggaggtcctggactcctccaatatcaaaccaatgaacctgatcggcgtggcaagaggcgaaaacatccccgccgtgatcgccctgaccgaccccgagggctgcccactgagccggtttaaggatagcctgggaaacccaacccacatcctgagaatcggcgagagctataaggagaagcagcggaccatccaggccaagaaggaggtggagcagcggagagccggcggctacagccggaagtacgccagcaaagccaagaatctggcagacgatatggtgagaaacaccgctagagatctgctgtactacgccgtgacccaggatgccatgctgatcttcgccaacctgagccggggcttcggccggcagggcaagcggaccttcatggccgagagacagtacacacggatggaggactggctgaccgccaagctggcctacgagggcctgagcaagacctacctgtccaagacactggcccagtacacctccaagacatgcagcaactgtgggtttaccatcaccagcgccgactacgacagggtgctggagaagctgaagaagacagcaacaggctggatgaccacaattaacggcaaggagctgaaggtggagggccagattacctactacaacagatacaagagacagaacgtagtcaaggacctgtccgtcgagctggatagactgagcgaagaatctgtgaacaacgacatctcctcctggacaaagggcagaagcggagaagctctgagcctcctgaagaaaagattctcccatagacccgtgcaggagaagttcgtgtgcctgaactgcggcttcgagacacacgcagccgagcaagccgccctgaacatcgccagatcctggctgttcctgcggagccaggagtacaagaaataccagacaaacaagacaaccggcaacaccgataagagagccttcgtcgagacctggcagtccttttaccggaagaagcttaaggaggtgtggaaacctgccgtgcggtctggcggatctggcggaggctccacaagcctgcaggtgagcgtgagcttcgaggacgtggccgtggacttcagcagggaggagtggcagcagctggacagcacccagaggaggctgtaccaggacgtgatgctggagaactacagccacctgctgagcctgggctgcgagatccccaagcccgaggtgatcttcaagctggagcagggcgaggagccctggaccctggaggaggagaccccccaccagagctgcagcgacgagaagttcggcaccagccccaagaaaaagagaaaagtctaagctgccttctgcggggcttgccttctggccatgcccttcttctctcccttgcacctgtacctcttggtctttgaataaagcctgagtaggaaggctagcaaaaaaaaaaaaaaaaaaaaaaaaaaaaaaaaaaaaaaaaaaaaaaaaaaaaaaaaaaaaaaaaaaaaaaaaaaaaaaaa

SEQ ID NO: 6451 - RNA, 5797 nt, synthetic construct
  source 1..5797: mol_type = other RNA
aggaaataagagagaaaagaagagtaagaagaaatataagagccaccatggcccctaagaagaagcgtaaagtgagccggatggaacgcctcgtctacgaggtgcggcagaagtgcagaaacatcgaggacatctgcatctcctgcggatctctgaacgtgaccctggagcacccactgttcatcggcggcatgtgccagaactgtaaaaactgttttctggagtgtgcctatcaatacgacgatgacggctaccagagctactgcaccatctgttgcggcggaagagaggtgctgatgtgtggaaataacaactgctgccggtgcttctgcgtggaatgcgtggacctgctggtgggccccggcgccgcccaggccgctattaaggaagatccttggaactgctacatgtgcggccacaagggcacatacggcctgctgagacggagagaggactggcctagcagactgcagatgttcttcgccaataaccacgaccaggagttcgacccccctaaggtgtaccctcccgtccccgccgagaagagaaagcccatccgggtcctgagcctgttcgatggcatcgccaccggtctgctggtgctgaaggacctgggcatccaggtggataggtacattgcctccgaggtgtgcgaggactccatcaccgtgggaatggtgcgtcatcagggcaagatcatgtacgtgggcgacgtgcggagcgtgacacagaagcatatccaggagtggggccctttcgacctggtgatcggcggcagcccttgcaatgacctgagcatcgtgaacccagcccggaagggcctgtacgagggaaccggcagactgttcttcgagttttacagactgctgcacgacgcccggcctaaggaaggcgacgaccggcccttcttttggctgttcgagaatgtggtggccatgggagtcagcgacaagcgggatattagccggttcctggagagcaaccccgtgatgatcgatgccaaggaagtgagcgccgcccaccgggccagatacttctggggcaatctgcctggcatgaacagacccctggccagcaccgtgaacgacaagctggagctgcaggagtgcctggagcacggccggatcgccaagttcagcaaggtgagaaccatcaccacccgaagcaacagcatcaaacaaggcaaggaccagcactttcctgtgttcatgaacgagaaggaggacatcctgtggtgtaccgagatggagagagtgttcgggttcccagtccactacacagatgtcagcaacatgtctagactggccagacagagactgctgggaagaagctggtccgtccctgtgatcagacacctgttcgcccctctgaaggagtacttcgcctgcgtgagcagcggcaacagcaacgccaacagccggggccccagcttctctagcggcctggtgccactgtccctgagagggagccacatgggccccatggagatctacaaaaccgtgagcgcctggaagcggcagcctgtgcgcgtgctgagcctgtttcggaatatcgataaagtcctgaaaagcctgggattcctggagagcggctctggctccggcggtggcaccctgaagtacgtggaggatgtgacaaacgtggtcagacgggatgtggagaagtggggccccttcgatctggtgtacggcagcacccaacccctgggcagctcttgtgaccggtgccctggctggtacatgtttcagttccaccggatcctgcagtacgccctgccgagacaggagtcccagcggccattcttttggattttcatggacaacttgctgctgaccgaggatgaccaggaaactaccactcggttcctgcagaccgaagccgtgaccctgcaggacgtgagaggccgggactaccagaacgccatgcgggtgtggtccaacatccctggactgaaaagcaagcacgcacctctgacccctaaagaagaggagtacctgcaggcccaggtgcggagcagaagcaagctggacgcccctaaggtggatctgctggtgaagaattgcctcctgcccctgagagagtacttcaagtatttcagccagaatagtctgcccctgggcggcccaagcagcggcgcccctcctcccagcggcggcagcccagccggctccccaacctctaccgaggagggcacctctgagtccgccacccccgagagcggccctggcacctccaccgagcccagcgagggcagcgcacccggcagccctgccggcagccccacctccacagaggagggaaccagcaccgagcccagcgaaggcagcgccccaggcaccagcaccgagcctagtgagggcggctctggcggcggcagcgcccaggagattaaacggatcaacaagatcagaagaagacttgtgaaagacagcaacaccaagaaggccggcaagacaggccccatgaaaaccctgctggttagagtgatgacacccgatctgagagagcggctggaaaacctgagaaagaagcctgaaaatatcccccagcccatcagcaatacatctagagccaacctgaataagctgctgaccgattacaccgaaatgaagaaggcgatcctgcatgtgtactgggaagagttccagaaggaccctgtgggcctgatgagccgggtggcccagcctgccagcaagaagatcgatcagaacaagctgaaacctgagatggacgagaagggcaacctgaccaccgccggctttgcctgctctcagtgtggccagcccctgttcgtgtacaagctggagcaggtgtctgagaagggcaaggcttacaccaactacttcggacggtgcaatgtggccgagcacgaaaagctgatcctgctggcccagctgaagcccgagaaggatagcgacgaagccgtgacatatagcctgggaaagtttgggcagagggccctggatttctacagcattcatgtgaccaaggagtccacccaccccgtgaagcccctggcccagatcgccggaaacagatacgcctccggacctgtgggaaaggccctgagcgacgcatgtatgggcacaatcgcctccttcctgtctaagtaccaggacatcatcatcgaacaccagaaggtggtgaagggcaaccagaagagactggagagcctgcgggagctggccggcaaggaaaacctggaataccctagcgtgaccctgccacctcagcctcacaccaaggagggcgttgatgcctacaacgaagtgatcgcccgggtgcgaatgtgggtgaacctgaacctgtggcagaagctgaagctaagcagagatgatgccaagcctctgctgagactgaagggattcccttcctttcctctggtcgagagacaggccaacgaagtggactggtgggacatggtgtgtaacgtgaagaagctgatcaacgagaaaaaggaggatggcaaggtgttttggcagaatctggctggctacaagagacaggaagccctgagaccatacctgagcagcgaggaagatcggaagaagggaaagaaattcgctcggtaccagctgggcgacctgctgctgcacctggaaaagaagcacggcgaggactggggaaaggtgtacgacgaggcctgggagcggattgacaagaaagtggaaggcctgagcaagcacatcaagctggaagaggaacggagaagcgaggacgcccagagcaaggccgccctgaccgactggctgcgggctaaggccagcttcgtgatcgagggcctgaaggaggccgacaaggacgagttctgcagatgcgagctgaagctgcagaagtggtacggggacctgcggggaaagcccttcgccatcgaagccgagaacagcatcctggacatcagcggcttcagcaagcagtacaactgtgccttcatctggcagaaggacggcgtgaagaagctgaacctgtacctgatcatcaactacttcaagggcggcaagctgcggttcaagaagatcaaacctgaagccttcgaagccaacagattctacaccgtgatcaacaaaaagagcggcgagatcgtgcccatggaggtgaacttcaacttcgacgaccccaacctgatcatcctgcctctggcctttggcaagagacagggcagagaattcatctggaacgacctgctgtccctggaaaccggcagcctgaagctggccaacggaagagtgatcgagaagacactgtacaacagaagaacccggcaggatgagcctgccctgttcgtggccctgaccttcgagcggcgggaggtcctggactcctccaatatcaaaccaatgaacctgatcggcgtggcaagaggcgaaaacatccccgccgtgatcgccctgaccgaccccgagggctgcccactgagccggtttaaggatagcctgggaaacccaacccacatcctgagaatcggcgagagctataaggagaagcagcggaccatccaggccaagaaggaggtggagcagcggagagccggcggctacagccggaagtacgccagcaaagccaagaatctggcagacgatatggtgagaaacaccgctagagatctgctgtactacgccgtgacccaggatgccatgctgatcttcgccaacctgagccggggcttcggccggcagggcaagcggaccttcatggccgagagacagtacacacggatggaggactggctgaccgccaagctggcctacgagggcctgagcaagacctacctgtccaagacactggcccagtacacctccaagacatgcagcaactgtgggtttaccatcaccagcgccgactacgacagggtgctggagaagctgaagaagacagcaacaggctggatgaccacaattaacggcaaggagctgaaggtggagggccagattacctactacaacagatacaagagacagaacgtagtcaaggacctgtccgtcgagctggatagactgagcgaagaatctgtgaacaacgacatctcctcctggacaaagggcagaagcggagaagctctgagcctcctgaagaaaagattctcccatagacccgtgcaggagaagttcgtgtgcctgaactgcggcttcgagacacacgcagccgagcaagccgccctgaacatcgccagatcctggctgttcctgcggagccaggagtacaagaaataccagacaaacaagacaaccggcaacaccgataagagagccttcgtcgagacctggcagtccttttaccggaagaagcttaaggaggtgtggaaacctgccgtgcggtctggcggatctggcggaggctccacaagcagcgagatgagggtgaccttcgaggaggtggccgtgtacttcaccaagggccagggcgccctgctggacgccaggcagaaggccctgtacagggacgtgatgctggagaactacgaggccgtgaccagcctgggcttccccgtgcccaagcccgagctgatcgccaggctggagaggggcgaggagccctgggtgcccgacctgcaggccggcgaggagagggagatcctgaggggcaccaggaccagccccaagaaaaagagaaaagtctaagctgccttctgcggggcttgccttctggccatgcccttcttctctcccttgcacctgtacctcttggtctttgaataaagcctgagtaggaaggctagcaaaaaaaaaaaaaaaaaaaaaaaaaaaaaaaaaaaaaaaaaaaaaaaaaaaaaaaaaaaaaaaaaaaaaaaaaaaaaaaa

SEQ ID NO: 6452 - RNA, 5797 nt, synthetic construct
  source 1..5797: mol_type = other RNA
aggaaataagagagaaaagaagagtaagaagaaatataagagccaccatggcccctaagaagaagcgtaaagtgagccggatggaacgcctcgtctacgaggtgcggcagaagtgcagaaacatcgaggacatctgcatctcctgcggatctctgaacgtgaccctggagcacccactgttcatcggcggcatgtgccagaactgtaaaaactgttttctggagtgtgcctatcaatacgacgatgacggctaccagagctactgcaccatctgttgcggcggaagagaggtgctgatgtgtggaaataacaactgctgccggtgcttctgcgtggaatgcgtggacctgctggtgggccccggcgccgcccaggccgctattaaggaagatccttggaactgctacatgtgcggccacaagggcacatacggcctgctgagacggagagaggactggcctagcagactgcagatgttcttcgccaataaccacgaccaggagttcgacccccctaaggtgtaccctcccgtccccgccgagaagagaaagcccatccgggtcctgagcctgttcgatggcatcgccaccggtctgctggtgctgaaggacctgggcatccaggtggataggtacattgcctccgaggtgtgcgaggactccatcaccgtgggaatggtgcgtcatcagggcaagatcatgtacgtgggcgacgtgcggagcgtgacacagaagcatatccaggagtggggccctttcgacctggtgatcggcggcagcccttgcaatgacctgagcatcgtgaacccagcccggaagggcctgtacgagggaaccggcagactgttcttcgagttttacagactgctgcacgacgcccggcctaaggaaggcgacgaccggcccttcttttggctgttcgagaatgtggtggccatgggagtcagcgacaagcgggatattagccggttcctggagagcaaccccgtgatgatcgatgccaaggaagtgagcgccgcccaccgggccagatacttctggggcaatctgcctggcatgaacagacccctggccagcaccgtgaacgacaagctggagctgcaggagtgcctggagcacggccggatcgccaagttcagcaaggtgagaaccatcaccacccgaagcaacagcatcaaacaaggcaaggaccagcactttcctgtgttcatgaacgagaaggaggacatcctgtggtgtaccgagatggagagagtgttcgggttcccagtccactacacagatgtcagcaacatgtctagactggccagacagagactgctgggaagaagctggtccgtccctgtgatcagacacctgttcgcccctctgaaggagtacttcgcctgcgtgagcagcggcaacagcaacgccaacagccggggccccagcttctctagcggcctggtgccactgtccctgagagggagccacatgggccccatggagatctacaaaaccgtgagcgcctggaagcggcagcctgtgcgcgtgctgagcctgtttcggaatatcgataaagtcctgaaaagcctgggattcctggagagcggctctggctccggcggtggcaccctgaagtacgtggaggatgtgacaaacgtggtcagacgggatgtggagaagtggggccccttcgatctggtgtacggcagcacccaacccctgggcagctcttgtgaccggtgccctggctggtacatgtttcagttccaccggatcctgcagtacgccctgccgagacaggagtcccagcggccattcttttggattttcatggacaacttgctgctgaccgaggatgaccaggaaactaccactcggttcctgcagaccgaagccgtgaccctgcaggacgtgagaggccgggactaccagaacgccatgcgggtgtggtccaacatccctggactgaaaagcaagcacgcacctctgacccctaaagaagaggagtacctgcaggcccaggtgcggagcagaagcaagctggacgcccctaaggtggatctgctggtgaagaattgcctcctgcccctgagagagtacttcaagtatttcagccagaatagtctgcccctgggcggcccaagcagcggcgcccctcctcccagcggcggcagcccagccggctccccaacctctaccgaggagggcacctctgagtccgccacccccgagagcggccctggcacctccaccgagcccagcgagggcagcgcacccggcagccctgccggcagccccacctccacagaggagggaaccagcaccgagcccagcgaaggcagcgccccaggcaccagcaccgagcctagtgagggcggctctggcggcggcagcgcccaggagattaaacggatcaacaagatcagaagaagacttgtgaaagacagcaacaccaagaaggccggcaagacaggccccatgaaaaccctgctggttagagtgatgacacccgatctgagagagcggctggaaaacctgagaaagaagcctgaaaatatcccccagcccatcagcaatacatctagagccaacctgaataagctgctgaccgattacaccgaaatgaagaaggcgatcctgcatgtgtactgggaagagttccagaaggaccctgtgggcctgatgagccgggtggcccagcctgccagcaagaagatcgatcagaacaagctgaaacctgagatggacgagaagggcaacctgaccaccgccggctttgcctgctctcagtgtggccagcccctgttcgtgtacaagctggagcaggtgtctgagaagggcaaggcttacaccaactacttcggacggtgcaatgtggccgagcacgaaaagctgatcctgctggcccagctgaagcccgagaaggatagcgacgaagccgtgacatatagcctgggaaagtttgggcagagggccctggatttctacagcattcatgtgaccaaggagtccacccaccccgtgaagcccctggcccagatcgccggaaacagatacgcctccggacctgtgggaaaggccctgagcgacgcatgtatgggcacaatcgcctccttcctgtctaagtaccaggacatcatcatcgaacaccagaaggtggtgaagggcaaccagaagagactggagagcctgcgggagctggccggcaaggaaaacctggaataccctagcgtgaccctgccacctcagcctcacaccaaggagggcgttgatgcctacaacgaagtgatcgcccgggtgcgaatgtgggtgaacctgaacctgtggcagaagctgaagctaagcagagatgatgccaagcctctgctgagactgaagggattcccttcctttcctctggtcgagagacaggccaacgaagtggactggtgggacatggtgtgtaacgtgaagaagctgatcaacgagaaaaaggaggatggcaaggtgttttggcagaatctggctggctacaagagacaggaagccctgagaccatacctgagcagcgaggaagatcggaagaagggaaagaaattcgctcggtaccagctgggcgacctgctgctgcacctggaaaagaagcacggcgaggactggggaaaggtgtacgacgaggcctgggagcggattgacaagaaagtggaaggcctgagcaagcacatcaagctggaagaggaacggagaagcgaggacgcccagagcaaggccgccctgaccgactggctgcgggctaaggccagcttcgtgatcgagggcctgaaggaggccgacaaggacgagttctgcagatgcgagctgaagctgcagaagtggtacggggacctgcggggaaagcccttcgccatcgaagccgagaacagcatcctggacatcagcggcttcagcaagcagtacaactgtgccttcatctggcagaaggacggcgtgaagaagctgaacctgtacctgatcatcaactacttcaagggcggcaagctgcggttcaagaagatcaaacctgaagccttcgaagccaacagattctacaccgtgatcaacaaaaagagcggcgagatcgtgcccatggaggtgaacttcaacttcgacgaccccaacctgatcatcctgcctctggcctttggcaagagacagggcagagaattcatctggaacgacctgctgtccctggaaaccggcagcctgaagctggccaacggaagagtgatcgagaagacactgtacaacagaagaacccggcaggatgagcctgccctgttcgtggccctgaccttcgagcggcgggaggtcctggactcctccaatatcaaaccaatgaacctgatcggcgtggcaagaggcgaaaacatccccgccgtgatcgccctgaccgaccccgagggctgcccactgagccggtttaaggatagcctgggaaacccaacccacatcctgagaatcggcgagagctataaggagaagcagcggaccatccaggccaagaaggaggtggagcagcggagagccggcggctacagccggaagtacgccagcaaagccaagaatctggcagacgatatggtgagaaacaccgctagagatctgctgtactacgccgtgacccaggatgccatgctgatcttcgccaacctgagccggggcttcggccggcagggcaagcggaccttcatggccgagagacagtacacacggatggaggactggctgaccgccaagctggcctacgagggcctgagcaagacctacctgtccaagacactggcccagtacacctccaagacatgcagcaactgtgggtttaccatcaccagcgccgactacgacagggtgctggagaagctgaagaagacagcaacaggctggatgaccacaattaacggcaaggagctgaaggtggagggccagattacctactacaacagatacaagagacagaacgtagtcaaggacctgtccgtcgagctggatagactgagcgaagaatctgtgaacaacgacatctcctcctggacaaagggcagaagcggagaagctctgagcctcctgaagaaaagattctcccatagacccgtgcaggagaagttcgtgtgcctgaactgcggcttcgagacacacgcagccgagcaagccgccctgaacatcgccagatcctggctgttcctgcggagccaggagtacaagaaataccagacaaacaagacaaccggcaacaccgataagagagccttcgtcgagacctggcagtccttttaccggaagaagcttaaggaggtgtggaaacctgccgtgcggtctggcggatctggcggaggctccacaagcggccacgccctgctgaccttcagggacgtggccatcgagttcagccaggaggagtggggctgcctgaaccacacccagagggagctgtacagggacgtgatgctggagaactacggccacctgctgttcctgggcctgatcgtgagcaagcccgacctggtgagcttcctggagcagaccaaggacccctgggacggcaagaggaagaagaccgtggccttccaccccggcctggccctgagcaccagccccaagaaaaagagaaaagtctaagctgccttctgcggggcttgccttctggccatgcccttcttctctcccttgcacctgtacctcttggtctttgaataaagcctgagtaggaaggctagcaaaaaaaaaaaaaaaaaaaaaaaaaaaaaaaaaaaaaaaaaaaaaaaaaaaaaaaaaaaaaaaaaaaaaaaaaaaaaaaa

SEQ ID NO: 6453 - RNA, 5797 nt, synthetic construct
  source 1..5797: mol_type = other RNA
aggaaataagagagaaaagaagagtaagaagaaatataagagccaccatggcccctaagaagaagcgtaaagtgagccggatggaacgcctcgtctacgaggtgcggcagaagtgcagaaacatcgaggacatctgcatctcctgcggatctctgaacgtgaccctggagcacccactgttcatcggcggcatgtgccagaactgtaaaaactgttttctggagtgtgcctatcaatacgacgatgacggctaccagagctactgcaccatctgttgcggcggaagagaggtgctgatgtgtggaaataacaactgctgccggtgcttctgcgtggaatgcgtggacctgctggtgggccccggcgccgcccaggccgctattaaggaagatccttggaactgctacatgtgcggccacaagggcacatacggcctgctgagacggagagaggactggcctagcagactgcagatgttcttcgccaataaccacgaccaggagttcgacccccctaaggtgtaccctcccgtccccgccgagaagagaaagcccatccgggtcctgagcctgttcgatggcatcgccaccggtctgctggtgctgaaggacctgggcatccaggtggataggtacattgcctccgaggtgtgcgaggactccatcaccgtgggaatggtgcgtcatcagggcaagatcatgtacgtgggcgacgtgcggagcgtgacacagaagcatatccaggagtggggccctttcgacctggtgatcggcggcagcccttgcaatgacctgagcatcgtgaacccagcccggaagggcctgtacgagggaaccggcagactgttcttcgagttttacagactgctgcacgacgcccggcctaaggaaggcgacgaccggcccttcttttggctgttcgagaatgtggtggccatgggagtcagcgacaagcgggatattagccggttcctggagagcaaccccgtgatgatcgatgccaaggaagtgagcgccgcccaccgggccagatacttctggggcaatctgcctggcatgaacagacccctggccagcaccgtgaacgacaagctggagctgcaggagtgcctggagcacggccggatcgccaagttcagcaaggtgagaaccatcaccacccgaagcaacagcatcaaacaaggcaaggaccagcactttcctgtgttcatgaacgagaaggaggacatcctgtggtgtaccgagatggagagagtgttcgggttcccagtccactacacagatgtcagcaacatgtctagactggccagacagagactgctgggaagaagctggtccgtccctgtgatcagacacctgttcgcccctctgaaggagtacttcgcctgcgtgagcagcggcaacagcaacgccaacagccggggccccagcttctctagcggcctggtgccactgtccctgagagggagccacatgggccccatggagatctacaaaaccgtgagcgcctggaagcggcagcctgtgcgcgtgctgagcctgtttcggaatatcgataaagtcctgaaaagcctgggattcctggagagcggctctggctccggcggtggcaccctgaagtacgtggaggatgtgacaaacgtggtcagacgggatgtggagaagtggggccccttcgatctggtgtacggcagcacccaacccctgggcagctcttgtgaccggtgccctggctggtacatgtttcagttccaccggatcctgcagtacgccctgccgagacaggagtcccagcggccattcttttggattttcatggacaacttgctgctgaccgaggatgaccaggaaactaccactcggttcctgcagaccgaagccgtgaccctgcaggacgtgagaggccgggactaccagaacgccatgcgggtgtggtccaacatccctggactgaaaagcaagcacgcacctctgacccctaaagaagaggagtacctgcaggcccaggtgcggagcagaagcaagctggacgcccctaaggtggatctgctggtgaagaattgcctcctgcccctgagagagtacttcaagtatttcagccagaatagtctgcccctgggcggcccaagcagcggcgcccctcctcccagcggcggcagcccagccggctccccaacctctaccgaggagggcacctctgagtccgccacccccgagagcggccctggcacctccaccgagcccagcgagggcagcgcacccggcagccctgccggcagccccacctccacagaggagggaaccagcaccgagcccagcgaaggcagcgccccaggcaccagcaccgagcctagtgagggcggctctggcggcggcagcgcccaggagattaaacggatcaacaagatcagaagaagacttgtgaaagacagcaacaccaagaaggccggcaagacaggccccatgaaaaccctgctggttagagtgatgacacccgatctgagagagcggctggaaaacctgagaaagaagcctgaaaatatcccccagcccatcagcaatacatctagagccaacctgaataagctgctgaccgattacaccgaaatgaagaaggcgatcctgcatgtgtactgggaagagttccagaaggaccctgtgggcctgatgagccgggtggcccagcctgccagcaagaagatcgatcagaacaagctgaaacctgagatggacgagaagggcaacctgaccaccgccggctttgcctgctctcagtgtggccagcccctgttcgtgtacaagctggagcaggtgtctgagaagggcaaggcttacaccaactacttcggacggtgcaatgtggccgagcacgaaaagctgatcctgctggcccagctgaagcccgagaaggatagcgacgaagccgtgacatatagcctgggaaagtttgggcagagggccctggatttctacagcattcatgtgaccaaggagtccacccaccccgtgaagcccctggcccagatcgccggaaacagatacgcctccggacctgtgggaaaggccctgagcgacgcatgtatgggcacaatcgcctccttcctgtctaagtaccaggacatcatcatcgaacaccagaaggtggtgaagggcaaccagaagagactggagagcctgcgggagctggccggcaaggaaaacctggaataccctagcgtgaccctgccacctcagcctcacaccaaggagggcgttgatgcctacaacgaagtgatcgcccgggtgcgaatgtgggtgaacctgaacctgtggcagaagctgaagctaagcagagatgatgccaagcctctgctgagactgaagggattcccttcctttcctctggtcgagagacaggccaacgaagtggactggtgggacatggtgtgtaacgtgaagaagctgatcaacgagaaaaaggaggatggcaaggtgttttggcagaatctggctggctacaagagacaggaagccctgagaccatacctgagcagcgaggaagatcggaagaagggaaagaaattcgctcggtaccagctgggcgacctgctgctgcacctggaaaagaagcacggcgaggactggggaaaggtgtacgacgaggcctgggagcggattgacaagaaagtggaaggcctgagcaagcacatcaagctggaagaggaacggagaagcgaggacgcccagagcaaggccgccctgaccgactggctgcgggctaaggccagcttcgtgatcgagggcctgaaggaggccgacaaggacgagttctgcagatgcgagctgaagctgcagaagtggtacggggacctgcggggaaagcccttcgccatcgaagccgagaacagcatcctggacatcagcggcttcagcaagcagtacaactgtgccttcatctggcagaaggacggcgtgaagaagctgaacctgtacctgatcatcaactacttcaagggcggcaagctgcggttcaagaagatcaaacctgaagccttcgaagccaacagattctacaccgtgatcaacaaaaagagcggcgagatcgtgcccatggaggtgaacttcaacttcgacgaccccaacctgatcatcctgcctctggcctttggcaagagacagggcagagaattcatctggaacgacctgctgtccctggaaaccggcagcctgaagctggccaacggaagagtgatcgagaagacactgtacaacagaagaacccggcaggatgagcctgccctgttcgtggccctgaccttcgagcggcgggaggtcctggactcctccaatatcaaaccaatgaacctgatcggcgtggcaagaggcgaaaacatccccgccgtgatcgccctgaccgaccccgagggctgcccactgagccggtttaaggatagcctgggaaacccaacccacatcctgagaatcggcgagagctataaggagaagcagcggaccatccaggccaagaaggaggtggagcagcggagagccggcggctacagccggaagtacgccagcaaagccaagaatctggcagacgatatggtgagaaacaccgctagagatctgctgtactacgccgtgacccaggatgccatgctgatcttcgccaacctgagccggggcttcggccggcagggcaagcggaccttcatggccgagagacagtacacacggatggaggactggctgaccgccaagctggcctacgagggcctgagcaagacctacctgtccaagacactggcccagtacacctccaagacatgcagcaactgtgggtttaccatcaccagcgccgactacgacagggtgctggagaagctgaagaagacagcaacaggctggatgaccacaattaacggcaaggagctgaaggtggagggccagattacctactacaacagatacaagagacagaacgtagtcaaggacctgtccgtcgagctggatagactgagcgaagaatctgtgaacaacgacatctcctcctggacaaagggcagaagcggagaagctctgagcctcctgaagaaaagattctcccatagacccgtgcaggagaagttcgtgtgcctgaactgcggcttcgagacacacgcagccgagcaagccgccctgaacatcgccagatcctggctgttcctgcggagccaggagtacaagaaataccagacaaacaagacaaccggcaacaccgataagagagccttcgtcgagacctggcagtccttttaccggaagaagcttaaggaggtgtggaaacctgccgtgcggtctggcggatctggcggaggctccacaagcttccaggagctggtgaccttcagggacgtggccatcgacttcagcggccaggagtgggagtacctggacccccaccagagggacctgtacagggacgtgatgctggagaactacaggaacctggtgagcctgggccacagcatcagcaagcccgtgctggtggacctgctggagcagggcaaggagccctggatgatcctgagggaggagacccagttccccggcaaggaggacaggggccacaccagccccaagaaaaagagaaaagtctaagctgccttctgcggggcttgccttctggccatgcccttcttctctcccttgcacctgtacctcttggtctttgaataaagcctgagtaggaaggctagcaaaaaaaaaaaaaaaaaaaaaaaaaaaaaaaaaaaaaaaaaaaaaaaaaaaaaaaaaaaaaaaaaaaaaaaaaaaaaaaa

SEQ ID NO: 6454 - RNA, 5797 nt, synthetic construct
  source 1..5797: mol_type = other RNA
aggaaataagagagaaaagaagagtaagaagaaatataagagccaccatggcccctaagaagaagcgtaaagtgagccggatggaacgcctcgtctacgaggtgcggcagaagtgcagaaacatcgaggacatctgcatctcctgcggatctctgaacgtgaccctggagcacccactgttcatcggcggcatgtgccagaactgtaaaaactgttttctggagtgtgcctatcaatacgacgatgacggctaccagagctactgcaccatctgttgcggcggaagagaggtgctgatgtgtggaaataacaactgctgccggtgcttctgcgtggaatgcgtggacctgctggtgggccccggcgccgcccaggccgctattaaggaagatccttggaactgctacatgtgcggccacaagggcacatacggcctgctgagacggagagaggactggcctagcagactgcagatgttcttcgccaataaccacgaccaggagttcgacccccctaaggtgtaccctcccgtccccgccgagaagagaaagcccatccgggtcctgagcctgttcgatggcatcgccaccggtctgctggtgctgaaggacctgggcatccaggtggataggtacattgcctccgaggtgtgcgaggactccatcaccgtgggaatggtgcgtcatcagggcaagatcatgtacgtgggcgacgtgcggagcgtgacacagaagcatatccaggagtggggccctttcgacctggtgatcggcggcagcccttgcaatgacctgagcatcgtgaacccagcccggaagggcctgtacgagggaaccggcagactgttcttcgagttttacagactgctgcacgacgcccggcctaaggaaggcgacgaccggcccttcttttggctgttcgagaatgtggtggccatgggagtcagcgacaagcgggatattagccggttcctggagagcaaccccgtgatgatcgatgccaaggaagtgagcgccgcccaccgggccagatacttctggggcaatctgcctggcatgaacagacccctggccagcaccgtgaacgacaagctggagctgcaggagtgcctggagcacggccggatcgccaagttcagcaaggtgagaaccatcaccacccgaagcaacagcatcaaacaaggcaaggaccagcactttcctgtgttcatgaacgagaaggaggacatcctgtggtgtaccgagatggagagagtgttcgggttcccagtccactacacagatgtcagcaacatgtctagactggccagacagagactgctgggaagaagctggtccgtccctgtgatcagacacctgttcgcccctctgaaggagtacttcgcctgcgtgagcagcggcaacagcaacgccaacagccggggccccagcttctctagcggcctggtgccactgtccctgagagggagccacatgggccccatggagatctacaaaaccgtgagcgcctggaagcggcagcctgtgcgcgtgctgagcctgtttcggaatatcgataaagtcctgaaaagcctgggattcctggagagcggctctggctccggcggtggcaccctgaagtacgtggaggatgtgacaaacgtggtcagacgggatgtggagaagtggggccccttcgatctggtgtacggcagcacccaacccctgggcagctcttgtgaccggtgccctggctggtacatgtttcagttccaccggatcctgcagtacgccctgccgagacaggagtcccagcggccattcttttggattttcatggacaacttgctgctgaccgaggatgaccaggaaactaccactcggttcctgcagaccgaagccgtgaccctgcaggacgtgagaggccgggactaccagaacgccatgcgggtgtggtccaacatccctggactgaaaagcaagcacgcacctctgacccctaaagaagaggagtacctgcaggcccaggtgcggagcagaagcaagctggacgcccctaaggtggatctgctggtgaagaattgcctcctgcccctgagagagtacttcaagtatttcagccagaatagtctgcccctgggcggcccaagcagcggcgcccctcctcccagcggcggcagcccagccggctccccaacctctaccgaggagggcacctctgagtccgccacccccgagagcggccctggcacctccaccgagcccagcgagggcagcgcacccggcagccctgccggcagccccacctccacagaggagggaaccagcaccgagcccagcgaaggcagcgccccaggcaccagcaccgagcctagtgagggcggctctggcggcggcagcgcccaggagattaaacggatcaacaagatcagaagaagacttgtgaaagacagcaacaccaagaaggccggcaagacaggccccatgaaaaccctgctggttagagtgatgacacccgatctgagagagcggctggaaaacctgagaaagaagcctgaaaatatcccccagcccatcagcaatacatctagagccaacctgaataagctgctgaccgattacaccgaaatgaagaaggcgatcctgcatgtgtactgggaagagttccagaaggaccctgtgggcctgatgagccgggtggcccagcctgccagcaagaagatcgatcagaacaagctgaaacctgagatggacgagaagggcaacctgaccaccgccggctttgcctgctctcagtgtggccagcccctgttcgtgtacaagctggagcaggtgtctgagaagggcaaggcttacaccaactacttcggacggtgcaatgtggccgagcacgaaaagctgatcctgctggcccagctgaagcccgagaaggatagcgacgaagccgtgacatatagcctgggaaagtttgggcagagggccctggatttctacagcattcatgtgaccaaggagtccacccaccccgtgaagcccctggcccagatcgccggaaacagatacgcctccggacctgtgggaaaggccctgagcgacgcatgtatgggcacaatcgcctccttcctgtctaagtaccaggacatcatcatcgaacaccagaaggtggtgaagggcaaccagaagagactggagagcctgcgggagctggccggcaaggaaaacctggaataccctagcgtgaccctgccacctcagcctcacaccaaggagggcgttgatgcctacaacgaagtgatcgcccgggtgcgaatgtgggtgaacctgaacctgtggcagaagctgaagctaagcagagatgatgccaagcctctgctgagactgaagggattcccttcctttcctctggtcgagagacaggccaacgaagtggactggtgggacatggtgtgtaacgtgaagaagctgatcaacgagaaaaaggaggatggcaaggtgttttggcagaatctggctggctacaagagacaggaagccctgagaccatacctgagcagcgaggaagatcggaagaagggaaagaaattcgctcggtaccagctgggcgacctgctgctgcacctggaaaagaagcacggcgaggactggggaaaggtgtacgacgaggcctgggagcggattgacaagaaagtggaaggcctgagcaagcacatcaagctggaagaggaacggagaagcgaggacgcccagagcaaggccgccctgaccgactggctgcgggctaaggccagcttcgtgatcgagggcctgaaggaggccgacaaggacgagttctgcagatgcgagctgaagctgcagaagtggtacggggacctgcggggaaagcccttcgccatcgaagccgagaacagcatcctggacatcagcggcttcagcaagcagtacaactgtgccttcatctggcagaaggacggcgtgaagaagctgaacctgtacctgatcatcaactacttcaagggcggcaagctgcggttcaagaagatcaaacctgaagccttcgaagccaacagattctacaccgtgatcaacaaaaagagcggcgagatcgtgcccatggaggtgaacttcaacttcgacgaccccaacctgatcatcctgcctctggcctttggcaagagacagggcagagaattcatctggaacgacctgctgtccctggaaaccggcagcctgaagctggccaacggaagagtgatcgagaagacactgtacaacagaagaacccggcaggatgagcctgccctgttcgtggccctgaccttcgagcggcgggaggtcctggactcctccaatatcaaaccaatgaacctgatcggcgtggcaagaggcgaaaacatccccgccgtgatcgccctgaccgaccccgagggctgcccactgagccggtttaaggatagcctgggaaacccaacccacatcctgagaatcggcgagagctataaggagaagcagcggaccatccaggccaagaaggaggtggagcagcggagagccggcggctacagccggaagtacgccagcaaagccaagaatctggcagacgatatggtgagaaacaccgctagagatctgctgtactacgccgtgacccaggatgccatgctgatcttcgccaacctgagccggggcttcggccggcagggcaagcggaccttcatggccgagagacagtacacacggatggaggactggctgaccgccaagctggcctacgagggcctgagcaagacctacctgtccaagacactggcccagtacacctccaagacatgcagcaactgtgggtttaccatcaccagcgccgactacgacagggtgctggagaagctgaagaagacagcaacaggctggatgaccacaattaacggcaaggagctgaaggtggagggccagattacctactacaacagatacaagagacagaacgtagtcaaggacctgtccgtcgagctggatagactgagcgaagaatctgtgaacaacgacatctcctcctggacaaagggcagaagcggagaagctctgagcctcctgaagaaaagattctcccatagacccgtgcaggagaagttcgtgtgcctgaactgcggcttcgagacacacgcagccgagcaagccgccctgaacatcgccagatcctggctgttcctgcggagccaggagtacaagaaataccagacaaacaagacaaccggcaacaccgataagagagccttcgtcgagacctggcagtccttttaccggaagaagcttaaggaggtgtggaaacctgccgtgcggtctggcggatctggcggaggctccacaagcctgctgaccttcgaggacgtggccgtgtacttcaccgaggaggagtgggccctgctggaccccaaccagaagatcctgtacaacgacgtgatgcaggagaactacgagaacgtgatctgcctgggcctgaagctgaagaacgacaccggcaacgaccagcccaccagcgtgagcaccctggagatccaggccagcggctgcaaggtgctgaggaaggccaggatcaaggtggcccagaagaccaccagccccaagaaaaagagaaaagtctaagctgccttctgcggggcttgccttctggccatgcccttcttctctcccttgcacctgtacctcttggtctttgaataaagcctgagtaggaaggctagcaaaaaaaaaaaaaaaaaaaaaaaaaaaaaaaaaaaaaaaaaaaaaaaaaaaaaaaaaaaaaaaaaaaaaaaaaaaaaaaa

SEQ ID NO: 6455 - RNA, 5797 nt, synthetic construct
  source 1..5797: mol_type = other RNA
aggaaataagagagaaaagaagagtaagaagaaatataagagccaccatggcccctaagaagaagcgtaaagtgagccggatggaacgcctcgtctacgaggtgcggcagaagtgcagaaacatcgaggacatctgcatctcctgcggatctctgaacgtgaccctggagcacccactgttcatcggcggcatgtgccagaactgtaaaaactgttttctggagtgtgcctatcaatacgacgatgacggctaccagagctactgcaccatctgttgcggcggaagagaggtgctgatgtgtggaaataacaactgctgccggtgcttctgcgtggaatgcgtggacctgctggtgggccccggcgccgcccaggccgctattaaggaagatccttggaactgctacatgtgcggccacaagggcacatacggcctgctgagacggagagaggactggcctagcagactgcagatgttcttcgccaataaccacgaccaggagttcgacccccctaaggtgtaccctcccgtccccgccgagaagagaaagcccatccgggtcctgagcctgttcgatggcatcgccaccggtctgctggtgctgaaggacctgggcatccaggtggataggtacattgcctccgaggtgtgcgaggactccatcaccgtgggaatggtgcgtcatcagggcaagatcatgtacgtgggcgacgtgcggagcgtgacacagaagcatatccaggagtggggccctttcgacctggtgatcggcggcagcccttgcaatgacctgagcatcgtgaacccagcccggaagggcctgtacgagggaaccggcagactgttcttcgagttttacagactgctgcacgacgcccggcctaaggaaggcgacgaccggcccttcttttggctgttcgagaatgtggtggccatgggagtcagcgacaagcgggatattagccggttcctggagagcaaccccgtgatgatcgatgccaaggaagtgagcgccgcccaccgggccagatacttctggggcaatctgcctggcatgaacagacccctggccagcaccgtgaacgacaagctggagctgcaggagtgcctggagcacggccggatcgccaagttcagcaaggtgagaaccatcaccacccgaagcaacagcatcaaacaaggcaaggaccagcactttcctgtgttcatgaacgagaaggaggacatcctgtggtgtaccgagatggagagagtgttcgggttcccagtccactacacagatgtcagcaacatgtctagactggccagacagagactgctgggaagaagctggtccgtccctgtgatcagacacctgttcgcccctctgaaggagtacttcgcctgcgtgagcagcggcaacagcaacgccaacagccggggccccagcttctctagcggcctggtgccactgtccctgagagggagccacatgggccccatggagatctacaaaaccgtgagcgcctggaagcggcagcctgtgcgcgtgctgagcctgtttcggaatatcgataaagtcctgaaaagcctgggattcctggagagcggctctggctccggcggtggcaccctgaagtacgtggaggatgtgacaaacgtggtcagacgggatgtggagaagtggggccccttcgatctggtgtacggcagcacccaacccctgggcagctcttgtgaccggtgccctggctggtacatgtttcagttccaccggatcctgcagtacgccctgccgagacaggagtcccagcggccattcttttggattttcatggacaacttgctgctgaccgaggatgaccaggaaactaccactcggttcctgcagaccgaagccgtgaccctgcaggacgtgagaggccgggactaccagaacgccatgcgggtgtggtccaacatccctggactgaaaagcaagcacgcacctctgacccctaaagaagaggagtacctgcaggcccaggtgcggagcagaagcaagctggacgcccctaaggtggatctgctggtgaagaattgcctcctgcccctgagagagtacttcaagtatttcagccagaatagtctgcccctgggcggcccaagcagcggcgcccctcctcccagcggcggcagcccagccggctccccaacctctaccgaggagggcacctctgagtccgccacccccgagagcggccctggcacctccaccgagcccagcgagggcagcgcacccggcagccctgccggcagccccacctccacagaggagggaaccagcaccgagcccagcgaaggcagcgccccaggcaccagcaccgagcctagtgagggcggctctggcggcggcagcgcccaggagattaaacggatcaacaagatcagaagaagacttgtgaaagacagcaacaccaagaaggccggcaagacaggccccatgaaaaccctgctggttagagtgatgacacccgatctgagagagcggctggaaaacctgagaaagaagcctgaaaatatcccccagcccatcagcaatacatctagagccaacctgaataagctgctgaccgattacaccgaaatgaagaaggcgatcctgcatgtgtactgggaagagttccagaaggaccctgtgggcctgatgagccgggtggcccagcctgccagcaagaagatcgatcagaacaagctgaaacctgagatggacgagaagggcaacctgaccaccgccggctttgcctgctctcagtgtggccagcccctgttcgtgtacaagctggagcaggtgtctgagaagggcaaggcttacaccaactacttcggacggtgcaatgtggccgagcacgaaaagctgatcctgctggcccagctgaagcccgagaaggatagcgacgaagccgtgacatatagcctgggaaagtttgggcagagggccctggatttctacagcattcatgtgaccaaggagtccacccaccccgtgaagcccctggcccagatcgccggaaacagatacgcctccggacctgtgggaaaggccctgagcgacgcatgtatgggcacaatcgcctccttcctgtctaagtaccaggacatcatcatcgaacaccagaaggtggtgaagggcaaccagaagagactggagagcctgcgggagctggccggcaaggaaaacctggaataccctagcgtgaccctgccacctcagcctcacaccaaggagggcgttgatgcctacaacgaagtgatcgcccgggtgcgaatgtgggtgaacctgaacctgtggcagaagctgaagctaagcagagatgatgccaagcctctgctgagactgaagggattcccttcctttcctctggtcgagagacaggccaacgaagtggactggtgggacatggtgtgtaacgtgaagaagctgatcaacgagaaaaaggaggatggcaaggtgttttggcagaatctggctggctacaagagacaggaagccctgagaccatacctgagcagcgaggaagatcggaagaagggaaagaaattcgctcggtaccagctgggcgacctgctgctgcacctggaaaagaagcacggcgaggactggggaaaggtgtacgacgaggcctgggagcggattgacaagaaagtggaaggcctgagcaagcacatcaagctggaagaggaacggagaagcgaggacgcccagagcaaggccgccctgaccgactggctgcgggctaaggccagcttcgtgatcgagggcctgaaggaggccgacaaggacgagttctgcagatgcgagctgaagctgcagaagtggtacggggacctgcggggaaagcccttcgccatcgaagccgagaacagcatcctggacatcagcggcttcagcaagcagtacaactgtgccttcatctggcagaaggacggcgtgaagaagctgaacctgtacctgatcatcaactacttcaagggcggcaagctgcggttcaagaagatcaaacctgaagccttcgaagccaacagattctacaccgtgatcaacaaaaagagcggcgagatcgtgcccatggaggtgaacttcaacttcgacgaccccaacctgatcatcctgcctctggcctttggcaagagacagggcagagaattcatctggaacgacctgctgtccctggaaaccggcagcctgaagctggccaacggaagagtgatcgagaagacactgtacaacagaagaacccggcaggatgagcctgccctgttcgtggccctgaccttcgagcggcgggaggtcctggactcctccaatatcaaaccaatgaacctgatcggcgtggcaagaggcgaaaacatccccgccgtgatcgccctgaccgaccccgagggctgcccactgagccggtttaaggatagcctgggaaacccaacccacatcctgagaatcggcgagagctataaggagaagcagcggaccatccaggccaagaaggaggtggagcagcggagagccggcggctacagccggaagtacgccagcaaagccaagaatctggcagacgatatggtgagaaacaccgctagagatctgctgtactacgccgtgacccaggatgccatgctgatcttcgccaacctgagccggggcttcggccggcagggcaagcggaccttcatggccgagagacagtacacacggatggaggactggctgaccgccaagctggcctacgagggcctgagcaagacctacctgtccaagacactggcccagtacacctccaagacatgcagcaactgtgggtttaccatcaccagcgccgactacgacagggtgctggagaagctgaagaagacagcaacaggctggatgaccacaattaacggcaaggagctgaaggtggagggccagattacctactacaacagatacaagagacagaacgtagtcaaggacctgtccgtcgagctggatagactgagcgaagaatctgtgaacaacgacatctcctcctggacaaagggcagaagcggagaagctctgagcctcctgaagaaaagattctcccatagacccgtgcaggagaagttcgtgtgcctgaactgcggcttcgagacacacgcagccgagcaagccgccctgaacatcgccagatcctggctgttcctgcggagccaggagtacaagaaataccagacaaacaagacaaccggcaacaccgataagagagccttcgtcgagacctggcagtccttttaccggaagaagcttaaggaggtgtggaaacctgccgtgcggtctggcggatctggcggaggctccacaagcagccagggcctggtgaccttcagggacgtggccctggacttcagccaggaggagtgggagtggctggaccagagccagaaggacctgtacagggacgtgatgctggagaactacaggaacctggtgtggctgggcctgagcatcagcaagcccaacatgatcagcctgctggagcagggcaaggagccctggatggtggagaaggagatgagcgacggccagtgcgccgactgggacagctggaccagccccaagaaaaagagaaaagtctaagctgccttctgcggggcttgccttctggccatgcccttcttctctcccttgcacctgtacctcttggtctttgaataaagcctgagtaggaaggctagcaaaaaaaaaaaaaaaaaaaaaaaaaaaaaaaaaaaaaaaaaaaaaaaaaaaaaaaaaaaaaaaaaaaaaaaaaaaaaaaa

SEQ ID NO: 6456 - RNA, 5797 nt, synthetic construct
  source 1..5797: mol_type = other RNA
aggaaataagagagaaaagaagagtaagaagaaatataagagccaccatggcccctaagaagaagcgtaaagtgagccggatggaacgcctcgtctacgaggtgcggcagaagtgcagaaacatcgaggacatctgcatctcctgcggatctctgaacgtgaccctggagcacccactgttcatcggcggcatgtgccagaactgtaaaaactgttttctggagtgtgcctatcaatacgacgatgacggctaccagagctactgcaccatctgttgcggcggaagagaggtgctgatgtgtggaaataacaactgctgccggtgcttctgcgtggaatgcgtggacctgctggtgggccccggcgccgcccaggccgctattaaggaagatccttggaactgctacatgtgcggccacaagggcacatacggcctgctgagacggagagaggactggcctagcagactgcagatgttcttcgccaataaccacgaccaggagttcgacccccctaaggtgtaccctcccgtccccgccgagaagagaaagcccatccgggtcctgagcctgttcgatggcatcgccaccggtctgctggtgctgaaggacctgggcatccaggtggataggtacattgcctccgaggtgtgcgaggactccatcaccgtgggaatggtgcgtcatcagggcaagatcatgtacgtgggcgacgtgcggagcgtgacacagaagcatatccaggagtggggccctttcgacctggtgatcggcggcagcccttgcaatgacctgagcatcgtgaacccagcccggaagggcctgtacgagggaaccggcagactgttcttcgagttttacagactgctgcacgacgcccggcctaaggaaggcgacgaccggcccttcttttggctgttcgagaatgtggtggccatgggagtcagcgacaagcgggatattagccggttcctggagagcaaccccgtgatgatcgatgccaaggaagtgagcgccgcccaccgggccagatacttctggggcaatctgcctggcatgaacagacccctggccagcaccgtgaacgacaagctggagctgcaggagtgcctggagcacggccggatcgccaagttcagcaaggtgagaaccatcaccacccgaagcaacagcatcaaacaaggcaaggaccagcactttcctgtgttcatgaacgagaaggaggacatcctgtggtgtaccgagatggagagagtgttcgggttcccagtccactacacagatgtcagcaacatgtctagactggccagacagagactgctgggaagaagctggtccgtccctgtgatcagacacctgttcgcccctctgaaggagtacttcgcctgcgtgagcagcggcaacagcaacgccaacagccggggccccagcttctctagcggcctggtgccactgtccctgagagggagccacatgggccccatggagatctacaaaaccgtgagcgcctggaagcggcagcctgtgcgcgtgctgagcctgtttcggaatatcgataaagtcctgaaaagcctgggattcctggagagcggctctggctccggcggtggcaccctgaagtacgtggaggatgtgacaaacgtggtcagacgggatgtggagaagtggggccccttcgatctggtgtacggcagcacccaacccctgggcagctcttgtgaccggtgccctggctggtacatgtttcagttccaccggatcctgcagtacgccctgccgagacaggagtcccagcggccattcttttggattttcatggacaacttgctgctgaccgaggatgaccaggaaactaccactcggttcctgcagaccgaagccgtgaccctgcaggacgtgagaggccgggactaccagaacgccatgcgggtgtggtccaacatccctggactgaaaagcaagcacgcacctctgacccctaaagaagaggagtacctgcaggcccaggtgcggagcagaagcaagctggacgcccctaaggtggatctgctggtgaagaattgcctcctgcccctgagagagtacttcaagtatttcagccagaatagtctgcccctgggcggcccaagcagcggcgcccctcctcccagcggcggcagcccagccggctccccaacctctaccgaggagggcacctctgagtccgccacccccgagagcggccctggcacctccaccgagcccagcgagggcagcgcacccggcagccctgccggcagccccacctccacagaggagggaaccagcaccgagcccagcgaaggcagcgccccaggcaccagcaccgagcctagtgagggcggctctggcggcggcagcgcccaggagattaaacggatcaacaagatcagaagaagacttgtgaaagacagcaacaccaagaaggccggcaagacaggccccatgaaaaccctgctggttagagtgatgacacccgatctgagagagcggctggaaaacctgagaaagaagcctgaaaatatcccccagcccatcagcaatacatctagagccaacctgaataagctgctgaccgattacaccgaaatgaagaaggcgatcctgcatgtgtactgggaagagttccagaaggaccctgtgggcctgatgagccgggtggcccagcctgccagcaagaagatcgatcagaacaagctgaaacctgagatggacgagaagggcaacctgaccaccgccggctttgcctgctctcagtgtggccagcccctgttcgtgtacaagctggagcaggtgtctgagaagggcaaggcttacaccaactacttcggacggtgcaatgtggccgagcacgaaaagctgatcctgctggcccagctgaagcccgagaaggatagcgacgaagccgtgacatatagcctgggaaagtttgggcagagggccctggatttctacagcattcatgtgaccaaggagtccacccaccccgtgaagcccctggcccagatcgccggaaacagatacgcctccggacctgtgggaaaggccctgagcgacgcatgtatgggcacaatcgcctccttcctgtctaagtaccaggacatcatcatcgaacaccagaaggtggtgaagggcaaccagaagagactggagagcctgcgggagctggccggcaaggaaaacctggaataccctagcgtgaccctgccacctcagcctcacaccaaggagggcgttgatgcctacaacgaagtgatcgcccgggtgcgaatgtgggtgaacctgaacctgtggcagaagctgaagctaagcagagatgatgccaagcctctgctgagactgaagggattcccttcctttcctctggtcgagagacaggccaacgaagtggactggtgggacatggtgtgtaacgtgaagaagctgatcaacgagaaaaaggaggatggcaaggtgttttggcagaatctggctggctacaagagacaggaagccctgagaccatacctgagcagcgaggaagatcggaagaagggaaagaaattcgctcggtaccagctgggcgacctgctgctgcacctggaaaagaagcacggcgaggactggggaaaggtgtacgacgaggcctgggagcggattgacaagaaagtggaaggcctgagcaagcacatcaagctggaagaggaacggagaagcgaggacgcccagagcaaggccgccctgaccgactggctgcgggctaaggccagcttcgtgatcgagggcctgaaggaggccgacaaggacgagttctgcagatgcgagctgaagctgcagaagtggtacggggacctgcggggaaagcccttcgccatcgaagccgagaacagcatcctggacatcagcggcttcagcaagcagtacaactgtgccttcatctggcagaaggacggcgtgaagaagctgaacctgtacctgatcatcaactacttcaagggcggcaagctgcggttcaagaagatcaaacctgaagccttcgaagccaacagattctacaccgtgatcaacaaaaagagcggcgagatcgtgcccatggaggtgaacttcaacttcgacgaccccaacctgatcatcctgcctctggcctttggcaagagacagggcagagaattcatctggaacgacctgctgtccctggaaaccggcagcctgaagctggccaacggaagagtgatcgagaagacactgtacaacagaagaacccggcaggatgagcctgccctgttcgtggccctgaccttcgagcggcgggaggtcctggactcctccaatatcaaaccaatgaacctgatcggcgtggcaagaggcgaaaacatccccgccgtgatcgccctgaccgaccccgagggctgcccactgagccggtttaaggatagcctgggaaacccaacccacatcctgagaatcggcgagagctataaggagaagcagcggaccatccaggccaagaaggaggtggagcagcggagagccggcggctacagccggaagtacgccagcaaagccaagaatctggcagacgatatggtgagaaacaccgctagagatctgctgtactacgccgtgacccaggatgccatgctgatcttcgccaacctgagccggggcttcggccggcagggcaagcggaccttcatggccgagagacagtacacacggatggaggactggctgaccgccaagctggcctacgagggcctgagcaagacctacctgtccaagacactggcccagtacacctccaagacatgcagcaactgtgggtttaccatcaccagcgccgactacgacagggtgctggagaagctgaagaagacagcaacaggctggatgaccacaattaacggcaaggagctgaaggtggagggccagattacctactacaacagatacaagagacagaacgtagtcaaggacctgtccgtcgagctggatagactgagcgaagaatctgtgaacaacgacatctcctcctggacaaagggcagaagcggagaagctctgagcctcctgaagaaaagattctcccatagacccgtgcaggagaagttcgtgtgcctgaactgcggcttcgagacacacgcagccgagcaagccgccctgaacatcgccagatcctggctgttcctgcggagccaggagtacaagaaataccagacaaacaagacaaccggcaacaccgataagagagccttcgtcgagacctggcagtccttttaccggaagaagcttaaggaggtgtggaaacctgccgtgcggtctggcggatctggcggaggctccacaagccaggccgaggtgaccttcgaggacgtggccgtgttcctgagccaggaggagtggggcctgctgggccccgcccagaagggcctgtacagggaggtgatgctggagacctacaggaacctggtgagcctgggcgccggcctggccggccccaagcccgaggtgatcgtgcacctggagaggggcgacgagctgtgggtgctggacatgaggggcgccgagcagcccagcgtggacggcagcgccaccagccccaagaaaaagagaaaagtctaagctgccttctgcggggcttgccttctggccatgcccttcttctctcccttgcacctgtacctcttggtctttgaataaagcctgagtaggaaggctagcaaaaaaaaaaaaaaaaaaaaaaaaaaaaaaaaaaaaaaaaaaaaaaaaaaaaaaaaaaaaaaaaaaaaaaaaaaaaaaaa

SEQ ID NO: 6457 - RNA, 5797 nt, synthetic construct
  source 1..5797: mol_type = other RNA
aggaaataagagagaaaagaagagtaagaagaaatataagagccaccatggcccctaagaagaagcgtaaagtgagccggatggaacgcctcgtctacgaggtgcggcagaagtgcagaaacatcgaggacatctgcatctcctgcggatctctgaacgtgaccctggagcacccactgttcatcggcggcatgtgccagaactgtaaaaactgttttctggagtgtgcctatcaatacgacgatgacggctaccagagctactgcaccatctgttgcggcggaagagaggtgctgatgtgtggaaataacaactgctgccggtgcttctgcgtggaatgcgtggacctgctggtgggccccggcgccgcccaggccgctattaaggaagatccttggaactgctacatgtgcggccacaagggcacatacggcctgctgagacggagagaggactggcctagcagactgcagatgttcttcgccaataaccacgaccaggagttcgacccccctaaggtgtaccctcccgtccccgccgagaagagaaagcccatccgggtcctgagcctgttcgatggcatcgccaccggtctgctggtgctgaaggacctgggcatccaggtggataggtacattgcctccgaggtgtgcgaggactccatcaccgtgggaatggtgcgtcatcagggcaagatcatgtacgtgggcgacgtgcggagcgtgacacagaagcatatccaggagtggggccctttcgacctggtgatcggcggcagcccttgcaatgacctgagcatcgtgaacccagcccggaagggcctgtacgagggaaccggcagactgttcttcgagttttacagactgctgcacgacgcccggcctaaggaaggcgacgaccggcccttcttttggctgttcgagaatgtggtggccatgggagtcagcgacaagcgggatattagccggttcctggagagcaaccccgtgatgatcgatgccaaggaagtgagcgccgcccaccgggccagatacttctggggcaatctgcctggcatgaacagacccctggccagcaccgtgaacgacaagctggagctgcaggagtgcctggagcacggccggatcgccaagttcagcaaggtgagaaccatcaccacccgaagcaacagcatcaaacaaggcaaggaccagcactttcctgtgttcatgaacgagaaggaggacatcctgtggtgtaccgagatggagagagtgttcgggttcccagtccactacacagatgtcagcaacatgtctagactggccagacagagactgctgggaagaagctggtccgtccctgtgatcagacacctgttcgcccctctgaaggagtacttcgcctgcgtgagcagcggcaacagcaacgccaacagccggggccccagcttctctagcggcctggtgccactgtccctgagagggagccacatgggccccatggagatctacaaaaccgtgagcgcctggaagcggcagcctgtgcgcgtgctgagcctgtttcggaatatcgataaagtcctgaaaagcctgggattcctggagagcggctctggctccggcggtggcaccctgaagtacgtggaggatgtgacaaacgtggtcagacgggatgtggagaagtggggccccttcgatctggtgtacggcagcacccaacccctgggcagctcttgtgaccggtgccctggctggtacatgtttcagttccaccggatcctgcagtacgccctgccgagacaggagtcccagcggccattcttttggattttcatggacaacttgctgctgaccgaggatgaccaggaaactaccactcggttcctgcagaccgaagccgtgaccctgcaggacgtgagaggccgggactaccagaacgccatgcgggtgtggtccaacatccctggactgaaaagcaagcacgcacctctgacccctaaagaagaggagtacctgcaggcccaggtgcggagcagaagcaagctggacgcccctaaggtggatctgctggtgaagaattgcctcctgcccctgagagagtacttcaagtatttcagccagaatagtctgcccctgggcggcccaagcagcggcgcccctcctcccagcggcggcagcccagccggctccccaacctctaccgaggagggcacctctgagtccgccacccccgagagcggccctggcacctccaccgagcccagcgagggcagcgcacccggcagccctgccggcagccccacctccacagaggagggaaccagcaccgagcccagcgaaggcagcgccccaggcaccagcaccgagcctagtgagggcggctctggcggcggcagcgcccaggagattaaacggatcaacaagatcagaagaagacttgtgaaagacagcaacaccaagaaggccggcaagacaggccccatgaaaaccctgctggttagagtgatgacacccgatctgagagagcggctggaaaacctgagaaagaagcctgaaaatatcccccagcccatcagcaatacatctagagccaacctgaataagctgctgaccgattacaccgaaatgaagaaggcgatcctgcatgtgtactgggaagagttccagaaggaccctgtgggcctgatgagccgggtggcccagcctgccagcaagaagatcgatcagaacaagctgaaacctgagatggacgagaagggcaacctgaccaccgccggctttgcctgctctcagtgtggccagcccctgttcgtgtacaagctggagcaggtgtctgagaagggcaaggcttacaccaactacttcggacggtgcaatgtggccgagcacgaaaagctgatcctgctggcccagctgaagcccgagaaggatagcgacgaagccgtgacatatagcctgggaaagtttgggcagagggccctggatttctacagcattcatgtgaccaaggagtccacccaccccgtgaagcccctggcccagatcgccggaaacagatacgcctccggacctgtgggaaaggccctgagcgacgcatgtatgggcacaatcgcctccttcctgtctaagtaccaggacatcatcatcgaacaccagaaggtggtgaagggcaaccagaagagactggagagcctgcgggagctggccggcaaggaaaacctggaataccctagcgtgaccctgccacctcagcctcacaccaaggagggcgttgatgcctacaacgaagtgatcgcccgggtgcgaatgtgggtgaacctgaacctgtggcagaagctgaagctaagcagagatgatgccaagcctctgctgagactgaagggattcccttcctttcctctggtcgagagacaggccaacgaagtggactggtgggacatggtgtgtaacgtgaagaagctgatcaacgagaaaaaggaggatggcaaggtgttttggcagaatctggctggctacaagagacaggaagccctgagaccatacctgagcagcgaggaagatcggaagaagggaaagaaattcgctcggtaccagctgggcgacctgctgctgcacctggaaaagaagcacggcgaggactggggaaaggtgtacgacgaggcctgggagcggattgacaagaaagtggaaggcctgagcaagcacatcaagctggaagaggaacggagaagcgaggacgcccagagcaaggccgccctgaccgactggctgcgggctaaggccagcttcgtgatcgagggcctgaaggaggccgacaaggacgagttctgcagatgcgagctgaagctgcagaagtggtacggggacctgcggggaaagcccttcgccatcgaagccgagaacagcatcctggacatcagcggcttcagcaagcagtacaactgtgccttcatctggcagaaggacggcgtgaagaagctgaacctgtacctgatcatcaactacttcaagggcggcaagctgcggttcaagaagatcaaacctgaagccttcgaagccaacagattctacaccgtgatcaacaaaaagagcggcgagatcgtgcccatggaggtgaacttcaacttcgacgaccccaacctgatcatcctgcctctggcctttggcaagagacagggcagagaattcatctggaacgacctgctgtccctggaaaccggcagcctgaagctggccaacggaagagtgatcgagaagacactgtacaacagaagaacccggcaggatgagcctgccctgttcgtggccctgaccttcgagcggcgggaggtcctggactcctccaatatcaaaccaatgaacctgatcggcgtggcaagaggcgaaaacatccccgccgtgatcgccctgaccgaccccgagggctgcccactgagccggtttaaggatagcctgggaaacccaacccacatcctgagaatcggcgagagctataaggagaagcagcggaccatccaggccaagaaggaggtggagcagcggagagccggcggctacagccggaagtacgccagcaaagccaagaatctggcagacgatatggtgagaaacaccgctagagatctgctgtactacgccgtgacccaggatgccatgctgatcttcgccaacctgagccggggcttcggccggcagggcaagcggaccttcatggccgagagacagtacacacggatggaggactggctgaccgccaagctggcctacgagggcctgagcaagacctacctgtccaagacactggcccagtacacctccaagacatgcagcaactgtgggtttaccatcaccagcgccgactacgacagggtgctggagaagctgaagaagacagcaacaggctggatgaccacaattaacggcaaggagctgaaggtggagggccagattacctactacaacagatacaagagacagaacgtagtcaaggacctgtccgtcgagctggatagactgagcgaagaatctgtgaacaacgacatctcctcctggacaaagggcagaagcggagaagctctgagcctcctgaagaaaagattctcccatagacccgtgcaggagaagttcgtgtgcctgaactgcggcttcgagacacacgcagccgagcaagccgccctgaacatcgccagatcctggctgttcctgcggagccaggagtacaagaaataccagacaaacaagacaaccggcaacaccgataagagagccttcgtcgagacctggcagtccttttaccggaagaagcttaaggaggtgtggaaacctgccgtgcggtctggcggatctggcggaggctccacaagcatgacccccggcccccccggcagcctggagatggagcccctgaccttcaaggacgtggccatcgagttctgcctggaggagtggcagtgcctggacaccgcccagcaggacctgtacaggaacgtgatgctggagaactacaggaacctggtgttcctgggcatcgccgtgagcaagcccgacctgatcacctgcctggagcagggcaaggtgccctggaacaggaagaggcacgagatggtgaccagccccaagaaaaagagaaaagtctaagctgccttctgcggggcttgccttctggccatgcccttcttctctcccttgcacctgtacctcttggtctttgaataaagcctgagtaggaaggctagcaaaaaaaaaaaaaaaaaaaaaaaaaaaaaaaaaaaaaaaaaaaaaaaaaaaaaaaaaaaaaaaaaaaaaaaaaaaaaaaa

SEQ ID NO: 6458 - RNA, 5797 nt, synthetic construct
  source 1..5797: mol_type = other RNA
aggaaataagagagaaaagaagagtaagaagaaatataagagccaccatggcccctaagaagaagcgtaaagtgagccggatggaacgcctcgtctacgaggtgcggcagaagtgcagaaacatcgaggacatctgcatctcctgcggatctctgaacgtgaccctggagcacccactgttcatcggcggcatgtgccagaactgtaaaaactgttttctggagtgtgcctatcaatacgacgatgacggctaccagagctactgcaccatctgttgcggcggaagagaggtgctgatgtgtggaaataacaactgctgccggtgcttctgcgtggaatgcgtggacctgctggtgggccccggcgccgcccaggccgctattaaggaagatccttggaactgctacatgtgcggccacaagggcacatacggcctgctgagacggagagaggactggcctagcagactgcagatgttcttcgccaataaccacgaccaggagttcgacccccctaaggtgtaccctcccgtccccgccgagaagagaaagcccatccgggtcctgagcctgttcgatggcatcgccaccggtctgctggtgctgaaggacctgggcatccaggtggataggtacattgcctccgaggtgtgcgaggactccatcaccgtgggaatggtgcgtcatcagggcaagatcatgtacgtgggcgacgtgcggagcgtgacacagaagcatatccaggagtggggccctttcgacctggtgatcggcggcagcccttgcaatgacctgagcatcgtgaacccagcccggaagggcctgtacgagggaaccggcagactgttcttcgagttttacagactgctgcacgacgcccggcctaaggaaggcgacgaccggcccttcttttggctgttcgagaatgtggtggccatgggagtcagcgacaagcgggatattagccggttcctggagagcaaccccgtgatgatcgatgccaaggaagtgagcgccgcccaccgggccagatacttctggggcaatctgcctggcatgaacagacccctggccagcaccgtgaacgacaagctggagctgcaggagtgcctggagcacggccggatcgccaagttcagcaaggtgagaaccatcaccacccgaagcaacagcatcaaacaaggcaaggaccagcactttcctgtgttcatgaacgagaaggaggacatcctgtggtgtaccgagatggagagagtgttcgggttcccagtccactacacagatgtcagcaacatgtctagactggccagacagagactgctgggaagaagctggtccgtccctgtgatcagacacctgttcgcccctctgaaggagtacttcgcctgcgtgagcagcggcaacagcaacgccaacagccggggccccagcttctctagcggcctggtgccactgtccctgagagggagccacatgggccccatggagatctacaaaaccgtgagcgcctggaagcggcagcctgtgcgcgtgctgagcctgtttcggaatatcgataaagtcctgaaaagcctgggattcctggagagcggctctggctccggcggtggcaccctgaagtacgtggaggatgtgacaaacgtggtcagacgggatgtggagaagtggggccccttcgatctggtgtacggcagcacccaacccctgggcagctcttgtgaccggtgccctggctggtacatgtttcagttccaccggatcctgcagtacgccctgccgagacaggagtcccagcggccattcttttggattttcatggacaacttgctgctgaccgaggatgaccaggaaactaccactcggttcctgcagaccgaagccgtgaccctgcaggacgtgagaggccgggactaccagaacgccatgcgggtgtggtccaacatccctggactgaaaagcaagcacgcacctctgacccctaaagaagaggagtacctgcaggcccaggtgcggagcagaagcaagctggacgcccctaaggtggatctgctggtgaagaattgcctcctgcccctgagagagtacttcaagtatttcagccagaatagtctgcccctgggcggcccaagcagcggcgcccctcctcccagcggcggcagcccagccggctccccaacctctaccgaggagggcacctctgagtccgccacccccgagagcggccctggcacctccaccgagcccagcgagggcagcgcacccggcagccctgccggcagccccacctccacagaggagggaaccagcaccgagcccagcgaaggcagcgccccaggcaccagcaccgagcctagtgagggcggctctggcggcggcagcgcccaggagattaaacggatcaacaagatcagaagaagacttgtgaaagacagcaacaccaagaaggccggcaagacaggccccatgaaaaccctgctggttagagtgatgacacccgatctgagagagcggctggaaaacctgagaaagaagcctgaaaatatcccccagcccatcagcaatacatctagagccaacctgaataagctgctgaccgattacaccgaaatgaagaaggcgatcctgcatgtgtactgggaagagttccagaaggaccctgtgggcctgatgagccgggtggcccagcctgccagcaagaagatcgatcagaacaagctgaaacctgagatggacgagaagggcaacctgaccaccgccggctttgcctgctctcagtgtggccagcccctgttcgtgtacaagctggagcaggtgtctgagaagggcaaggcttacaccaactacttcggacggtgcaatgtggccgagcacgaaaagctgatcctgctggcccagctgaagcccgagaaggatagcgacgaagccgtgacatatagcctgggaaagtttgggcagagggccctggatttctacagcattcatgtgaccaaggagtccacccaccccgtgaagcccctggcccagatcgccggaaacagatacgcctccggacctgtgggaaaggccctgagcgacgcatgtatgggcacaatcgcctccttcctgtctaagtaccaggacatcatcatcgaacaccagaaggtggtgaagggcaaccagaagagactggagagcctgcgggagctggccggcaaggaaaacctggaataccctagcgtgaccctgccacctcagcctcacaccaaggagggcgttgatgcctacaacgaagtgatcgcccgggtgcgaatgtgggtgaacctgaacctgtggcagaagctgaagctaagcagagatgatgccaagcctctgctgagactgaagggattcccttcctttcctctggtcgagagacaggccaacgaagtggactggtgggacatggtgtgtaacgtgaagaagctgatcaacgagaaaaaggaggatggcaaggtgttttggcagaatctggctggctacaagagacaggaagccctgagaccatacctgagcagcgaggaagatcggaagaagggaaagaaattcgctcggtaccagctgggcgacctgctgctgcacctggaaaagaagcacggcgaggactggggaaaggtgtacgacgaggcctgggagcggattgacaagaaagtggaaggcctgagcaagcacatcaagctggaagaggaacggagaagcgaggacgcccagagcaaggccgccctgaccgactggctgcgggctaaggccagcttcgtgatcgagggcctgaaggaggccgacaaggacgagttctgcagatgcgagctgaagctgcagaagtggtacggggacctgcggggaaagcccttcgccatcgaagccgagaacagcatcctggacatcagcggcttcagcaagcagtacaactgtgccttcatctggcagaaggacggcgtgaagaagctgaacctgtacctgatcatcaactacttcaagggcggcaagctgcggttcaagaagatcaaacctgaagccttcgaagccaacagattctacaccgtgatcaacaaaaagagcggcgagatcgtgcccatggaggtgaacttcaacttcgacgaccccaacctgatcatcctgcctctggcctttggcaagagacagggcagagaattcatctggaacgacctgctgtccctggaaaccggcagcctgaagctggccaacggaagagtgatcgagaagacactgtacaacagaagaacccggcaggatgagcctgccctgttcgtggccctgaccttcgagcggcgggaggtcctggactcctccaatatcaaaccaatgaacctgatcggcgtggcaagaggcgaaaacatccccgccgtgatcgccctgaccgaccccgagggctgcccactgagccggtttaaggatagcctgggaaacccaacccacatcctgagaatcggcgagagctataaggagaagcagcggaccatccaggccaagaaggaggtggagcagcggagagccggcggctacagccggaagtacgccagcaaagccaagaatctggcagacgatatggtgagaaacaccgctagagatctgctgtactacgccgtgacccaggatgccatgctgatcttcgccaacctgagccggggcttcggccggcagggcaagcggaccttcatggccgagagacagtacacacggatggaggactggctgaccgccaagctggcctacgagggcctgagcaagacctacctgtccaagacactggcccagtacacctccaagacatgcagcaactgtgggtttaccatcaccagcgccgactacgacagggtgctggagaagctgaagaagacagcaacaggctggatgaccacaattaacggcaaggagctgaaggtggagggccagattacctactacaacagatacaagagacagaacgtagtcaaggacctgtccgtcgagctggatagactgagcgaagaatctgtgaacaacgacatctcctcctggacaaagggcagaagcggagaagctctgagcctcctgaagaaaagattctcccatagacccgtgcaggagaagttcgtgtgcctgaactgcggcttcgagacacacgcagccgagcaagccgccctgaacatcgccagatcctggctgttcctgcggagccaggagtacaagaaataccagacaaacaagacaaccggcaacaccgataagagagccttcgtcgagacctggcagtccttttaccggaagaagcttaaggaggtgtggaaacctgccgtgcggtctggcggatctggcggaggctccacaagcatggagctgctgaccttcagggacgtggccatcgagttcagccccgaggagtggaagtgcctggaccccgaccagcagaacctgtacagggacgtgatgctggagaactacaggaacctggtgagcctgggcgtggccatcagcaaccccgacctggtgacctgcctggagcagaggaaggagccctacaacgtgaagatccacaagatcgtggccaggccccccgccgtgtgcagccacagcaccagccccaagaaaaagagaaaagtctaagctgccttctgcggggcttgccttctggccatgcccttcttctctcccttgcacctgtacctcttggtctttgaataaagcctgagtaggaaggctagcaaaaaaaaaaaaaaaaaaaaaaaaaaaaaaaaaaaaaaaaaaaaaaaaaaaaaaaaaaaaaaaaaaaaaaaaaaaaaaaa

SEQ ID NO: 6459 - RNA, 5797 nt, synthetic construct
  source 1..5797: mol_type = other RNA
aggaaataagagagaaaagaagagtaagaagaaatataagagccaccatggcccctaagaagaagcgtaaagtgagccggatggaacgcctcgtctacgaggtgcggcagaagtgcagaaacatcgaggacatctgcatctcctgcggatctctgaacgtgaccctggagcacccactgttcatcggcggcatgtgccagaactgtaaaaactgttttctggagtgtgcctatcaatacgacgatgacggctaccagagctactgcaccatctgttgcggcggaagagaggtgctgatgtgtggaaataacaactgctgccggtgcttctgcgtggaatgcgtggacctgctggtgggccccggcgccgcccaggccgctattaaggaagatccttggaactgctacatgtgcggccacaagggcacatacggcctgctgagacggagagaggactggcctagcagactgcagatgttcttcgccaataaccacgaccaggagttcgacccccctaaggtgtaccctcccgtccccgccgagaagagaaagcccatccgggtcctgagcctgttcgatggcatcgccaccggtctgctggtgctgaaggacctgggcatccaggtggataggtacattgcctccgaggtgtgcgaggactccatcaccgtgggaatggtgcgtcatcagggcaagatcatgtacgtgggcgacgtgcggagcgtgacacagaagcatatccaggagtggggccctttcgacctggtgatcggcggcagcccttgcaatgacctgagcatcgtgaacccagcccggaagggcctgtacgagggaaccggcagactgttcttcgagttttacagactgctgcacgacgcccggcctaaggaaggcgacgaccggcccttcttttggctgttcgagaatgtggtggccatgggagtcagcgacaagcgggatattagccggttcctggagagcaaccccgtgatgatcgatgccaaggaagtgagcgccgcccaccgggccagatacttctggggcaatctgcctggcatgaacagacccctggccagcaccgtgaacgacaagctggagctgcaggagtgcctggagcacggccggatcgccaagttcagcaaggtgagaaccatcaccacccgaagcaacagcatcaaacaaggcaaggaccagcactttcctgtgttcatgaacgagaaggaggacatcctgtggtgtaccgagatggagagagtgttcgggttcccagtccactacacagatgtcagcaacatgtctagactggccagacagagactgctgggaagaagctggtccgtccctgtgatcagacacctgttcgcccctctgaaggagtacttcgcctgcgtgagcagcggcaacagcaacgccaacagccggggccccagcttctctagcggcctggtgccactgtccctgagagggagccacatgggccccatggagatctacaaaaccgtgagcgcctggaagcggcagcctgtgcgcgtgctgagcctgtttcggaatatcgataaagtcctgaaaagcctgggattcctggagagcggctctggctccggcggtggcaccctgaagtacgtggaggatgtgacaaacgtggtcagacgggatgtggagaagtggggccccttcgatctggtgtacggcagcacccaacccctgggcagctcttgtgaccggtgccctggctggtacatgtttcagttccaccggatcctgcagtacgccctgccgagacaggagtcccagcggccattcttttggattttcatggacaacttgctgctgaccgaggatgaccaggaaactaccactcggttcctgcagaccgaagccgtgaccctgcaggacgtgagaggccgggactaccagaacgccatgcgggtgtggtccaacatccctggactgaaaagcaagcacgcacctctgacccctaaagaagaggagtacctgcaggcccaggtgcggagcagaagcaagctggacgcccctaaggtggatctgctggtgaagaattgcctcctgcccctgagagagtacttcaagtatttcagccagaatagtctgcccctgggcggcccaagcagcggcgcccctcctcccagcggcggcagcccagccggctccccaacctctaccgaggagggcacctctgagtccgccacccccgagagcggccctggcacctccaccgagcccagcgagggcagcgcacccggcagccctgccggcagccccacctccacagaggagggaaccagcaccgagcccagcgaaggcagcgccccaggcaccagcaccgagcctagtgagggcggctctggcggcggcagcgcccaggagattaaacggatcaacaagatcagaagaagacttgtgaaagacagcaacaccaagaaggccggcaagacaggccccatgaaaaccctgctggttagagtgatgacacccgatctgagagagcggctggaaaacctgagaaagaagcctgaaaatatcccccagcccatcagcaatacatctagagccaacctgaataagctgctgaccgattacaccgaaatgaagaaggcgatcctgcatgtgtactgggaagagttccagaaggaccctgtgggcctgatgagccgggtggcccagcctgccagcaagaagatcgatcagaacaagctgaaacctgagatggacgagaagggcaacctgaccaccgccggctttgcctgctctcagtgtggccagcccctgttcgtgtacaagctggagcaggtgtctgagaagggcaaggcttacaccaactacttcggacggtgcaatgtggccgagcacgaaaagctgatcctgctggcccagctgaagcccgagaaggatagcgacgaagccgtgacatatagcctgggaaagtttgggcagagggccctggatttctacagcattcatgtgaccaaggagtccacccaccccgtgaagcccctggcccagatcgccggaaacagatacgcctccggacctgtgggaaaggccctgagcgacgcatgtatgggcacaatcgcctccttcctgtctaagtaccaggacatcatcatcgaacaccagaaggtggtgaagggcaaccagaagagactggagagcctgcgggagctggccggcaaggaaaacctggaataccctagcgtgaccctgccacctcagcctcacaccaaggagggcgttgatgcctacaacgaagtgatcgcccgggtgcgaatgtgggtgaacctgaacctgtggcagaagctgaagctaagcagagatgatgccaagcctctgctgagactgaagggattcccttcctttcctctggtcgagagacaggccaacgaagtggactggtgggacatggtgtgtaacgtgaagaagctgatcaacgagaaaaaggaggatggcaaggtgttttggcagaatctggctggctacaagagacaggaagccctgagaccatacctgagcagcgaggaagatcggaagaagggaaagaaattcgctcggtaccagctgggcgacctgctgctgcacctggaaaagaagcacggcgaggactggggaaaggtgtacgacgaggcctgggagcggattgacaagaaagtggaaggcctgagcaagcacatcaagctggaagaggaacggagaagcgaggacgcccagagcaaggccgccctgaccgactggctgcgggctaaggccagcttcgtgatcgagggcctgaaggaggccgacaaggacgagttctgcagatgcgagctgaagctgcagaagtggtacggggacctgcggggaaagcccttcgccatcgaagccgagaacagcatcctggacatcagcggcttcagcaagcagtacaactgtgccttcatctggcagaaggacggcgtgaagaagctgaacctgtacctgatcatcaactacttcaagggcggcaagctgcggttcaagaagatcaaacctgaagccttcgaagccaacagattctacaccgtgatcaacaaaaagagcggcgagatcgtgcccatggaggtgaacttcaacttcgacgaccccaacctgatcatcctgcctctggcctttggcaagagacagggcagagaattcatctggaacgacctgctgtccctggaaaccggcagcctgaagctggccaacggaagagtgatcgagaagacactgtacaacagaagaacccggcaggatgagcctgccctgttcgtggccctgaccttcgagcggcgggaggtcctggactcctccaatatcaaaccaatgaacctgatcggcgtggcaagaggcgaaaacatccccgccgtgatcgccctgaccgaccccgagggctgcccactgagccggtttaaggatagcctgggaaacccaacccacatcctgagaatcggcgagagctataaggagaagcagcggaccatccaggccaagaaggaggtggagcagcggagagccggcggctacagccggaagtacgccagcaaagccaagaatctggcagacgatatggtgagaaacaccgctagagatctgctgtactacgccgtgacccaggatgccatgctgatcttcgccaacctgagccggggcttcggccggcagggcaagcggaccttcatggccgagagacagtacacacggatggaggactggctgaccgccaagctggcctacgagggcctgagcaagacctacctgtccaagacactggcccagtacacctccaagacatgcagcaactgtgggtttaccatcaccagcgccgactacgacagggtgctggagaagctgaagaagacagcaacaggctggatgaccacaattaacggcaaggagctgaaggtggagggccagattacctactacaacagatacaagagacagaacgtagtcaaggacctgtccgtcgagctggatagactgagcgaagaatctgtgaacaacgacatctcctcctggacaaagggcagaagcggagaagctctgagcctcctgaagaaaagattctcccatagacccgtgcaggagaagttcgtgtgcctgaactgcggcttcgagacacacgcagccgagcaagccgccctgaacatcgccagatcctggctgttcctgcggagccaggagtacaagaaataccagacaaacaagacaaccggcaacaccgataagagagccttcgtcgagacctggcagtccttttaccggaagaagcttaaggaggtgtggaaacctgccgtgcggtctggcggatctggcggaggctccacaagctggaaggagagcctgagcttcgaggacgtggccctgtacttcaccagggaggagtggagcaggctggactgggcccagaaggacctgtacagggacgtgatgctggagaactacaggaacatgatcgtgctgggcttccagttccccaagcccgaggtgatctgccagctggagcagtgggaggagccctggatcctggacctgcccagggccggcaccaggaaggccagcggcagcgcctgcaccagccccaagaaaaagagaaaagtctaagctgccttctgcggggcttgccttctggccatgcccttcttctctcccttgcacctgtacctcttggtctttgaataaagcctgagtaggaaggctagcaaaaaaaaaaaaaaaaaaaaaaaaaaaaaaaaaaaaaaaaaaaaaaaaaaaaaaaaaaaaaaaaaaaaaaaaaaaaaaaa

SEQ ID NO: 6460 - RNA, 5797 nt, synthetic construct
  source 1..5797: mol_type = other RNA
aggaaataagagagaaaagaagagtaagaagaaatataagagccaccatggcccctaagaagaagcgtaaagtgagccggatggaacgcctcgtctacgaggtgcggcagaagtgcagaaacatcgaggacatctgcatctcctgcggatctctgaacgtgaccctggagcacccactgttcatcggcggcatgtgccagaactgtaaaaactgttttctggagtgtgcctatcaatacgacgatgacggctaccagagctactgcaccatctgttgcggcggaagagaggtgctgatgtgtggaaataacaactgctgccggtgcttctgcgtggaatgcgtggacctgctggtgggccccggcgccgcccaggccgctattaaggaagatccttggaactgctacatgtgcggccacaagggcacatacggcctgctgagacggagagaggactggcctagcagactgcagatgttcttcgccaataaccacgaccaggagttcgacccccctaaggtgtaccctcccgtccccgccgagaagagaaagcccatccgggtcctgagcctgttcgatggcatcgccaccggtctgctggtgctgaaggacctgggcatccaggtggataggtacattgcctccgaggtgtgcgaggactccatcaccgtgggaatggtgcgtcatcagggcaagatcatgtacgtgggcgacgtgcggagcgtgacacagaagcatatccaggagtggggccctttcgacctggtgatcggcggcagcccttgcaatgacctgagcatcgtgaacccagcccggaagggcctgtacgagggaaccggcagactgttcttcgagttttacagactgctgcacgacgcccggcctaaggaaggcgacgaccggcccttcttttggctgttcgagaatgtggtggccatgggagtcagcgacaagcgggatattagccggttcctggagagcaaccccgtgatgatcgatgccaaggaagtgagcgccgcccaccgggccagatacttctggggcaatctgcctggcatgaacagacccctggccagcaccgtgaacgacaagctggagctgcaggagtgcctggagcacggccggatcgccaagttcagcaaggtgagaaccatcaccacccgaagcaacagcatcaaacaaggcaaggaccagcactttcctgtgttcatgaacgagaaggaggacatcctgtggtgtaccgagatggagagagtgttcgggttcccagtccactacacagatgtcagcaacatgtctagactggccagacagagactgctgggaagaagctggtccgtccctgtgatcagacacctgttcgcccctctgaaggagtacttcgcctgcgtgagcagcggcaacagcaacgccaacagccggggccccagcttctctagcggcctggtgccactgtccctgagagggagccacatgggccccatggagatctacaaaaccgtgagcgcctggaagcggcagcctgtgcgcgtgctgagcctgtttcggaatatcgataaagtcctgaaaagcctgggattcctggagagcggctctggctccggcggtggcaccctgaagtacgtggaggatgtgacaaacgtggtcagacgggatgtggagaagtggggccccttcgatctggtgtacggcagcacccaacccctgggcagctcttgtgaccggtgccctggctggtacatgtttcagttccaccggatcctgcagtacgccctgccgagacaggagtcccagcggccattcttttggattttcatggacaacttgctgctgaccgaggatgaccaggaaactaccactcggttcctgcagaccgaagccgtgaccctgcaggacgtgagaggccgggactaccagaacgccatgcgggtgtggtccaacatccctggactgaaaagcaagcacgcacctctgacccctaaagaagaggagtacctgcaggcccaggtgcggagcagaagcaagctggacgcccctaaggtggatctgctggtgaagaattgcctcctgcccctgagagagtacttcaagtatttcagccagaatagtctgcccctgggcggcccaagcagcggcgcccctcctcccagcggcggcagcccagccggctccccaacctctaccgaggagggcacctctgagtccgccacccccgagagcggccctggcacctccaccgagcccagcgagggcagcgcacccggcagccctgccggcagccccacctccacagaggagggaaccagcaccgagcccagcgaaggcagcgccccaggcaccagcaccgagcctagtgagggcggctctggcggcggcagcgcccaggagattaaacggatcaacaagatcagaagaagacttgtgaaagacagcaacaccaagaaggccggcaagacaggccccatgaaaaccctgctggttagagtgatgacacccgatctgagagagcggctggaaaacctgagaaagaagcctgaaaatatcccccagcccatcagcaatacatctagagccaacctgaataagctgctgaccgattacaccgaaatgaagaaggcgatcctgcatgtgtactgggaagagttccagaaggaccctgtgggcctgatgagccgggtggcccagcctgccagcaagaagatcgatcagaacaagctgaaacctgagatggacgagaagggcaacctgaccaccgccggctttgcctgctctcagtgtggccagcccctgttcgtgtacaagctggagcaggtgtctgagaagggcaaggcttacaccaactacttcggacggtgcaatgtggccgagcacgaaaagctgatcctgctggcccagctgaagcccgagaaggatagcgacgaagccgtgacatatagcctgggaaagtttgggcagagggccctggatttctacagcattcatgtgaccaaggagtccacccaccccgtgaagcccctggcccagatcgccggaaacagatacgcctccggacctgtgggaaaggccctgagcgacgcatgtatgggcacaatcgcctccttcctgtctaagtaccaggacatcatcatcgaacaccagaaggtggtgaagggcaaccagaagagactggagagcctgcgggagctggccggcaaggaaaacctggaataccctagcgtgaccctgccacctcagcctcacaccaaggagggcgttgatgcctacaacgaagtgatcgcccgggtgcgaatgtgggtgaacctgaacctgtggcagaagctgaagctaagcagagatgatgccaagcctctgctgagactgaagggattcccttcctttcctctggtcgagagacaggccaacgaagtggactggtgggacatggtgtgtaacgtgaagaagctgatcaacgagaaaaaggaggatggcaaggtgttttggcagaatctggctggctacaagagacaggaagccctgagaccatacctgagcagcgaggaagatcggaagaagggaaagaaattcgctcggtaccagctgggcgacctgctgctgcacctggaaaagaagcacggcgaggactggggaaaggtgtacgacgaggcctgggagcggattgacaagaaagtggaaggcctgagcaagcacatcaagctggaagaggaacggagaagcgaggacgcccagagcaaggccgccctgaccgactggctgcgggctaaggccagcttcgtgatcgagggcctgaaggaggccgacaaggacgagttctgcagatgcgagctgaagctgcagaagtggtacggggacctgcggggaaagcccttcgccatcgaagccgagaacagcatcctggacatcagcggcttcagcaagcagtacaactgtgccttcatctggcagaaggacggcgtgaagaagctgaacctgtacctgatcatcaactacttcaagggcggcaagctgcggttcaagaagatcaaacctgaagccttcgaagccaacagattctacaccgtgatcaacaaaaagagcggcgagatcgtgcccatggaggtgaacttcaacttcgacgaccccaacctgatcatcctgcctctggcctttggcaagagacagggcagagaattcatctggaacgacctgctgtccctggaaaccggcagcctgaagctggccaacggaagagtgatcgagaagacactgtacaacagaagaacccggcaggatgagcctgccctgttcgtggccctgaccttcgagcggcgggaggtcctggactcctccaatatcaaaccaatgaacctgatcggcgtggcaagaggcgaaaacatccccgccgtgatcgccctgaccgaccccgagggctgcccactgagccggtttaaggatagcctgggaaacccaacccacatcctgagaatcggcgagagctataaggagaagcagcggaccatccaggccaagaaggaggtggagcagcggagagccggcggctacagccggaagtacgccagcaaagccaagaatctggcagacgatatggtgagaaacaccgctagagatctgctgtactacgccgtgacccaggatgccatgctgatcttcgccaacctgagccggggcttcggccggcagggcaagcggaccttcatggccgagagacagtacacacggatggaggactggctgaccgccaagctggcctacgagggcctgagcaagacctacctgtccaagacactggcccagtacacctccaagacatgcagcaactgtgggtttaccatcaccagcgccgactacgacagggtgctggagaagctgaagaagacagcaacaggctggatgaccacaattaacggcaaggagctgaaggtggagggccagattacctactacaacagatacaagagacagaacgtagtcaaggacctgtccgtcgagctggatagactgagcgaagaatctgtgaacaacgacatctcctcctggacaaagggcagaagcggagaagctctgagcctcctgaagaaaagattctcccatagacccgtgcaggagaagttcgtgtgcctgaactgcggcttcgagacacacgcagccgagcaagccgccctgaacatcgccagatcctggctgttcctgcggagccaggagtacaagaaataccagacaaacaagacaaccggcaacaccgataagagagccttcgtcgagacctggcagtccttttaccggaagaagcttaaggaggtgtggaaacctgccgtgcggtctggcggatctggcggaggctccacaagcgcccccctgcccctgaccttcgaggacgtggccatctacttcagcgagcaggagtggcagcacctggagacctggcagaaggagctgtacaagcaggtgatgaggaccaactacgagaccctgatcagcctggacaacggcctgcccaagcccgagctgatcagctggatggagctgggcagggagaacttcggcagctggggcgagggccagaaggtggacaggggcatcaggtgcagcgtgaccagccccaagaaaaagagaaaagtctaagctgccttctgcggggcttgccttctggccatgcccttcttctctcccttgcacctgtacctcttggtctttgaataaagcctgagtaggaaggctagcaaaaaaaaaaaaaaaaaaaaaaaaaaaaaaaaaaaaaaaaaaaaaaaaaaaaaaaaaaaaaaaaaaaaaaaaaaaaaaaa

SEQ ID NO: 6461 - RNA, 5797 nt, synthetic construct
  source 1..5797: mol_type = other RNA
aggaaataagagagaaaagaagagtaagaagaaatataagagccaccatggcccctaagaagaagcgtaaagtgagccggatggaacgcctcgtctacgaggtgcggcagaagtgcagaaacatcgaggacatctgcatctcctgcggatctctgaacgtgaccctggagcacccactgttcatcggcggcatgtgccagaactgtaaaaactgttttctggagtgtgcctatcaatacgacgatgacggctaccagagctactgcaccatctgttgcggcggaagagaggtgctgatgtgtggaaataacaactgctgccggtgcttctgcgtggaatgcgtggacctgctggtgggccccggcgccgcccaggccgctattaaggaagatccttggaactgctacatgtgcggccacaagggcacatacggcctgctgagacggagagaggactggcctagcagactgcagatgttcttcgccaataaccacgaccaggagttcgacccccctaaggtgtaccctcccgtccccgccgagaagagaaagcccatccgggtcctgagcctgttcgatggcatcgccaccggtctgctggtgctgaaggacctgggcatccaggtggataggtacattgcctccgaggtgtgcgaggactccatcaccgtgggaatggtgcgtcatcagggcaagatcatgtacgtgggcgacgtgcggagcgtgacacagaagcatatccaggagtggggccctttcgacctggtgatcggcggcagcccttgcaatgacctgagcatcgtgaacccagcccggaagggcctgtacgagggaaccggcagactgttcttcgagttttacagactgctgcacgacgcccggcctaaggaaggcgacgaccggcccttcttttggctgttcgagaatgtggtggccatgggagtcagcgacaagcgggatattagccggttcctggagagcaaccccgtgatgatcgatgccaaggaagtgagcgccgcccaccgggccagatacttctggggcaatctgcctggcatgaacagacccctggccagcaccgtgaacgacaagctggagctgcaggagtgcctggagcacggccggatcgccaagttcagcaaggtgagaaccatcaccacccgaagcaacagcatcaaacaaggcaaggaccagcactttcctgtgttcatgaacgagaaggaggacatcctgtggtgtaccgagatggagagagtgttcgggttcccagtccactacacagatgtcagcaacatgtctagactggccagacagagactgctgggaagaagctggtccgtccctgtgatcagacacctgttcgcccctctgaaggagtacttcgcctgcgtgagcagcggcaacagcaacgccaacagccggggccccagcttctctagcggcctggtgccactgtccctgagagggagccacatgggccccatggagatctacaaaaccgtgagcgcctggaagcggcagcctgtgcgcgtgctgagcctgtttcggaatatcgataaagtcctgaaaagcctgggattcctggagagcggctctggctccggcggtggcaccctgaagtacgtggaggatgtgacaaacgtggtcagacgggatgtggagaagtggggccccttcgatctggtgtacggcagcacccaacccctgggcagctcttgtgaccggtgccctggctggtacatgtttcagttccaccggatcctgcagtacgccctgccgagacaggagtcccagcggccattcttttggattttcatggacaacttgctgctgaccgaggatgaccaggaaactaccactcggttcctgcagaccgaagccgtgaccctgcaggacgtgagaggccgggactaccagaacgccatgcgggtgtggtccaacatccctggactgaaaagcaagcacgcacctctgacccctaaagaagaggagtacctgcaggcccaggtgcggagcagaagcaagctggacgcccctaaggtggatctgctggtgaagaattgcctcctgcccctgagagagtacttcaagtatttcagccagaatagtctgcccctgggcggcccaagcagcggcgcccctcctcccagcggcggcagcccagccggctccccaacctctaccgaggagggcacctctgagtccgccacccccgagagcggccctggcacctccaccgagcccagcgagggcagcgcacccggcagccctgccggcagccccacctccacagaggagggaaccagcaccgagcccagcgaaggcagcgccccaggcaccagcaccgagcctagtgagggcggctctggcggcggcagcgcccaggagattaaacggatcaacaagatcagaagaagacttgtgaaagacagcaacaccaagaaggccggcaagacaggccccatgaaaaccctgctggttagagtgatgacacccgatctgagagagcggctggaaaacctgagaaagaagcctgaaaatatcccccagcccatcagcaatacatctagagccaacctgaataagctgctgaccgattacaccgaaatgaagaaggcgatcctgcatgtgtactgggaagagttccagaaggaccctgtgggcctgatgagccgggtggcccagcctgccagcaagaagatcgatcagaacaagctgaaacctgagatggacgagaagggcaacctgaccaccgccggctttgcctgctctcagtgtggccagcccctgttcgtgtacaagctggagcaggtgtctgagaagggcaaggcttacaccaactacttcggacggtgcaatgtggccgagcacgaaaagctgatcctgctggcccagctgaagcccgagaaggatagcgacgaagccgtgacatatagcctgggaaagtttgggcagagggccctggatttctacagcattcatgtgaccaaggagtccacccaccccgtgaagcccctggcccagatcgccggaaacagatacgcctccggacctgtgggaaaggccctgagcgacgcatgtatgggcacaatcgcctccttcctgtctaagtaccaggacatcatcatcgaacaccagaaggtggtgaagggcaaccagaagagactggagagcctgcgggagctggccggcaaggaaaacctggaataccctagcgtgaccctgccacctcagcctcacaccaaggagggcgttgatgcctacaacgaagtgatcgcccgggtgcgaatgtgggtgaacctgaacctgtggcagaagctgaagctaagcagagatgatgccaagcctctgctgagactgaagggattcccttcctttcctctggtcgagagacaggccaacgaagtggactggtgggacatggtgtgtaacgtgaagaagctgatcaacgagaaaaaggaggatggcaaggtgttttggcagaatctggctggctacaagagacaggaagccctgagaccatacctgagcagcgaggaagatcggaagaagggaaagaaattcgctcggtaccagctgggcgacctgctgctgcacctggaaaagaagcacggcgaggactggggaaaggtgtacgacgaggcctgggagcggattgacaagaaagtggaaggcctgagcaagcacatcaagctggaagaggaacggagaagcgaggacgcccagagcaaggccgccctgaccgactggctgcgggctaaggccagcttcgtgatcgagggcctgaaggaggccgacaaggacgagttctgcagatgcgagctgaagctgcagaagtggtacggggacctgcggggaaagcccttcgccatcgaagccgagaacagcatcctggacatcagcggcttcagcaagcagtacaactgtgccttcatctggcagaaggacggcgtgaagaagctgaacctgtacctgatcatcaactacttcaagggcggcaagctgcggttcaagaagatcaaacctgaagccttcgaagccaacagattctacaccgtgatcaacaaaaagagcggcgagatcgtgcccatggaggtgaacttcaacttcgacgaccccaacctgatcatcctgcctctggcctttggcaagagacagggcagagaattcatctggaacgacctgctgtccctggaaaccggcagcctgaagctggccaacggaagagtgatcgagaagacactgtacaacagaagaacccggcaggatgagcctgccctgttcgtggccctgaccttcgagcggcgggaggtcctggactcctccaatatcaaaccaatgaacctgatcggcgtggcaagaggcgaaaacatccccgccgtgatcgccctgaccgaccccgagggctgcccactgagccggtttaaggatagcctgggaaacccaacccacatcctgagaatcggcgagagctataaggagaagcagcggaccatccaggccaagaaggaggtggagcagcggagagccggcggctacagccggaagtacgccagcaaagccaagaatctggcagacgatatggtgagaaacaccgctagagatctgctgtactacgccgtgacccaggatgccatgctgatcttcgccaacctgagccggggcttcggccggcagggcaagcggaccttcatggccgagagacagtacacacggatggaggactggctgaccgccaagctggcctacgagggcctgagcaagacctacctgtccaagacactggcccagtacacctccaagacatgcagcaactgtgggtttaccatcaccagcgccgactacgacagggtgctggagaagctgaagaagacagcaacaggctggatgaccacaattaacggcaaggagctgaaggtggagggccagattacctactacaacagatacaagagacagaacgtagtcaaggacctgtccgtcgagctggatagactgagcgaagaatctgtgaacaacgacatctcctcctggacaaagggcagaagcggagaagctctgagcctcctgaagaaaagattctcccatagacccgtgcaggagaagttcgtgtgcctgaactgcggcttcgagacacacgcagccgagcaagccgccctgaacatcgccagatcctggctgttcctgcggagccaggagtacaagaaataccagacaaacaagacaaccggcaacaccgataagagagccttcgtcgagacctggcagtccttttaccggaagaagcttaaggaggtgtggaaacctgccgtgcggtctggcggatctggcggaggctccacaagctaccagacccccgtgagcttcaaggacgtggtggtgggcttcacccaggaggagtggcacaggctgagccccgcccagagggccctgtacagggacgtgatgctggagacctacagcaacctgctgagcgtgggctacgagggcaccaagcccgacgtgatcctgaggctggagcaggaggaggccccctggatcggcgaggccgcctgccccggctgccactgctgggaggacatctggcagaccagccccaagaaaaagagaaaagtctaagctgccttctgcggggcttgccttctggccatgcccttcttctctcccttgcacctgtacctcttggtctttgaataaagcctgagtaggaaggctagcaaaaaaaaaaaaaaaaaaaaaaaaaaaaaaaaaaaaaaaaaaaaaaaaaaaaaaaaaaaaaaaaaaaaaaaaaaaaaaaa

SEQ ID NO: 6462 - RNA, 5797 nt, synthetic construct
  source 1..5797: mol_type = other RNA
aggaaataagagagaaaagaagagtaagaagaaatataagagccaccatggcccctaagaagaagcgtaaagtgagccggatggaacgcctcgtctacgaggtgcggcagaagtgcagaaacatcgaggacatctgcatctcctgcggatctctgaacgtgaccctggagcacccactgttcatcggcggcatgtgccagaactgtaaaaactgttttctggagtgtgcctatcaatacgacgatgacggctaccagagctactgcaccatctgttgcggcggaagagaggtgctgatgtgtggaaataacaactgctgccggtgcttctgcgtggaatgcgtggacctgctggtgggccccggcgccgcccaggccgctattaaggaagatccttggaactgctacatgtgcggccacaagggcacatacggcctgctgagacggagagaggactggcctagcagactgcagatgttcttcgccaataaccacgaccaggagttcgacccccctaaggtgtaccctcccgtccccgccgagaagagaaagcccatccgggtcctgagcctgttcgatggcatcgccaccggtctgctggtgctgaaggacctgggcatccaggtggataggtacattgcctccgaggtgtgcgaggactccatcaccgtgggaatggtgcgtcatcagggcaagatcatgtacgtgggcgacgtgcggagcgtgacacagaagcatatccaggagtggggccctttcgacctggtgatcggcggcagcccttgcaatgacctgagcatcgtgaacccagcccggaagggcctgtacgagggaaccggcagactgttcttcgagttttacagactgctgcacgacgcccggcctaaggaaggcgacgaccggcccttcttttggctgttcgagaatgtggtggccatgggagtcagcgacaagcgggatattagccggttcctggagagcaaccccgtgatgatcgatgccaaggaagtgagcgccgcccaccgggccagatacttctggggcaatctgcctggcatgaacagacccctggccagcaccgtgaacgacaagctggagctgcaggagtgcctggagcacggccggatcgccaagttcagcaaggtgagaaccatcaccacccgaagcaacagcatcaaacaaggcaaggaccagcactttcctgtgttcatgaacgagaaggaggacatcctgtggtgtaccgagatggagagagtgttcgggttcccagtccactacacagatgtcagcaacatgtctagactggccagacagagactgctgggaagaagctggtccgtccctgtgatcagacacctgttcgcccctctgaaggagtacttcgcctgcgtgagcagcggcaacagcaacgccaacagccggggccccagcttctctagcggcctggtgccactgtccctgagagggagccacatgggccccatggagatctacaaaaccgtgagcgcctggaagcggcagcctgtgcgcgtgctgagcctgtttcggaatatcgataaagtcctgaaaagcctgggattcctggagagcggctctggctccggcggtggcaccctgaagtacgtggaggatgtgacaaacgtggtcagacgggatgtggagaagtggggccccttcgatctggtgtacggcagcacccaacccctgggcagctcttgtgaccggtgccctggctggtacatgtttcagttccaccggatcctgcagtacgccctgccgagacaggagtcccagcggccattcttttggattttcatggacaacttgctgctgaccgaggatgaccaggaaactaccactcggttcctgcagaccgaagccgtgaccctgcaggacgtgagaggccgggactaccagaacgccatgcgggtgtggtccaacatccctggactgaaaagcaagcacgcacctctgacccctaaagaagaggagtacctgcaggcccaggtgcggagcagaagcaagctggacgcccctaaggtggatctgctggtgaagaattgcctcctgcccctgagagagtacttcaagtatttcagccagaatagtctgcccctgggcggcccaagcagcggcgcccctcctcccagcggcggcagcccagccggctccccaacctctaccgaggagggcacctctgagtccgccacccccgagagcggccctggcacctccaccgagcccagcgagggcagcgcacccggcagccctgccggcagccccacctccacagaggagggaaccagcaccgagcccagcgaaggcagcgccccaggcaccagcaccgagcctagtgagggcggctctggcggcggcagcgcccaggagattaaacggatcaacaagatcagaagaagacttgtgaaagacagcaacaccaagaaggccggcaagacaggccccatgaaaaccctgctggttagagtgatgacacccgatctgagagagcggctggaaaacctgagaaagaagcctgaaaatatcccccagcccatcagcaatacatctagagccaacctgaataagctgctgaccgattacaccgaaatgaagaaggcgatcctgcatgtgtactgggaagagttccagaaggaccctgtgggcctgatgagccgggtggcccagcctgccagcaagaagatcgatcagaacaagctgaaacctgagatggacgagaagggcaacctgaccaccgccggctttgcctgctctcagtgtggccagcccctgttcgtgtacaagctggagcaggtgtctgagaagggcaaggcttacaccaactacttcggacggtgcaatgtggccgagcacgaaaagctgatcctgctggcccagctgaagcccgagaaggatagcgacgaagccgtgacatatagcctgggaaagtttgggcagagggccctggatttctacagcattcatgtgaccaaggagtccacccaccccgtgaagcccctggcccagatcgccggaaacagatacgcctccggacctgtgggaaaggccctgagcgacgcatgtatgggcacaatcgcctccttcctgtctaagtaccaggacatcatcatcgaacaccagaaggtggtgaagggcaaccagaagagactggagagcctgcgggagctggccggcaaggaaaacctggaataccctagcgtgaccctgccacctcagcctcacaccaaggagggcgttgatgcctacaacgaagtgatcgcccgggtgcgaatgtgggtgaacctgaacctgtggcagaagctgaagctaagcagagatgatgccaagcctctgctgagactgaagggattcccttcctttcctctggtcgagagacaggccaacgaagtggactggtgggacatggtgtgtaacgtgaagaagctgatcaacgagaaaaaggaggatggcaaggtgttttggcagaatctggctggctacaagagacaggaagccctgagaccatacctgagcagcgaggaagatcggaagaagggaaagaaattcgctcggtaccagctgggcgacctgctgctgcacctggaaaagaagcacggcgaggactggggaaaggtgtacgacgaggcctgggagcggattgacaagaaagtggaaggcctgagcaagcacatcaagctggaagaggaacggagaagcgaggacgcccagagcaaggccgccctgaccgactggctgcgggctaaggccagcttcgtgatcgagggcctgaaggaggccgacaaggacgagttctgcagatgcgagctgaagctgcagaagtggtacggggacctgcggggaaagcccttcgccatcgaagccgagaacagcatcctggacatcagcggcttcagcaagcagtacaactgtgccttcatctggcagaaggacggcgtgaagaagctgaacctgtacctgatcatcaactacttcaagggcggcaagctgcggttcaagaagatcaaacctgaagccttcgaagccaacagattctacaccgtgatcaacaaaaagagcggcgagatcgtgcccatggaggtgaacttcaacttcgacgaccccaacctgatcatcctgcctctggcctttggcaagagacagggcagagaattcatctggaacgacctgctgtccctggaaaccggcagcctgaagctggccaacggaagagtgatcgagaagacactgtacaacagaagaacccggcaggatgagcctgccctgttcgtggccctgaccttcgagcggcgggaggtcctggactcctccaatatcaaaccaatgaacctgatcggcgtggcaagaggcgaaaacatccccgccgtgatcgccctgaccgaccccgagggctgcccactgagccggtttaaggatagcctgggaaacccaacccacatcctgagaatcggcgagagctataaggagaagcagcggaccatccaggccaagaaggaggtggagcagcggagagccggcggctacagccggaagtacgccagcaaagccaagaatctggcagacgatatggtgagaaacaccgctagagatctgctgtactacgccgtgacccaggatgccatgctgatcttcgccaacctgagccggggcttcggccggcagggcaagcggaccttcatggccgagagacagtacacacggatggaggactggctgaccgccaagctggcctacgagggcctgagcaagacctacctgtccaagacactggcccagtacacctccaagacatgcagcaactgtgggtttaccatcaccagcgccgactacgacagggtgctggagaagctgaagaagacagcaacaggctggatgaccacaattaacggcaaggagctgaaggtggagggccagattacctactacaacagatacaagagacagaacgtagtcaaggacctgtccgtcgagctggatagactgagcgaagaatctgtgaacaacgacatctcctcctggacaaagggcagaagcggagaagctctgagcctcctgaagaaaagattctcccatagacccgtgcaggagaagttcgtgtgcctgaactgcggcttcgagacacacgcagccgagcaagccgccctgaacatcgccagatcctggctgttcctgcggagccaggagtacaagaaataccagacaaacaagacaaccggcaacaccgataagagagccttcgtcgagacctggcagtccttttaccggaagaagcttaaggaggtgtggaaacctgccgtgcggtctggcggatctggcggaggctccacaagcaaggaggccagcgtggccttcagggacgtggccgtggacttcacccaggaggagtggaggctgctgagccccgcccagaggaccctgcacagggaggtgatgctggagacctacaaccacctggtgagcctggagatccccagcagcaagcccaagctgatcgcccagctggagaggggcgaggagccctggagggaggagaggaagtgcagcctggacctgtgccccgagagcaagcccgagaccagccccaagaaaaagagaaaagtctaagctgccttctgcggggcttgccttctggccatgcccttcttctctcccttgcacctgtacctcttggtctttgaataaagcctgagtaggaaggctagcaaaaaaaaaaaaaaaaaaaaaaaaaaaaaaaaaaaaaaaaaaaaaaaaaaaaaaaaaaaaaaaaaaaaaaaaaaaaaaaa

SEQ ID NO: 6463 - RNA, 5797 nt, synthetic construct
  source 1..5797: mol_type = other RNA
aggaaataagagagaaaagaagagtaagaagaaatataagagccaccatggcccctaagaagaagcgtaaagtgagccggatggaacgcctcgtctacgaggtgcggcagaagtgcagaaacatcgaggacatctgcatctcctgcggatctctgaacgtgaccctggagcacccactgttcatcggcggcatgtgccagaactgtaaaaactgttttctggagtgtgcctatcaatacgacgatgacggctaccagagctactgcaccatctgttgcggcggaagagaggtgctgatgtgtggaaataacaactgctgccggtgcttctgcgtggaatgcgtggacctgctggtgggccccggcgccgcccaggccgctattaaggaagatccttggaactgctacatgtgcggccacaagggcacatacggcctgctgagacggagagaggactggcctagcagactgcagatgttcttcgccaataaccacgaccaggagttcgacccccctaaggtgtaccctcccgtccccgccgagaagagaaagcccatccgggtcctgagcctgttcgatggcatcgccaccggtctgctggtgctgaaggacctgggcatccaggtggataggtacattgcctccgaggtgtgcgaggactccatcaccgtgggaatggtgcgtcatcagggcaagatcatgtacgtgggcgacgtgcggagcgtgacacagaagcatatccaggagtggggccctttcgacctggtgatcggcggcagcccttgcaatgacctgagcatcgtgaacccagcccggaagggcctgtacgagggaaccggcagactgttcttcgagttttacagactgctgcacgacgcccggcctaaggaaggcgacgaccggcccttcttttggctgttcgagaatgtggtggccatgggagtcagcgacaagcgggatattagccggttcctggagagcaaccccgtgatgatcgatgccaaggaagtgagcgccgcccaccgggccagatacttctggggcaatctgcctggcatgaacagacccctggccagcaccgtgaacgacaagctggagctgcaggagtgcctggagcacggccggatcgccaagttcagcaaggtgagaaccatcaccacccgaagcaacagcatcaaacaaggcaaggaccagcactttcctgtgttcatgaacgagaaggaggacatcctgtggtgtaccgagatggagagagtgttcgggttcccagtccactacacagatgtcagcaacatgtctagactggccagacagagactgctgggaagaagctggtccgtccctgtgatcagacacctgttcgcccctctgaaggagtacttcgcctgcgtgagcagcggcaacagcaacgccaacagccggggccccagcttctctagcggcctggtgccactgtccctgagagggagccacatgggccccatggagatctacaaaaccgtgagcgcctggaagcggcagcctgtgcgcgtgctgagcctgtttcggaatatcgataaagtcctgaaaagcctgggattcctggagagcggctctggctccggcggtggcaccctgaagtacgtggaggatgtgacaaacgtggtcagacgggatgtggagaagtggggccccttcgatctggtgtacggcagcacccaacccctgggcagctcttgtgaccggtgccctggctggtacatgtttcagttccaccggatcctgcagtacgccctgccgagacaggagtcccagcggccattcttttggattttcatggacaacttgctgctgaccgaggatgaccaggaaactaccactcggttcctgcagaccgaagccgtgaccctgcaggacgtgagaggccgggactaccagaacgccatgcgggtgtggtccaacatccctggactgaaaagcaagcacgcacctctgacccctaaagaagaggagtacctgcaggcccaggtgcggagcagaagcaagctggacgcccctaaggtggatctgctggtgaagaattgcctcctgcccctgagagagtacttcaagtatttcagccagaatagtctgcccctgggcggcccaagcagcggcgcccctcctcccagcggcggcagcccagccggctccccaacctctaccgaggagggcacctctgagtccgccacccccgagagcggccctggcacctccaccgagcccagcgagggcagcgcacccggcagccctgccggcagccccacctccacagaggagggaaccagcaccgagcccagcgaaggcagcgccccaggcaccagcaccgagcctagtgagggcggctctggcggcggcagcgcccaggagattaaacggatcaacaagatcagaagaagacttgtgaaagacagcaacaccaagaaggccggcaagacaggccccatgaaaaccctgctggttagagtgatgacacccgatctgagagagcggctggaaaacctgagaaagaagcctgaaaatatcccccagcccatcagcaatacatctagagccaacctgaataagctgctgaccgattacaccgaaatgaagaaggcgatcctgcatgtgtactgggaagagttccagaaggaccctgtgggcctgatgagccgggtggcccagcctgccagcaagaagatcgatcagaacaagctgaaacctgagatggacgagaagggcaacctgaccaccgccggctttgcctgctctcagtgtggccagcccctgttcgtgtacaagctggagcaggtgtctgagaagggcaaggcttacaccaactacttcggacggtgcaatgtggccgagcacgaaaagctgatcctgctggcccagctgaagcccgagaaggatagcgacgaagccgtgacatatagcctgggaaagtttgggcagagggccctggatttctacagcattcatgtgaccaaggagtccacccaccccgtgaagcccctggcccagatcgccggaaacagatacgcctccggacctgtgggaaaggccctgagcgacgcatgtatgggcacaatcgcctccttcctgtctaagtaccaggacatcatcatcgaacaccagaaggtggtgaagggcaaccagaagagactggagagcctgcgggagctggccggcaaggaaaacctggaataccctagcgtgaccctgccacctcagcctcacaccaaggagggcgttgatgcctacaacgaagtgatcgcccgggtgcgaatgtgggtgaacctgaacctgtggcagaagctgaagctaagcagagatgatgccaagcctctgctgagactgaagggattcccttcctttcctctggtcgagagacaggccaacgaagtggactggtgggacatggtgtgtaacgtgaagaagctgatcaacgagaaaaaggaggatggcaaggtgttttggcagaatctggctggctacaagagacaggaagccctgagaccatacctgagcagcgaggaagatcggaagaagggaaagaaattcgctcggtaccagctgggcgacctgctgctgcacctggaaaagaagcacggcgaggactggggaaaggtgtacgacgaggcctgggagcggattgacaagaaagtggaaggcctgagcaagcacatcaagctggaagaggaacggagaagcgaggacgcccagagcaaggccgccctgaccgactggctgcgggctaaggccagcttcgtgatcgagggcctgaaggaggccgacaaggacgagttctgcagatgcgagctgaagctgcagaagtggtacggggacctgcggggaaagcccttcgccatcgaagccgagaacagcatcctggacatcagcggcttcagcaagcagtacaactgtgccttcatctggcagaaggacggcgtgaagaagctgaacctgtacctgatcatcaactacttcaagggcggcaagctgcggttcaagaagatcaaacctgaagccttcgaagccaacagattctacaccgtgatcaacaaaaagagcggcgagatcgtgcccatggaggtgaacttcaacttcgacgaccccaacctgatcatcctgcctctggcctttggcaagagacagggcagagaattcatctggaacgacctgctgtccctggaaaccggcagcctgaagctggccaacggaagagtgatcgagaagacactgtacaacagaagaacccggcaggatgagcctgccctgttcgtggccctgaccttcgagcggcgggaggtcctggactcctccaatatcaaaccaatgaacctgatcggcgtggcaagaggcgaaaacatccccgccgtgatcgccctgaccgaccccgagggctgcccactgagccggtttaaggatagcctgggaaacccaacccacatcctgagaatcggcgagagctataaggagaagcagcggaccatccaggccaagaaggaggtggagcagcggagagccggcggctacagccggaagtacgccagcaaagccaagaatctggcagacgatatggtgagaaacaccgctagagatctgctgtactacgccgtgacccaggatgccatgctgatcttcgccaacctgagccggggcttcggccggcagggcaagcggaccttcatggccgagagacagtacacacggatggaggactggctgaccgccaagctggcctacgagggcctgagcaagacctacctgtccaagacactggcccagtacacctccaagacatgcagcaactgtgggtttaccatcaccagcgccgactacgacagggtgctggagaagctgaagaagacagcaacaggctggatgaccacaattaacggcaaggagctgaaggtggagggccagattacctactacaacagatacaagagacagaacgtagtcaaggacctgtccgtcgagctggatagactgagcgaagaatctgtgaacaacgacatctcctcctggacaaagggcagaagcggagaagctctgagcctcctgaagaaaagattctcccatagacccgtgcaggagaagttcgtgtgcctgaactgcggcttcgagacacacgcagccgagcaagccgccctgaacatcgccagatcctggctgttcctgcggagccaggagtacaagaaataccagacaaacaagacaaccggcaacaccgataagagagccttcgtcgagacctggcagtccttttaccggaagaagcttaaggaggtgtggaaacctgccgtgcggtctggcggatctggcggaggctccacaagccacagcgagggcaggctgaccttccaggacgtggccatcgacttcacccaggaggagtgggagtgcctggaccccggccagaggaagctgtacagggacgtgatggtggagaactacaggaacctggccagcctgggcctggtgagcaaggtggacctggtgaccttcctggagctgctgaaggaccccaggaacatcaggaggatgaagaccaccgccatctaccccgccgtgagcccccagaccagccccaagaaaaagagaaaagtctaagctgccttctgcggggcttgccttctggccatgcccttcttctctcccttgcacctgtacctcttggtctttgaataaagcctgagtaggaaggctagcaaaaaaaaaaaaaaaaaaaaaaaaaaaaaaaaaaaaaaaaaaaaaaaaaaaaaaaaaaaaaaaaaaaaaaaaaaaaaaaa

SEQ ID NO: 6464 - RNA, 5797 nt, synthetic construct
  source 1..5797: mol_type = other RNA
aggaaataagagagaaaagaagagtaagaagaaatataagagccaccatggcccctaagaagaagcgtaaagtgagccggatggaacgcctcgtctacgaggtgcggcagaagtgcagaaacatcgaggacatctgcatctcctgcggatctctgaacgtgaccctggagcacccactgttcatcggcggcatgtgccagaactgtaaaaactgttttctggagtgtgcctatcaatacgacgatgacggctaccagagctactgcaccatctgttgcggcggaagagaggtgctgatgtgtggaaataacaactgctgccggtgcttctgcgtggaatgcgtggacctgctggtgggccccggcgccgcccaggccgctattaaggaagatccttggaactgctacatgtgcggccacaagggcacatacggcctgctgagacggagagaggactggcctagcagactgcagatgttcttcgccaataaccacgaccaggagttcgacccccctaaggtgtaccctcccgtccccgccgagaagagaaagcccatccgggtcctgagcctgttcgatggcatcgccaccggtctgctggtgctgaaggacctgggcatccaggtggataggtacattgcctccgaggtgtgcgaggactccatcaccgtgggaatggtgcgtcatcagggcaagatcatgtacgtgggcgacgtgcggagcgtgacacagaagcatatccaggagtggggccctttcgacctggtgatcggcggcagcccttgcaatgacctgagcatcgtgaacccagcccggaagggcctgtacgagggaaccggcagactgttcttcgagttttacagactgctgcacgacgcccggcctaaggaaggcgacgaccggcccttcttttggctgttcgagaatgtggtggccatgggagtcagcgacaagcgggatattagccggttcctggagagcaaccccgtgatgatcgatgccaaggaagtgagcgccgcccaccgggccagatacttctggggcaatctgcctggcatgaacagacccctggccagcaccgtgaacgacaagctggagctgcaggagtgcctggagcacggccggatcgccaagttcagcaaggtgagaaccatcaccacccgaagcaacagcatcaaacaaggcaaggaccagcactttcctgtgttcatgaacgagaaggaggacatcctgtggtgtaccgagatggagagagtgttcgggttcccagtccactacacagatgtcagcaacatgtctagactggccagacagagactgctgggaagaagctggtccgtccctgtgatcagacacctgttcgcccctctgaaggagtacttcgcctgcgtgagcagcggcaacagcaacgccaacagccggggccccagcttctctagcggcctggtgccactgtccctgagagggagccacatgggccccatggagatctacaaaaccgtgagcgcctggaagcggcagcctgtgcgcgtgctgagcctgtttcggaatatcgataaagtcctgaaaagcctgggattcctggagagcggctctggctccggcggtggcaccctgaagtacgtggaggatgtgacaaacgtggtcagacgggatgtggagaagtggggccccttcgatctggtgtacggcagcacccaacccctgggcagctcttgtgaccggtgccctggctggtacatgtttcagttccaccggatcctgcagtacgccctgccgagacaggagtcccagcggccattcttttggattttcatggacaacttgctgctgaccgaggatgaccaggaaactaccactcggttcctgcagaccgaagccgtgaccctgcaggacgtgagaggccgggactaccagaacgccatgcgggtgtggtccaacatccctggactgaaaagcaagcacgcacctctgacccctaaagaagaggagtacctgcaggcccaggtgcggagcagaagcaagctggacgcccctaaggtggatctgctggtgaagaattgcctcctgcccctgagagagtacttcaagtatttcagccagaatagtctgcccctgggcggcccaagcagcggcgcccctcctcccagcggcggcagcccagccggctccccaacctctaccgaggagggcacctctgagtccgccacccccgagagcggccctggcacctccaccgagcccagcgagggcagcgcacccggcagccctgccggcagccccacctccacagaggagggaaccagcaccgagcccagcgaaggcagcgccccaggcaccagcaccgagcctagtgagggcggctctggcggcggcagcgcccaggagattaaacggatcaacaagatcagaagaagacttgtgaaagacagcaacaccaagaaggccggcaagacaggccccatgaaaaccctgctggttagagtgatgacacccgatctgagagagcggctggaaaacctgagaaagaagcctgaaaatatcccccagcccatcagcaatacatctagagccaacctgaataagctgctgaccgattacaccgaaatgaagaaggcgatcctgcatgtgtactgggaagagttccagaaggaccctgtgggcctgatgagccgggtggcccagcctgccagcaagaagatcgatcagaacaagctgaaacctgagatggacgagaagggcaacctgaccaccgccggctttgcctgctctcagtgtggccagcccctgttcgtgtacaagctggagcaggtgtctgagaagggcaaggcttacaccaactacttcggacggtgcaatgtggccgagcacgaaaagctgatcctgctggcccagctgaagcccgagaaggatagcgacgaagccgtgacatatagcctgggaaagtttgggcagagggccctggatttctacagcattcatgtgaccaaggagtccacccaccccgtgaagcccctggcccagatcgccggaaacagatacgcctccggacctgtgggaaaggccctgagcgacgcatgtatgggcacaatcgcctccttcctgtctaagtaccaggacatcatcatcgaacaccagaaggtggtgaagggcaaccagaagagactggagagcctgcgggagctggccggcaaggaaaacctggaataccctagcgtgaccctgccacctcagcctcacaccaaggagggcgttgatgcctacaacgaagtgatcgcccgggtgcgaatgtgggtgaacctgaacctgtggcagaagctgaagctaagcagagatgatgccaagcctctgctgagactgaagggattcccttcctttcctctggtcgagagacaggccaacgaagtggactggtgggacatggtgtgtaacgtgaagaagctgatcaacgagaaaaaggaggatggcaaggtgttttggcagaatctggctggctacaagagacaggaagccctgagaccatacctgagcagcgaggaagatcggaagaagggaaagaaattcgctcggtaccagctgggcgacctgctgctgcacctggaaaagaagcacggcgaggactggggaaaggtgtacgacgaggcctgggagcggattgacaagaaagtggaaggcctgagcaagcacatcaagctggaagaggaacggagaagcgaggacgcccagagcaaggccgccctgaccgactggctgcgggctaaggccagcttcgtgatcgagggcctgaaggaggccgacaaggacgagttctgcagatgcgagctgaagctgcagaagtggtacggggacctgcggggaaagcccttcgccatcgaagccgagaacagcatcctggacatcagcggcttcagcaagcagtacaactgtgccttcatctggcagaaggacggcgtgaagaagctgaacctgtacctgatcatcaactacttcaagggcggcaagctgcggttcaagaagatcaaacctgaagccttcgaagccaacagattctacaccgtgatcaacaaaaagagcggcgagatcgtgcccatggaggtgaacttcaacttcgacgaccccaacctgatcatcctgcctctggcctttggcaagagacagggcagagaattcatctggaacgacctgctgtccctggaaaccggcagcctgaagctggccaacggaagagtgatcgagaagacactgtacaacagaagaacccggcaggatgagcctgccctgttcgtggccctgaccttcgagcggcgggaggtcctggactcctccaatatcaaaccaatgaacctgatcggcgtggcaagaggcgaaaacatccccgccgtgatcgccctgaccgaccccgagggctgcccactgagccggtttaaggatagcctgggaaacccaacccacatcctgagaatcggcgagagctataaggagaagcagcggaccatccaggccaagaaggaggtggagcagcggagagccggcggctacagccggaagtacgccagcaaagccaagaatctggcagacgatatggtgagaaacaccgctagagatctgctgtactacgccgtgacccaggatgccatgctgatcttcgccaacctgagccggggcttcggccggcagggcaagcggaccttcatggccgagagacagtacacacggatggaggactggctgaccgccaagctggcctacgagggcctgagcaagacctacctgtccaagacactggcccagtacacctccaagacatgcagcaactgtgggtttaccatcaccagcgccgactacgacagggtgctggagaagctgaagaagacagcaacaggctggatgaccacaattaacggcaaggagctgaaggtggagggccagattacctactacaacagatacaagagacagaacgtagtcaaggacctgtccgtcgagctggatagactgagcgaagaatctgtgaacaacgacatctcctcctggacaaagggcagaagcggagaagctctgagcctcctgaagaaaagattctcccatagacccgtgcaggagaagttcgtgtgcctgaactgcggcttcgagacacacgcagccgagcaagccgccctgaacatcgccagatcctggctgttcctgcggagccaggagtacaagaaataccagacaaacaagacaaccggcaacaccgataagagagccttcgtcgagacctggcagtccttttaccggaagaagcttaaggaggtgtggaaacctgccgtgcggtctggcggatctggcggaggctccacaagcatgaacatggagggcctggtgatgttccaggacctgagcatcgacttcagccaggaggagtgggagtgcctggacgccgcccagaaggacctgtacagggacgtgatgatggagaactacagcagcctggtgagcctgggcctgagcatccccaagcccgacgtgatcagcctgctggagcagggcaaggagccctggatggtgagcagggacgtgctgggcggctggtgcaggggcctggagaccagccccaagaaaaagagaaaagtctaagctgccttctgcggggcttgccttctggccatgcccttcttctctcccttgcacctgtacctcttggtctttgaataaagcctgagtaggaaggctagcaaaaaaaaaaaaaaaaaaaaaaaaaaaaaaaaaaaaaaaaaaaaaaaaaaaaaaaaaaaaaaaaaaaaaaaaaaaaaaaa

SEQ ID NO: 6465 - RNA, 5797 nt, synthetic construct
  source 1..5797: mol_type = other RNA
aggaaataagagagaaaagaagagtaagaagaaatataagagccaccatggcccctaagaagaagcgtaaagtgagccggatggaacgcctcgtctacgaggtgcggcagaagtgcagaaacatcgaggacatctgcatctcctgcggatctctgaacgtgaccctggagcacccactgttcatcggcggcatgtgccagaactgtaaaaactgttttctggagtgtgcctatcaatacgacgatgacggctaccagagctactgcaccatctgttgcggcggaagagaggtgctgatgtgtggaaataacaactgctgccggtgcttctgcgtggaatgcgtggacctgctggtgggccccggcgccgcccaggccgctattaaggaagatccttggaactgctacatgtgcggccacaagggcacatacggcctgctgagacggagagaggactggcctagcagactgcagatgttcttcgccaataaccacgaccaggagttcgacccccctaaggtgtaccctcccgtccccgccgagaagagaaagcccatccgggtcctgagcctgttcgatggcatcgccaccggtctgctggtgctgaaggacctgggcatccaggtggataggtacattgcctccgaggtgtgcgaggactccatcaccgtgggaatggtgcgtcatcagggcaagatcatgtacgtgggcgacgtgcggagcgtgacacagaagcatatccaggagtggggccctttcgacctggtgatcggcggcagcccttgcaatgacctgagcatcgtgaacccagcccggaagggcctgtacgagggaaccggcagactgttcttcgagttttacagactgctgcacgacgcccggcctaaggaaggcgacgaccggcccttcttttggctgttcgagaatgtggtggccatgggagtcagcgacaagcgggatattagccggttcctggagagcaaccccgtgatgatcgatgccaaggaagtgagcgccgcccaccgggccagatacttctggggcaatctgcctggcatgaacagacccctggccagcaccgtgaacgacaagctggagctgcaggagtgcctggagcacggccggatcgccaagttcagcaaggtgagaaccatcaccacccgaagcaacagcatcaaacaaggcaaggaccagcactttcctgtgttcatgaacgagaaggaggacatcctgtggtgtaccgagatggagagagtgttcgggttcccagtccactacacagatgtcagcaacatgtctagactggccagacagagactgctgggaagaagctggtccgtccctgtgatcagacacctgttcgcccctctgaaggagtacttcgcctgcgtgagcagcggcaacagcaacgccaacagccggggccccagcttctctagcggcctggtgccactgtccctgagagggagccacatgggccccatggagatctacaaaaccgtgagcgcctggaagcggcagcctgtgcgcgtgctgagcctgtttcggaatatcgataaagtcctgaaaagcctgggattcctggagagcggctctggctccggcggtggcaccctgaagtacgtggaggatgtgacaaacgtggtcagacgggatgtggagaagtggggccccttcgatctggtgtacggcagcacccaacccctgggcagctcttgtgaccggtgccctggctggtacatgtttcagttccaccggatcctgcagtacgccctgccgagacaggagtcccagcggccattcttttggattttcatggacaacttgctgctgaccgaggatgaccaggaaactaccactcggttcctgcagaccgaagccgtgaccctgcaggacgtgagaggccgggactaccagaacgccatgcgggtgtggtccaacatccctggactgaaaagcaagcacgcacctctgacccctaaagaagaggagtacctgcaggcccaggtgcggagcagaagcaagctggacgcccctaaggtggatctgctggtgaagaattgcctcctgcccctgagagagtacttcaagtatttcagccagaatagtctgcccctgggcggcccaagcagcggcgcccctcctcccagcggcggcagcccagccggctccccaacctctaccgaggagggcacctctgagtccgccacccccgagagcggccctggcacctccaccgagcccagcgagggcagcgcacccggcagccctgccggcagccccacctccacagaggagggaaccagcaccgagcccagcgaaggcagcgccccaggcaccagcaccgagcctagtgagggcggctctggcggcggcagcgcccaggagattaaacggatcaacaagatcagaagaagacttgtgaaagacagcaacaccaagaaggccggcaagacaggccccatgaaaaccctgctggttagagtgatgacacccgatctgagagagcggctggaaaacctgagaaagaagcctgaaaatatcccccagcccatcagcaatacatctagagccaacctgaataagctgctgaccgattacaccgaaatgaagaaggcgatcctgcatgtgtactgggaagagttccagaaggaccctgtgggcctgatgagccgggtggcccagcctgccagcaagaagatcgatcagaacaagctgaaacctgagatggacgagaagggcaacctgaccaccgccggctttgcctgctctcagtgtggccagcccctgttcgtgtacaagctggagcaggtgtctgagaagggcaaggcttacaccaactacttcggacggtgcaatgtggccgagcacgaaaagctgatcctgctggcccagctgaagcccgagaaggatagcgacgaagccgtgacatatagcctgggaaagtttgggcagagggccctggatttctacagcattcatgtgaccaaggagtccacccaccccgtgaagcccctggcccagatcgccggaaacagatacgcctccggacctgtgggaaaggccctgagcgacgcatgtatgggcacaatcgcctccttcctgtctaagtaccaggacatcatcatcgaacaccagaaggtggtgaagggcaaccagaagagactggagagcctgcgggagctggccggcaaggaaaacctggaataccctagcgtgaccctgccacctcagcctcacaccaaggagggcgttgatgcctacaacgaagtgatcgcccgggtgcgaatgtgggtgaacctgaacctgtggcagaagctgaagctaagcagagatgatgccaagcctctgctgagactgaagggattcccttcctttcctctggtcgagagacaggccaacgaagtggactggtgggacatggtgtgtaacgtgaagaagctgatcaacgagaaaaaggaggatggcaaggtgttttggcagaatctggctggctacaagagacaggaagccctgagaccatacctgagcagcgaggaagatcggaagaagggaaagaaattcgctcggtaccagctgggcgacctgctgctgcacctggaaaagaagcacggcgaggactggggaaaggtgtacgacgaggcctgggagcggattgacaagaaagtggaaggcctgagcaagcacatcaagctggaagaggaacggagaagcgaggacgcccagagcaaggccgccctgaccgactggctgcgggctaaggccagcttcgtgatcgagggcctgaaggaggccgacaaggacgagttctgcagatgcgagctgaagctgcagaagtggtacggggacctgcggggaaagcccttcgccatcgaagccgagaacagcatcctggacatcagcggcttcagcaagcagtacaactgtgccttcatctggcagaaggacggcgtgaagaagctgaacctgtacctgatcatcaactacttcaagggcggcaagctgcggttcaagaagatcaaacctgaagccttcgaagccaacagattctacaccgtgatcaacaaaaagagcggcgagatcgtgcccatggaggtgaacttcaacttcgacgaccccaacctgatcatcctgcctctggcctttggcaagagacagggcagagaattcatctggaacgacctgctgtccctggaaaccggcagcctgaagctggccaacggaagagtgatcgagaagacactgtacaacagaagaacccggcaggatgagcctgccctgttcgtggccctgaccttcgagcggcgggaggtcctggactcctccaatatcaaaccaatgaacctgatcggcgtggcaagaggcgaaaacatccccgccgtgatcgccctgaccgaccccgagggctgcccactgagccggtttaaggatagcctgggaaacccaacccacatcctgagaatcggcgagagctataaggagaagcagcggaccatccaggccaagaaggaggtggagcagcggagagccggcggctacagccggaagtacgccagcaaagccaagaatctggcagacgatatggtgagaaacaccgctagagatctgctgtactacgccgtgacccaggatgccatgctgatcttcgccaacctgagccggggcttcggccggcagggcaagcggaccttcatggccgagagacagtacacacggatggaggactggctgaccgccaagctggcctacgagggcctgagcaagacctacctgtccaagacactggcccagtacacctccaagacatgcagcaactgtgggtttaccatcaccagcgccgactacgacagggtgctggagaagctgaagaagacagcaacaggctggatgaccacaattaacggcaaggagctgaaggtggagggccagattacctactacaacagatacaagagacagaacgtagtcaaggacctgtccgtcgagctggatagactgagcgaagaatctgtgaacaacgacatctcctcctggacaaagggcagaagcggagaagctctgagcctcctgaagaaaagattctcccatagacccgtgcaggagaagttcgtgtgcctgaactgcggcttcgagacacacgcagccgagcaagccgccctgaacatcgccagatcctggctgttcctgcggagccaggagtacaagaaataccagacaaacaagacaaccggcaacaccgataagagagccttcgtcgagacctggcagtccttttaccggaagaagcttaaggaggtgtggaaacctgccgtgcggtctggcggatctggcggaggctccacaagcatcaagagccccctgaccttcggcgacgtggccgtggagttcagcggcgaggagtgggcctggctggacagcgcccagaggagcctgcacaggagcgtgatgctggagaactacaggaacctggccagcctgggcctgtgcctgagcaagcccgagatgatcagcagcctggagcagaggaaggagccctgggccgtgaagaggaagagcaccagcggcaagtgccccgacctgcagaccctgaccagccccaagaaaaagagaaaagtctaagctgccttctgcggggcttgccttctggccatgcccttcttctctcccttgcacctgtacctcttggtctttgaataaagcctgagtaggaaggctagcaaaaaaaaaaaaaaaaaaaaaaaaaaaaaaaaaaaaaaaaaaaaaaaaaaaaaaaaaaaaaaaaaaaaaaaaaaaaaaaa

SEQ ID NO: 6466 - RNA, 5797 nt, synthetic construct
  source 1..5797: mol_type = other RNA
aggaaataagagagaaaagaagagtaagaagaaatataagagccaccatggcccctaagaagaagcgtaaagtgagccggatggaacgcctcgtctacgaggtgcggcagaagtgcagaaacatcgaggacatctgcatctcctgcggatctctgaacgtgaccctggagcacccactgttcatcggcggcatgtgccagaactgtaaaaactgttttctggagtgtgcctatcaatacgacgatgacggctaccagagctactgcaccatctgttgcggcggaagagaggtgctgatgtgtggaaataacaactgctgccggtgcttctgcgtggaatgcgtggacctgctggtgggccccggcgccgcccaggccgctattaaggaagatccttggaactgctacatgtgcggccacaagggcacatacggcctgctgagacggagagaggactggcctagcagactgcagatgttcttcgccaataaccacgaccaggagttcgacccccctaaggtgtaccctcccgtccccgccgagaagagaaagcccatccgggtcctgagcctgttcgatggcatcgccaccggtctgctggtgctgaaggacctgggcatccaggtggataggtacattgcctccgaggtgtgcgaggactccatcaccgtgggaatggtgcgtcatcagggcaagatcatgtacgtgggcgacgtgcggagcgtgacacagaagcatatccaggagtggggccctttcgacctggtgatcggcggcagcccttgcaatgacctgagcatcgtgaacccagcccggaagggcctgtacgagggaaccggcagactgttcttcgagttttacagactgctgcacgacgcccggcctaaggaaggcgacgaccggcccttcttttggctgttcgagaatgtggtggccatgggagtcagcgacaagcgggatattagccggttcctggagagcaaccccgtgatgatcgatgccaaggaagtgagcgccgcccaccgggccagatacttctggggcaatctgcctggcatgaacagacccctggccagcaccgtgaacgacaagctggagctgcaggagtgcctggagcacggccggatcgccaagttcagcaaggtgagaaccatcaccacccgaagcaacagcatcaaacaaggcaaggaccagcactttcctgtgttcatgaacgagaaggaggacatcctgtggtgtaccgagatggagagagtgttcgggttcccagtccactacacagatgtcagcaacatgtctagactggccagacagagactgctgggaagaagctggtccgtccctgtgatcagacacctgttcgcccctctgaaggagtacttcgcctgcgtgagcagcggcaacagcaacgccaacagccggggccccagcttctctagcggcctggtgccactgtccctgagagggagccacatgggccccatggagatctacaaaaccgtgagcgcctggaagcggcagcctgtgcgcgtgctgagcctgtttcggaatatcgataaagtcctgaaaagcctgggattcctggagagcggctctggctccggcggtggcaccctgaagtacgtggaggatgtgacaaacgtggtcagacgggatgtggagaagtggggccccttcgatctggtgtacggcagcacccaacccctgggcagctcttgtgaccggtgccctggctggtacatgtttcagttccaccggatcctgcagtacgccctgccgagacaggagtcccagcggccattcttttggattttcatggacaacttgctgctgaccgaggatgaccaggaaactaccactcggttcctgcagaccgaagccgtgaccctgcaggacgtgagaggccgggactaccagaacgccatgcgggtgtggtccaacatccctggactgaaaagcaagcacgcacctctgacccctaaagaagaggagtacctgcaggcccaggtgcggagcagaagcaagctggacgcccctaaggtggatctgctggtgaagaattgcctcctgcccctgagagagtacttcaagtatttcagccagaatagtctgcccctgggcggcccaagcagcggcgcccctcctcccagcggcggcagcccagccggctccccaacctctaccgaggagggcacctctgagtccgccacccccgagagcggccctggcacctccaccgagcccagcgagggcagcgcacccggcagccctgccggcagccccacctccacagaggagggaaccagcaccgagcccagcgaaggcagcgccccaggcaccagcaccgagcctagtgagggcggctctggcggcggcagcgcccaggagattaaacggatcaacaagatcagaagaagacttgtgaaagacagcaacaccaagaaggccggcaagacaggccccatgaaaaccctgctggttagagtgatgacacccgatctgagagagcggctggaaaacctgagaaagaagcctgaaaatatcccccagcccatcagcaatacatctagagccaacctgaataagctgctgaccgattacaccgaaatgaagaaggcgatcctgcatgtgtactgggaagagttccagaaggaccctgtgggcctgatgagccgggtggcccagcctgccagcaagaagatcgatcagaacaagctgaaacctgagatggacgagaagggcaacctgaccaccgccggctttgcctgctctcagtgtggccagcccctgttcgtgtacaagctggagcaggtgtctgagaagggcaaggcttacaccaactacttcggacggtgcaatgtggccgagcacgaaaagctgatcctgctggcccagctgaagcccgagaaggatagcgacgaagccgtgacatatagcctgggaaagtttgggcagagggccctggatttctacagcattcatgtgaccaaggagtccacccaccccgtgaagcccctggcccagatcgccggaaacagatacgcctccggacctgtgggaaaggccctgagcgacgcatgtatgggcacaatcgcctccttcctgtctaagtaccaggacatcatcatcgaacaccagaaggtggtgaagggcaaccagaagagactggagagcctgcgggagctggccggcaaggaaaacctggaataccctagcgtgaccctgccacctcagcctcacaccaaggagggcgttgatgcctacaacgaagtgatcgcccgggtgcgaatgtgggtgaacctgaacctgtggcagaagctgaagctaagcagagatgatgccaagcctctgctgagactgaagggattcccttcctttcctctggtcgagagacaggccaacgaagtggactggtgggacatggtgtgtaacgtgaagaagctgatcaacgagaaaaaggaggatggcaaggtgttttggcagaatctggctggctacaagagacaggaagccctgagaccatacctgagcagcgaggaagatcggaagaagggaaagaaattcgctcggtaccagctgggcgacctgctgctgcacctggaaaagaagcacggcgaggactggggaaaggtgtacgacgaggcctgggagcggattgacaagaaagtggaaggcctgagcaagcacatcaagctggaagaggaacggagaagcgaggacgcccagagcaaggccgccctgaccgactggctgcgggctaaggccagcttcgtgatcgagggcctgaaggaggccgacaaggacgagttctgcagatgcgagctgaagctgcagaagtggtacggggacctgcggggaaagcccttcgccatcgaagccgagaacagcatcctggacatcagcggcttcagcaagcagtacaactgtgccttcatctggcagaaggacggcgtgaagaagctgaacctgtacctgatcatcaactacttcaagggcggcaagctgcggttcaagaagatcaaacctgaagccttcgaagccaacagattctacaccgtgatcaacaaaaagagcggcgagatcgtgcccatggaggtgaacttcaacttcgacgaccccaacctgatcatcctgcctctggcctttggcaagagacagggcagagaattcatctggaacgacctgctgtccctggaaaccggcagcctgaagctggccaacggaagagtgatcgagaagacactgtacaacagaagaacccggcaggatgagcctgccctgttcgtggccctgaccttcgagcggcgggaggtcctggactcctccaatatcaaaccaatgaacctgatcggcgtggcaagaggcgaaaacatccccgccgtgatcgccctgaccgaccccgagggctgcccactgagccggtttaaggatagcctgggaaacccaacccacatcctgagaatcggcgagagctataaggagaagcagcggaccatccaggccaagaaggaggtggagcagcggagagccggcggctacagccggaagtacgccagcaaagccaagaatctggcagacgatatggtgagaaacaccgctagagatctgctgtactacgccgtgacccaggatgccatgctgatcttcgccaacctgagccggggcttcggccggcagggcaagcggaccttcatggccgagagacagtacacacggatggaggactggctgaccgccaagctggcctacgagggcctgagcaagacctacctgtccaagacactggcccagtacacctccaagacatgcagcaactgtgggtttaccatcaccagcgccgactacgacagggtgctggagaagctgaagaagacagcaacaggctggatgaccacaattaacggcaaggagctgaaggtggagggccagattacctactacaacagatacaagagacagaacgtagtcaaggacctgtccgtcgagctggatagactgagcgaagaatctgtgaacaacgacatctcctcctggacaaagggcagaagcggagaagctctgagcctcctgaagaaaagattctcccatagacccgtgcaggagaagttcgtgtgcctgaactgcggcttcgagacacacgcagccgagcaagccgccctgaacatcgccagatcctggctgttcctgcggagccaggagtacaagaaataccagacaaacaagacaaccggcaacaccgataagagagccttcgtcgagacctggcagtccttttaccggaagaagcttaaggaggtgtggaaacctgccgtgcggtctggcggatctggcggaggctccacaagcctgcccctgaccttcgaggacgtggccgtgtacttcagcgagcaggagtggcagaacctggaggcctggcagaaggagctgtacaagcaggtgatgagggccaactacgagatcctgctgagcctggacaacggcctgcccaagcccgagctgatcagctggatcgagcagggcaaggagctgttcaagaagtggggcgagagccagcagagcaggagcatcatctgcagcagcgccgacctgaccagccccaagaaaaagagaaaagtctaagctgccttctgcggggcttgccttctggccatgcccttcttctctcccttgcacctgtacctcttggtctttgaataaagcctgagtaggaaggctagcaaaaaaaaaaaaaaaaaaaaaaaaaaaaaaaaaaaaaaaaaaaaaaaaaaaaaaaaaaaaaaaaaaaaaaaaaaaaaaaa

SEQ ID NO: 6467 - RNA, 5797 nt, synthetic construct
  source 1..5797: mol_type = other RNA
aggaaataagagagaaaagaagagtaagaagaaatataagagccaccatggcccctaagaagaagcgtaaagtgagccggatggaacgcctcgtctacgaggtgcggcagaagtgcagaaacatcgaggacatctgcatctcctgcggatctctgaacgtgaccctggagcacccactgttcatcggcggcatgtgccagaactgtaaaaactgttttctggagtgtgcctatcaatacgacgatgacggctaccagagctactgcaccatctgttgcggcggaagagaggtgctgatgtgtggaaataacaactgctgccggtgcttctgcgtggaatgcgtggacctgctggtgggccccggcgccgcccaggccgctattaaggaagatccttggaactgctacatgtgcggccacaagggcacatacggcctgctgagacggagagaggactggcctagcagactgcagatgttcttcgccaataaccacgaccaggagttcgacccccctaaggtgtaccctcccgtccccgccgagaagagaaagcccatccgggtcctgagcctgttcgatggcatcgccaccggtctgctggtgctgaaggacctgggcatccaggtggataggtacattgcctccgaggtgtgcgaggactccatcaccgtgggaatggtgcgtcatcagggcaagatcatgtacgtgggcgacgtgcggagcgtgacacagaagcatatccaggagtggggccctttcgacctggtgatcggcggcagcccttgcaatgacctgagcatcgtgaacccagcccggaagggcctgtacgagggaaccggcagactgttcttcgagttttacagactgctgcacgacgcccggcctaaggaaggcgacgaccggcccttcttttggctgttcgagaatgtggtggccatgggagtcagcgacaagcgggatattagccggttcctggagagcaaccccgtgatgatcgatgccaaggaagtgagcgccgcccaccgggccagatacttctggggcaatctgcctggcatgaacagacccctggccagcaccgtgaacgacaagctggagctgcaggagtgcctggagcacggccggatcgccaagttcagcaaggtgagaaccatcaccacccgaagcaacagcatcaaacaaggcaaggaccagcactttcctgtgttcatgaacgagaaggaggacatcctgtggtgtaccgagatggagagagtgttcgggttcccagtccactacacagatgtcagcaacatgtctagactggccagacagagactgctgggaagaagctggtccgtccctgtgatcagacacctgttcgcccctctgaaggagtacttcgcctgcgtgagcagcggcaacagcaacgccaacagccggggccccagcttctctagcggcctggtgccactgtccctgagagggagccacatgggccccatggagatctacaaaaccgtgagcgcctggaagcggcagcctgtgcgcgtgctgagcctgtttcggaatatcgataaagtcctgaaaagcctgggattcctggagagcggctctggctccggcggtggcaccctgaagtacgtggaggatgtgacaaacgtggtcagacgggatgtggagaagtggggccccttcgatctggtgtacggcagcacccaacccctgggcagctcttgtgaccggtgccctggctggtacatgtttcagttccaccggatcctgcagtacgccctgccgagacaggagtcccagcggccattcttttggattttcatggacaacttgctgctgaccgaggatgaccaggaaactaccactcggttcctgcagaccgaagccgtgaccctgcaggacgtgagaggccgggactaccagaacgccatgcgggtgtggtccaacatccctggactgaaaagcaagcacgcacctctgacccctaaagaagaggagtacctgcaggcccaggtgcggagcagaagcaagctggacgcccctaaggtggatctgctggtgaagaattgcctcctgcccctgagagagtacttcaagtatttcagccagaatagtctgcccctgggcggcccaagcagcggcgcccctcctcccagcggcggcagcccagccggctccccaacctctaccgaggagggcacctctgagtccgccacccccgagagcggccctggcacctccaccgagcccagcgagggcagcgcacccggcagccctgccggcagccccacctccacagaggagggaaccagcaccgagcccagcgaaggcagcgccccaggcaccagcaccgagcctagtgagggcggctctggcggcggcagcgcccaggagattaaacggatcaacaagatcagaagaagacttgtgaaagacagcaacaccaagaaggccggcaagacaggccccatgaaaaccctgctggttagagtgatgacacccgatctgagagagcggctggaaaacctgagaaagaagcctgaaaatatcccccagcccatcagcaatacatctagagccaacctgaataagctgctgaccgattacaccgaaatgaagaaggcgatcctgcatgtgtactgggaagagttccagaaggaccctgtgggcctgatgagccgggtggcccagcctgccagcaagaagatcgatcagaacaagctgaaacctgagatggacgagaagggcaacctgaccaccgccggctttgcctgctctcagtgtggccagcccctgttcgtgtacaagctggagcaggtgtctgagaagggcaaggcttacaccaactacttcggacggtgcaatgtggccgagcacgaaaagctgatcctgctggcccagctgaagcccgagaaggatagcgacgaagccgtgacatatagcctgggaaagtttgggcagagggccctggatttctacagcattcatgtgaccaaggagtccacccaccccgtgaagcccctggcccagatcgccggaaacagatacgcctccggacctgtgggaaaggccctgagcgacgcatgtatgggcacaatcgcctccttcctgtctaagtaccaggacatcatcatcgaacaccagaaggtggtgaagggcaaccagaagagactggagagcctgcgggagctggccggcaaggaaaacctggaataccctagcgtgaccctgccacctcagcctcacaccaaggagggcgttgatgcctacaacgaagtgatcgcccgggtgcgaatgtgggtgaacctgaacctgtggcagaagctgaagctaagcagagatgatgccaagcctctgctgagactgaagggattcccttcctttcctctggtcgagagacaggccaacgaagtggactggtgggacatggtgtgtaacgtgaagaagctgatcaacgagaaaaaggaggatggcaaggtgttttggcagaatctggctggctacaagagacaggaagccctgagaccatacctgagcagcgaggaagatcggaagaagggaaagaaattcgctcggtaccagctgggcgacctgctgctgcacctggaaaagaagcacggcgaggactggggaaaggtgtacgacgaggcctgggagcggattgacaagaaagtggaaggcctgagcaagcacatcaagctggaagaggaacggagaagcgaggacgcccagagcaaggccgccctgaccgactggctgcgggctaaggccagcttcgtgatcgagggcctgaaggaggccgacaaggacgagttctgcagatgcgagctgaagctgcagaagtggtacggggacctgcggggaaagcccttcgccatcgaagccgagaacagcatcctggacatcagcggcttcagcaagcagtacaactgtgccttcatctggcagaaggacggcgtgaagaagctgaacctgtacctgatcatcaactacttcaagggcggcaagctgcggttcaagaagatcaaacctgaagccttcgaagccaacagattctacaccgtgatcaacaaaaagagcggcgagatcgtgcccatggaggtgaacttcaacttcgacgaccccaacctgatcatcctgcctctggcctttggcaagagacagggcagagaattcatctggaacgacctgctgtccctggaaaccggcagcctgaagctggccaacggaagagtgatcgagaagacactgtacaacagaagaacccggcaggatgagcctgccctgttcgtggccctgaccttcgagcggcgggaggtcctggactcctccaatatcaaaccaatgaacctgatcggcgtggcaagaggcgaaaacatccccgccgtgatcgccctgaccgaccccgagggctgcccactgagccggtttaaggatagcctgggaaacccaacccacatcctgagaatcggcgagagctataaggagaagcagcggaccatccaggccaagaaggaggtggagcagcggagagccggcggctacagccggaagtacgccagcaaagccaagaatctggcagacgatatggtgagaaacaccgctagagatctgctgtactacgccgtgacccaggatgccatgctgatcttcgccaacctgagccggggcttcggccggcagggcaagcggaccttcatggccgagagacagtacacacggatggaggactggctgaccgccaagctggcctacgagggcctgagcaagacctacctgtccaagacactggcccagtacacctccaagacatgcagcaactgtgggtttaccatcaccagcgccgactacgacagggtgctggagaagctgaagaagacagcaacaggctggatgaccacaattaacggcaaggagctgaaggtggagggccagattacctactacaacagatacaagagacagaacgtagtcaaggacctgtccgtcgagctggatagactgagcgaagaatctgtgaacaacgacatctcctcctggacaaagggcagaagcggagaagctctgagcctcctgaagaaaagattctcccatagacccgtgcaggagaagttcgtgtgcctgaactgcggcttcgagacacacgcagccgagcaagccgccctgaacatcgccagatcctggctgttcctgcggagccaggagtacaagaaataccagacaaacaagacaaccggcaacaccgataagagagccttcgtcgagacctggcagtccttttaccggaagaagcttaaggaggtgtggaaacctgccgtgcggtctggcggatctggcggaggctccacaagcctgcaggacctggtgaccttcaaggacgtgaccgtggagttcaaccaggaggagtgggccctgctggacagcagccagcagaagctgtacagggacgtgatgctggagaactacggcaacctggccagcctgggctaccacgtggacaagcccagcctgatcagccagctggagcaggaggacaaggtgatgaccgaggagggcggcatcctgcccggcacctgccccgacctggagaccgtgaccagccccaagaaaaagagaaaagtctaagctgccttctgcggggcttgccttctggccatgcccttcttctctcccttgcacctgtacctcttggtctttgaataaagcctgagtaggaaggctagcaaaaaaaaaaaaaaaaaaaaaaaaaaaaaaaaaaaaaaaaaaaaaaaaaaaaaaaaaaaaaaaaaaaaaaaaaaaaaaaa

SEQ ID NO: 6468 - RNA, 5797 nt, synthetic construct
  source 1..5797: mol_type = other RNA
aggaaataagagagaaaagaagagtaagaagaaatataagagccaccatggcccctaagaagaagcgtaaagtgagccggatggaacgcctcgtctacgaggtgcggcagaagtgcagaaacatcgaggacatctgcatctcctgcggatctctgaacgtgaccctggagcacccactgttcatcggcggcatgtgccagaactgtaaaaactgttttctggagtgtgcctatcaatacgacgatgacggctaccagagctactgcaccatctgttgcggcggaagagaggtgctgatgtgtggaaataacaactgctgccggtgcttctgcgtggaatgcgtggacctgctggtgggccccggcgccgcccaggccgctattaaggaagatccttggaactgctacatgtgcggccacaagggcacatacggcctgctgagacggagagaggactggcctagcagactgcagatgttcttcgccaataaccacgaccaggagttcgacccccctaaggtgtaccctcccgtccccgccgagaagagaaagcccatccgggtcctgagcctgttcgatggcatcgccaccggtctgctggtgctgaaggacctgggcatccaggtggataggtacattgcctccgaggtgtgcgaggactccatcaccgtgggaatggtgcgtcatcagggcaagatcatgtacgtgggcgacgtgcggagcgtgacacagaagcatatccaggagtggggccctttcgacctggtgatcggcggcagcccttgcaatgacctgagcatcgtgaacccagcccggaagggcctgtacgagggaaccggcagactgttcttcgagttttacagactgctgcacgacgcccggcctaaggaaggcgacgaccggcccttcttttggctgttcgagaatgtggtggccatgggagtcagcgacaagcgggatattagccggttcctggagagcaaccccgtgatgatcgatgccaaggaagtgagcgccgcccaccgggccagatacttctggggcaatctgcctggcatgaacagacccctggccagcaccgtgaacgacaagctggagctgcaggagtgcctggagcacggccggatcgccaagttcagcaaggtgagaaccatcaccacccgaagcaacagcatcaaacaaggcaaggaccagcactttcctgtgttcatgaacgagaaggaggacatcctgtggtgtaccgagatggagagagtgttcgggttcccagtccactacacagatgtcagcaacatgtctagactggccagacagagactgctgggaagaagctggtccgtccctgtgatcagacacctgttcgcccctctgaaggagtacttcgcctgcgtgagcagcggcaacagcaacgccaacagccggggccccagcttctctagcggcctggtgccactgtccctgagagggagccacatgggccccatggagatctacaaaaccgtgagcgcctggaagcggcagcctgtgcgcgtgctgagcctgtttcggaatatcgataaagtcctgaaaagcctgggattcctggagagcggctctggctccggcggtggcaccctgaagtacgtggaggatgtgacaaacgtggtcagacgggatgtggagaagtggggccccttcgatctggtgtacggcagcacccaacccctgggcagctcttgtgaccggtgccctggctggtacatgtttcagttccaccggatcctgcagtacgccctgccgagacaggagtcccagcggccattcttttggattttcatggacaacttgctgctgaccgaggatgaccaggaaactaccactcggttcctgcagaccgaagccgtgaccctgcaggacgtgagaggccgggactaccagaacgccatgcgggtgtggtccaacatccctggactgaaaagcaagcacgcacctctgacccctaaagaagaggagtacctgcaggcccaggtgcggagcagaagcaagctggacgcccctaaggtggatctgctggtgaagaattgcctcctgcccctgagagagtacttcaagtatttcagccagaatagtctgcccctgggcggcccaagcagcggcgcccctcctcccagcggcggcagcccagccggctccccaacctctaccgaggagggcacctctgagtccgccacccccgagagcggccctggcacctccaccgagcccagcgagggcagcgcacccggcagccctgccggcagccccacctccacagaggagggaaccagcaccgagcccagcgaaggcagcgccccaggcaccagcaccgagcctagtgagggcggctctggcggcggcagcgcccaggagattaaacggatcaacaagatcagaagaagacttgtgaaagacagcaacaccaagaaggccggcaagacaggccccatgaaaaccctgctggttagagtgatgacacccgatctgagagagcggctggaaaacctgagaaagaagcctgaaaatatcccccagcccatcagcaatacatctagagccaacctgaataagctgctgaccgattacaccgaaatgaagaaggcgatcctgcatgtgtactgggaagagttccagaaggaccctgtgggcctgatgagccgggtggcccagcctgccagcaagaagatcgatcagaacaagctgaaacctgagatggacgagaagggcaacctgaccaccgccggctttgcctgctctcagtgtggccagcccctgttcgtgtacaagctggagcaggtgtctgagaagggcaaggcttacaccaactacttcggacggtgcaatgtggccgagcacgaaaagctgatcctgctggcccagctgaagcccgagaaggatagcgacgaagccgtgacatatagcctgggaaagtttgggcagagggccctggatttctacagcattcatgtgaccaaggagtccacccaccccgtgaagcccctggcccagatcgccggaaacagatacgcctccggacctgtgggaaaggccctgagcgacgcatgtatgggcacaatcgcctccttcctgtctaagtaccaggacatcatcatcgaacaccagaaggtggtgaagggcaaccagaagagactggagagcctgcgggagctggccggcaaggaaaacctggaataccctagcgtgaccctgccacctcagcctcacaccaaggagggcgttgatgcctacaacgaagtgatcgcccgggtgcgaatgtgggtgaacctgaacctgtggcagaagctgaagctaagcagagatgatgccaagcctctgctgagactgaagggattcccttcctttcctctggtcgagagacaggccaacgaagtggactggtgggacatggtgtgtaacgtgaagaagctgatcaacgagaaaaaggaggatggcaaggtgttttggcagaatctggctggctacaagagacaggaagccctgagaccatacctgagcagcgaggaagatcggaagaagggaaagaaattcgctcggtaccagctgggcgacctgctgctgcacctggaaaagaagcacggcgaggactggggaaaggtgtacgacgaggcctgggagcggattgacaagaaagtggaaggcctgagcaagcacatcaagctggaagaggaacggagaagcgaggacgcccagagcaaggccgccctgaccgactggctgcgggctaaggccagcttcgtgatcgagggcctgaaggaggccgacaaggacgagttctgcagatgcgagctgaagctgcagaagtggtacggggacctgcggggaaagcccttcgccatcgaagccgagaacagcatcctggacatcagcggcttcagcaagcagtacaactgtgccttcatctggcagaaggacggcgtgaagaagctgaacctgtacctgatcatcaactacttcaagggcggcaagctgcggttcaagaagatcaaacctgaagccttcgaagccaacagattctacaccgtgatcaacaaaaagagcggcgagatcgtgcccatggaggtgaacttcaacttcgacgaccccaacctgatcatcctgcctctggcctttggcaagagacagggcagagaattcatctggaacgacctgctgtccctggaaaccggcagcctgaagctggccaacggaagagtgatcgagaagacactgtacaacagaagaacccggcaggatgagcctgccctgttcgtggccctgaccttcgagcggcgggaggtcctggactcctccaatatcaaaccaatgaacctgatcggcgtggcaagaggcgaaaacatccccgccgtgatcgccctgaccgaccccgagggctgcccactgagccggtttaaggatagcctgggaaacccaacccacatcctgagaatcggcgagagctataaggagaagcagcggaccatccaggccaagaaggaggtggagcagcggagagccggcggctacagccggaagtacgccagcaaagccaagaatctggcagacgatatggtgagaaacaccgctagagatctgctgtactacgccgtgacccaggatgccatgctgatcttcgccaacctgagccggggcttcggccggcagggcaagcggaccttcatggccgagagacagtacacacggatggaggactggctgaccgccaagctggcctacgagggcctgagcaagacctacctgtccaagacactggcccagtacacctccaagacatgcagcaactgtgggtttaccatcaccagcgccgactacgacagggtgctggagaagctgaagaagacagcaacaggctggatgaccacaattaacggcaaggagctgaaggtggagggccagattacctactacaacagatacaagagacagaacgtagtcaaggacctgtccgtcgagctggatagactgagcgaagaatctgtgaacaacgacatctcctcctggacaaagggcagaagcggagaagctctgagcctcctgaagaaaagattctcccatagacccgtgcaggagaagttcgtgtgcctgaactgcggcttcgagacacacgcagccgagcaagccgccctgaacatcgccagatcctggctgttcctgcggagccaggagtacaagaaataccagacaaacaagacaaccggcaacaccgataagagagccttcgtcgagacctggcagtccttttaccggaagaagcttaaggaggtgtggaaacctgccgtgcggtctggcggatctggcggaggctccacaagcgagcaggagcccgtgaccttcaaggacgtggccgtggacttcacccaggaggagtggggccagctggacctggtgcagaggaccctgtacagggacgtgatgctggagacctacggccacctgctgagcgtgggcaaccagaccgccaagcccgaggtgatcagcctgctggagcagggcgaggagccctggagcgtggagcagacctgcccccagagggcctgccccgagtggatgaggaacaccagccccaagaaaaagagaaaagtctaagctgccttctgcggggcttgccttctggccatgcccttcttctctcccttgcacctgtacctcttggtctttgaataaagcctgagtaggaaggctagcaaaaaaaaaaaaaaaaaaaaaaaaaaaaaaaaaaaaaaaaaaaaaaaaaaaaaaaaaaaaaaaaaaaaaaaaaaaaaaaa

SEQ ID NO: 6469 - RNA, 5797 nt, synthetic construct
  source 1..5797: mol_type = other RNA
aggaaataagagagaaaagaagagtaagaagaaatataagagccaccatggcccctaagaagaagcgtaaagtgagccggatggaacgcctcgtctacgaggtgcggcagaagtgcagaaacatcgaggacatctgcatctcctgcggatctctgaacgtgaccctggagcacccactgttcatcggcggcatgtgccagaactgtaaaaactgttttctggagtgtgcctatcaatacgacgatgacggctaccagagctactgcaccatctgttgcggcggaagagaggtgctgatgtgtggaaataacaactgctgccggtgcttctgcgtggaatgcgtggacctgctggtgggccccggcgccgcccaggccgctattaaggaagatccttggaactgctacatgtgcggccacaagggcacatacggcctgctgagacggagagaggactggcctagcagactgcagatgttcttcgccaataaccacgaccaggagttcgacccccctaaggtgtaccctcccgtccccgccgagaagagaaagcccatccgggtcctgagcctgttcgatggcatcgccaccggtctgctggtgctgaaggacctgggcatccaggtggataggtacattgcctccgaggtgtgcgaggactccatcaccgtgggaatggtgcgtcatcagggcaagatcatgtacgtgggcgacgtgcggagcgtgacacagaagcatatccaggagtggggccctttcgacctggtgatcggcggcagcccttgcaatgacctgagcatcgtgaacccagcccggaagggcctgtacgagggaaccggcagactgttcttcgagttttacagactgctgcacgacgcccggcctaaggaaggcgacgaccggcccttcttttggctgttcgagaatgtggtggccatgggagtcagcgacaagcgggatattagccggttcctggagagcaaccccgtgatgatcgatgccaaggaagtgagcgccgcccaccgggccagatacttctggggcaatctgcctggcatgaacagacccctggccagcaccgtgaacgacaagctggagctgcaggagtgcctggagcacggccggatcgccaagttcagcaaggtgagaaccatcaccacccgaagcaacagcatcaaacaaggcaaggaccagcactttcctgtgttcatgaacgagaaggaggacatcctgtggtgtaccgagatggagagagtgttcgggttcccagtccactacacagatgtcagcaacatgtctagactggccagacagagactgctgggaagaagctggtccgtccctgtgatcagacacctgttcgcccctctgaaggagtacttcgcctgcgtgagcagcggcaacagcaacgccaacagccggggccccagcttctctagcggcctggtgccactgtccctgagagggagccacatgggccccatggagatctacaaaaccgtgagcgcctggaagcggcagcctgtgcgcgtgctgagcctgtttcggaatatcgataaagtcctgaaaagcctgggattcctggagagcggctctggctccggcggtggcaccctgaagtacgtggaggatgtgacaaacgtggtcagacgggatgtggagaagtggggccccttcgatctggtgtacggcagcacccaacccctgggcagctcttgtgaccggtgccctggctggtacatgtttcagttccaccggatcctgcagtacgccctgccgagacaggagtcccagcggccattcttttggattttcatggacaacttgctgctgaccgaggatgaccaggaaactaccactcggttcctgcagaccgaagccgtgaccctgcaggacgtgagaggccgggactaccagaacgccatgcgggtgtggtccaacatccctggactgaaaagcaagcacgcacctctgacccctaaagaagaggagtacctgcaggcccaggtgcggagcagaagcaagctggacgcccctaaggtggatctgctggtgaagaattgcctcctgcccctgagagagtacttcaagtatttcagccagaatagtctgcccctgggcggcccaagcagcggcgcccctcctcccagcggcggcagcccagccggctccccaacctctaccgaggagggcacctctgagtccgccacccccgagagcggccctggcacctccaccgagcccagcgagggcagcgcacccggcagccctgccggcagccccacctccacagaggagggaaccagcaccgagcccagcgaaggcagcgccccaggcaccagcaccgagcctagtgagggcggctctggcggcggcagcgcccaggagattaaacggatcaacaagatcagaagaagacttgtgaaagacagcaacaccaagaaggccggcaagacaggccccatgaaaaccctgctggttagagtgatgacacccgatctgagagagcggctggaaaacctgagaaagaagcctgaaaatatcccccagcccatcagcaatacatctagagccaacctgaataagctgctgaccgattacaccgaaatgaagaaggcgatcctgcatgtgtactgggaagagttccagaaggaccctgtgggcctgatgagccgggtggcccagcctgccagcaagaagatcgatcagaacaagctgaaacctgagatggacgagaagggcaacctgaccaccgccggctttgcctgctctcagtgtggccagcccctgttcgtgtacaagctggagcaggtgtctgagaagggcaaggcttacaccaactacttcggacggtgcaatgtggccgagcacgaaaagctgatcctgctggcccagctgaagcccgagaaggatagcgacgaagccgtgacatatagcctgggaaagtttgggcagagggccctggatttctacagcattcatgtgaccaaggagtccacccaccccgtgaagcccctggcccagatcgccggaaacagatacgcctccggacctgtgggaaaggccctgagcgacgcatgtatgggcacaatcgcctccttcctgtctaagtaccaggacatcatcatcgaacaccagaaggtggtgaagggcaaccagaagagactggagagcctgcgggagctggccggcaaggaaaacctggaataccctagcgtgaccctgccacctcagcctcacaccaaggagggcgttgatgcctacaacgaagtgatcgcccgggtgcgaatgtgggtgaacctgaacctgtggcagaagctgaagctaagcagagatgatgccaagcctctgctgagactgaagggattcccttcctttcctctggtcgagagacaggccaacgaagtggactggtgggacatggtgtgtaacgtgaagaagctgatcaacgagaaaaaggaggatggcaaggtgttttggcagaatctggctggctacaagagacaggaagccctgagaccatacctgagcagcgaggaagatcggaagaagggaaagaaattcgctcggtaccagctgggcgacctgctgctgcacctggaaaagaagcacggcgaggactggggaaaggtgtacgacgaggcctgggagcggattgacaagaaagtggaaggcctgagcaagcacatcaagctggaagaggaacggagaagcgaggacgcccagagcaaggccgccctgaccgactggctgcgggctaaggccagcttcgtgatcgagggcctgaaggaggccgacaaggacgagttctgcagatgcgagctgaagctgcagaagtggtacggggacctgcggggaaagcccttcgccatcgaagccgagaacagcatcctggacatcagcggcttcagcaagcagtacaactgtgccttcatctggcagaaggacggcgtgaagaagctgaacctgtacctgatcatcaactacttcaagggcggcaagctgcggttcaagaagatcaaacctgaagccttcgaagccaacagattctacaccgtgatcaacaaaaagagcggcgagatcgtgcccatggaggtgaacttcaacttcgacgaccccaacctgatcatcctgcctctggcctttggcaagagacagggcagagaattcatctggaacgacctgctgtccctggaaaccggcagcctgaagctggccaacggaagagtgatcgagaagacactgtacaacagaagaacccggcaggatgagcctgccctgttcgtggccctgaccttcgagcggcgggaggtcctggactcctccaatatcaaaccaatgaacctgatcggcgtggcaagaggcgaaaacatccccgccgtgatcgccctgaccgaccccgagggctgcccactgagccggtttaaggatagcctgggaaacccaacccacatcctgagaatcggcgagagctataaggagaagcagcggaccatccaggccaagaaggaggtggagcagcggagagccggcggctacagccggaagtacgccagcaaagccaagaatctggcagacgatatggtgagaaacaccgctagagatctgctgtactacgccgtgacccaggatgccatgctgatcttcgccaacctgagccggggcttcggccggcagggcaagcggaccttcatggccgagagacagtacacacggatggaggactggctgaccgccaagctggcctacgagggcctgagcaagacctacctgtccaagacactggcccagtacacctccaagacatgcagcaactgtgggtttaccatcaccagcgccgactacgacagggtgctggagaagctgaagaagacagcaacaggctggatgaccacaattaacggcaaggagctgaaggtggagggccagattacctactacaacagatacaagagacagaacgtagtcaaggacctgtccgtcgagctggatagactgagcgaagaatctgtgaacaacgacatctcctcctggacaaagggcagaagcggagaagctctgagcctcctgaagaaaagattctcccatagacccgtgcaggagaagttcgtgtgcctgaactgcggcttcgagacacacgcagccgagcaagccgccctgaacatcgccagatcctggctgttcctgcggagccaggagtacaagaaataccagacaaacaagacaaccggcaacaccgataagagagccttcgtcgagacctggcagtccttttaccggaagaagcttaaggaggtgtggaaacctgccgtgcggtctggcggatctggcggaggctccacaagcatgcccctgaaggcccagtaccaggagatggtgaccttcgaggacgtggccgtgcacttcaccaagaccgagtggaccggcctgagccccgcccagagggccctgtacaggagcgtgatgctggagaacttcggcaacctgaccgccctgggctaccccgtgcccaagcccgccctgatcagcctgctggagggcggcgacatggcctggggcctggaggcccaggacgacccccccgccgagaccagccccaagaaaaagagaaaagtctaagctgccttctgcggggcttgccttctggccatgcccttcttctctcccttgcacctgtacctcttggtctttgaataaagcctgagtaggaaggctagcaaaaaaaaaaaaaaaaaaaaaaaaaaaaaaaaaaaaaaaaaaaaaaaaaaaaaaaaaaaaaaaaaaaaaaaaaaaaaaaa

SEQ ID NO: 6470 - RNA, 5797 nt, synthetic construct
  source 1..5797: mol_type = other RNA
aggaaataagagagaaaagaagagtaagaagaaatataagagccaccatggcccctaagaagaagcgtaaagtgagccggatggaacgcctcgtctacgaggtgcggcagaagtgcagaaacatcgaggacatctgcatctcctgcggatctctgaacgtgaccctggagcacccactgttcatcggcggcatgtgccagaactgtaaaaactgttttctggagtgtgcctatcaatacgacgatgacggctaccagagctactgcaccatctgttgcggcggaagagaggtgctgatgtgtggaaataacaactgctgccggtgcttctgcgtggaatgcgtggacctgctggtgggccccggcgccgcccaggccgctattaaggaagatccttggaactgctacatgtgcggccacaagggcacatacggcctgctgagacggagagaggactggcctagcagactgcagatgttcttcgccaataaccacgaccaggagttcgacccccctaaggtgtaccctcccgtccccgccgagaagagaaagcccatccgggtcctgagcctgttcgatggcatcgccaccggtctgctggtgctgaaggacctgggcatccaggtggataggtacattgcctccgaggtgtgcgaggactccatcaccgtgggaatggtgcgtcatcagggcaagatcatgtacgtgggcgacgtgcggagcgtgacacagaagcatatccaggagtggggccctttcgacctggtgatcggcggcagcccttgcaatgacctgagcatcgtgaacccagcccggaagggcctgtacgagggaaccggcagactgttcttcgagttttacagactgctgcacgacgcccggcctaaggaaggcgacgaccggcccttcttttggctgttcgagaatgtggtggccatgggagtcagcgacaagcgggatattagccggttcctggagagcaaccccgtgatgatcgatgccaaggaagtgagcgccgcccaccgggccagatacttctggggcaatctgcctggcatgaacagacccctggccagcaccgtgaacgacaagctggagctgcaggagtgcctggagcacggccggatcgccaagttcagcaaggtgagaaccatcaccacccgaagcaacagcatcaaacaaggcaaggaccagcactttcctgtgttcatgaacgagaaggaggacatcctgtggtgtaccgagatggagagagtgttcgggttcccagtccactacacagatgtcagcaacatgtctagactggccagacagagactgctgggaagaagctggtccgtccctgtgatcagacacctgttcgcccctctgaaggagtacttcgcctgcgtgagcagcggcaacagcaacgccaacagccggggccccagcttctctagcggcctggtgccactgtccctgagagggagccacatgggccccatggagatctacaaaaccgtgagcgcctggaagcggcagcctgtgcgcgtgctgagcctgtttcggaatatcgataaagtcctgaaaagcctgggattcctggagagcggctctggctccggcggtggcaccctgaagtacgtggaggatgtgacaaacgtggtcagacgggatgtggagaagtggggccccttcgatctggtgtacggcagcacccaacccctgggcagctcttgtgaccggtgccctggctggtacatgtttcagttccaccggatcctgcagtacgccctgccgagacaggagtcccagcggccattcttttggattttcatggacaacttgctgctgaccgaggatgaccaggaaactaccactcggttcctgcagaccgaagccgtgaccctgcaggacgtgagaggccgggactaccagaacgccatgcgggtgtggtccaacatccctggactgaaaagcaagcacgcacctctgacccctaaagaagaggagtacctgcaggcccaggtgcggagcagaagcaagctggacgcccctaaggtggatctgctggtgaagaattgcctcctgcccctgagagagtacttcaagtatttcagccagaatagtctgcccctgggcggcccaagcagcggcgcccctcctcccagcggcggcagcccagccggctccccaacctctaccgaggagggcacctctgagtccgccacccccgagagcggccctggcacctccaccgagcccagcgagggcagcgcacccggcagccctgccggcagccccacctccacagaggagggaaccagcaccgagcccagcgaaggcagcgccccaggcaccagcaccgagcctagtgagggcggctctggcggcggcagcgcccaggagattaaacggatcaacaagatcagaagaagacttgtgaaagacagcaacaccaagaaggccggcaagacaggccccatgaaaaccctgctggttagagtgatgacacccgatctgagagagcggctggaaaacctgagaaagaagcctgaaaatatcccccagcccatcagcaatacatctagagccaacctgaataagctgctgaccgattacaccgaaatgaagaaggcgatcctgcatgtgtactgggaagagttccagaaggaccctgtgggcctgatgagccgggtggcccagcctgccagcaagaagatcgatcagaacaagctgaaacctgagatggacgagaagggcaacctgaccaccgccggctttgcctgctctcagtgtggccagcccctgttcgtgtacaagctggagcaggtgtctgagaagggcaaggcttacaccaactacttcggacggtgcaatgtggccgagcacgaaaagctgatcctgctggcccagctgaagcccgagaaggatagcgacgaagccgtgacatatagcctgggaaagtttgggcagagggccctggatttctacagcattcatgtgaccaaggagtccacccaccccgtgaagcccctggcccagatcgccggaaacagatacgcctccggacctgtgggaaaggccctgagcgacgcatgtatgggcacaatcgcctccttcctgtctaagtaccaggacatcatcatcgaacaccagaaggtggtgaagggcaaccagaagagactggagagcctgcgggagctggccggcaaggaaaacctggaataccctagcgtgaccctgccacctcagcctcacaccaaggagggcgttgatgcctacaacgaagtgatcgcccgggtgcgaatgtgggtgaacctgaacctgtggcagaagctgaagctaagcagagatgatgccaagcctctgctgagactgaagggattcccttcctttcctctggtcgagagacaggccaacgaagtggactggtgggacatggtgtgtaacgtgaagaagctgatcaacgagaaaaaggaggatggcaaggtgttttggcagaatctggctggctacaagagacaggaagccctgagaccatacctgagcagcgaggaagatcggaagaagggaaagaaattcgctcggtaccagctgggcgacctgctgctgcacctggaaaagaagcacggcgaggactggggaaaggtgtacgacgaggcctgggagcggattgacaagaaagtggaaggcctgagcaagcacatcaagctggaagaggaacggagaagcgaggacgcccagagcaaggccgccctgaccgactggctgcgggctaaggccagcttcgtgatcgagggcctgaaggaggccgacaaggacgagttctgcagatgcgagctgaagctgcagaagtggtacggggacctgcggggaaagcccttcgccatcgaagccgagaacagcatcctggacatcagcggcttcagcaagcagtacaactgtgccttcatctggcagaaggacggcgtgaagaagctgaacctgtacctgatcatcaactacttcaagggcggcaagctgcggttcaagaagatcaaacctgaagccttcgaagccaacagattctacaccgtgatcaacaaaaagagcggcgagatcgtgcccatggaggtgaacttcaacttcgacgaccccaacctgatcatcctgcctctggcctttggcaagagacagggcagagaattcatctggaacgacctgctgtccctggaaaccggcagcctgaagctggccaacggaagagtgatcgagaagacactgtacaacagaagaacccggcaggatgagcctgccctgttcgtggccctgaccttcgagcggcgggaggtcctggactcctccaatatcaaaccaatgaacctgatcggcgtggcaagaggcgaaaacatccccgccgtgatcgccctgaccgaccccgagggctgcccactgagccggtttaaggatagcctgggaaacccaacccacatcctgagaatcggcgagagctataaggagaagcagcggaccatccaggccaagaaggaggtggagcagcggagagccggcggctacagccggaagtacgccagcaaagccaagaatctggcagacgatatggtgagaaacaccgctagagatctgctgtactacgccgtgacccaggatgccatgctgatcttcgccaacctgagccggggcttcggccggcagggcaagcggaccttcatggccgagagacagtacacacggatggaggactggctgaccgccaagctggcctacgagggcctgagcaagacctacctgtccaagacactggcccagtacacctccaagacatgcagcaactgtgggtttaccatcaccagcgccgactacgacagggtgctggagaagctgaagaagacagcaacaggctggatgaccacaattaacggcaaggagctgaaggtggagggccagattacctactacaacagatacaagagacagaacgtagtcaaggacctgtccgtcgagctggatagactgagcgaagaatctgtgaacaacgacatctcctcctggacaaagggcagaagcggagaagctctgagcctcctgaagaaaagattctcccatagacccgtgcaggagaagttcgtgtgcctgaactgcggcttcgagacacacgcagccgagcaagccgccctgaacatcgccagatcctggctgttcctgcggagccaggagtacaagaaataccagacaaacaagacaaccggcaacaccgataagagagccttcgtcgagacctggcagtccttttaccggaagaagcttaaggaggtgtggaaacctgccgtgcggtctggcggatctggcggaggctccacaagcgtgcccgccctggtgaccttcagggacgtggccgtggacttcacccaggaggagtggaggcacctggagcccgcccagagggccctgcacagggacgtgatgctggagaacttccagaacctggtgagcgtgggcctgcccgtgagcaaggtggacgtgatcagcctgctggagaggggcgaggccccctggcagcccgagggcggcggcccccccgacccctgctacgactacctgaactggaccagccccaagaaaaagagaaaagtctaagctgccttctgcggggcttgccttctggccatgcccttcttctctcccttgcacctgtacctcttggtctttgaataaagcctgagtaggaaggctagcaaaaaaaaaaaaaaaaaaaaaaaaaaaaaaaaaaaaaaaaaaaaaaaaaaaaaaaaaaaaaaaaaaaaaaaaaaaaaaaa

SEQ ID NO: 6471 - RNA, 5797 nt, synthetic construct
  source 1..5797: mol_type = other RNA
aggaaataagagagaaaagaagagtaagaagaaatataagagccaccatggcccctaagaagaagcgtaaagtgagccggatggaacgcctcgtctacgaggtgcggcagaagtgcagaaacatcgaggacatctgcatctcctgcggatctctgaacgtgaccctggagcacccactgttcatcggcggcatgtgccagaactgtaaaaactgttttctggagtgtgcctatcaatacgacgatgacggctaccagagctactgcaccatctgttgcggcggaagagaggtgctgatgtgtggaaataacaactgctgccggtgcttctgcgtggaatgcgtggacctgctggtgggccccggcgccgcccaggccgctattaaggaagatccttggaactgctacatgtgcggccacaagggcacatacggcctgctgagacggagagaggactggcctagcagactgcagatgttcttcgccaataaccacgaccaggagttcgacccccctaaggtgtaccctcccgtccccgccgagaagagaaagcccatccgggtcctgagcctgttcgatggcatcgccaccggtctgctggtgctgaaggacctgggcatccaggtggataggtacattgcctccgaggtgtgcgaggactccatcaccgtgggaatggtgcgtcatcagggcaagatcatgtacgtgggcgacgtgcggagcgtgacacagaagcatatccaggagtggggccctttcgacctggtgatcggcggcagcccttgcaatgacctgagcatcgtgaacccagcccggaagggcctgtacgagggaaccggcagactgttcttcgagttttacagactgctgcacgacgcccggcctaaggaaggcgacgaccggcccttcttttggctgttcgagaatgtggtggccatgggagtcagcgacaagcgggatattagccggttcctggagagcaaccccgtgatgatcgatgccaaggaagtgagcgccgcccaccgggccagatacttctggggcaatctgcctggcatgaacagacccctggccagcaccgtgaacgacaagctggagctgcaggagtgcctggagcacggccggatcgccaagttcagcaaggtgagaaccatcaccacccgaagcaacagcatcaaacaaggcaaggaccagcactttcctgtgttcatgaacgagaaggaggacatcctgtggtgtaccgagatggagagagtgttcgggttcccagtccactacacagatgtcagcaacatgtctagactggccagacagagactgctgggaagaagctggtccgtccctgtgatcagacacctgttcgcccctctgaaggagtacttcgcctgcgtgagcagcggcaacagcaacgccaacagccggggccccagcttctctagcggcctggtgccactgtccctgagagggagccacatgggccccatggagatctacaaaaccgtgagcgcctggaagcggcagcctgtgcgcgtgctgagcctgtttcggaatatcgataaagtcctgaaaagcctgggattcctggagagcggctctggctccggcggtggcaccctgaagtacgtggaggatgtgacaaacgtggtcagacgggatgtggagaagtggggccccttcgatctggtgtacggcagcacccaacccctgggcagctcttgtgaccggtgccctggctggtacatgtttcagttccaccggatcctgcagtacgccctgccgagacaggagtcccagcggccattcttttggattttcatggacaacttgctgctgaccgaggatgaccaggaaactaccactcggttcctgcagaccgaagccgtgaccctgcaggacgtgagaggccgggactaccagaacgccatgcgggtgtggtccaacatccctggactgaaaagcaagcacgcacctctgacccctaaagaagaggagtacctgcaggcccaggtgcggagcagaagcaagctggacgcccctaaggtggatctgctggtgaagaattgcctcctgcccctgagagagtacttcaagtatttcagccagaatagtctgcccctgggcggcccaagcagcggcgcccctcctcccagcggcggcagcccagccggctccccaacctctaccgaggagggcacctctgagtccgccacccccgagagcggccctggcacctccaccgagcccagcgagggcagcgcacccggcagccctgccggcagccccacctccacagaggagggaaccagcaccgagcccagcgaaggcagcgccccaggcaccagcaccgagcctagtgagggcggctctggcggcggcagcgcccaggagattaaacggatcaacaagatcagaagaagacttgtgaaagacagcaacaccaagaaggccggcaagacaggccccatgaaaaccctgctggttagagtgatgacacccgatctgagagagcggctggaaaacctgagaaagaagcctgaaaatatcccccagcccatcagcaatacatctagagccaacctgaataagctgctgaccgattacaccgaaatgaagaaggcgatcctgcatgtgtactgggaagagttccagaaggaccctgtgggcctgatgagccgggtggcccagcctgccagcaagaagatcgatcagaacaagctgaaacctgagatggacgagaagggcaacctgaccaccgccggctttgcctgctctcagtgtggccagcccctgttcgtgtacaagctggagcaggtgtctgagaagggcaaggcttacaccaactacttcggacggtgcaatgtggccgagcacgaaaagctgatcctgctggcccagctgaagcccgagaaggatagcgacgaagccgtgacatatagcctgggaaagtttgggcagagggccctggatttctacagcattcatgtgaccaaggagtccacccaccccgtgaagcccctggcccagatcgccggaaacagatacgcctccggacctgtgggaaaggccctgagcgacgcatgtatgggcacaatcgcctccttcctgtctaagtaccaggacatcatcatcgaacaccagaaggtggtgaagggcaaccagaagagactggagagcctgcgggagctggccggcaaggaaaacctggaataccctagcgtgaccctgccacctcagcctcacaccaaggagggcgttgatgcctacaacgaagtgatcgcccgggtgcgaatgtgggtgaacctgaacctgtggcagaagctgaagctaagcagagatgatgccaagcctctgctgagactgaagggattcccttcctttcctctggtcgagagacaggccaacgaagtggactggtgggacatggtgtgtaacgtgaagaagctgatcaacgagaaaaaggaggatggcaaggtgttttggcagaatctggctggctacaagagacaggaagccctgagaccatacctgagcagcgaggaagatcggaagaagggaaagaaattcgctcggtaccagctgggcgacctgctgctgcacctggaaaagaagcacggcgaggactggggaaaggtgtacgacgaggcctgggagcggattgacaagaaagtggaaggcctgagcaagcacatcaagctggaagaggaacggagaagcgaggacgcccagagcaaggccgccctgaccgactggctgcgggctaaggccagcttcgtgatcgagggcctgaaggaggccgacaaggacgagttctgcagatgcgagctgaagctgcagaagtggtacggggacctgcggggaaagcccttcgccatcgaagccgagaacagcatcctggacatcagcggcttcagcaagcagtacaactgtgccttcatctggcagaaggacggcgtgaagaagctgaacctgtacctgatcatcaactacttcaagggcggcaagctgcggttcaagaagatcaaacctgaagccttcgaagccaacagattctacaccgtgatcaacaaaaagagcggcgagatcgtgcccatggaggtgaacttcaacttcgacgaccccaacctgatcatcctgcctctggcctttggcaagagacagggcagagaattcatctggaacgacctgctgtccctggaaaccggcagcctgaagctggccaacggaagagtgatcgagaagacactgtacaacagaagaacccggcaggatgagcctgccctgttcgtggccctgaccttcgagcggcgggaggtcctggactcctccaatatcaaaccaatgaacctgatcggcgtggcaagaggcgaaaacatccccgccgtgatcgccctgaccgaccccgagggctgcccactgagccggtttaaggatagcctgggaaacccaacccacatcctgagaatcggcgagagctataaggagaagcagcggaccatccaggccaagaaggaggtggagcagcggagagccggcggctacagccggaagtacgccagcaaagccaagaatctggcagacgatatggtgagaaacaccgctagagatctgctgtactacgccgtgacccaggatgccatgctgatcttcgccaacctgagccggggcttcggccggcagggcaagcggaccttcatggccgagagacagtacacacggatggaggactggctgaccgccaagctggcctacgagggcctgagcaagacctacctgtccaagacactggcccagtacacctccaagacatgcagcaactgtgggtttaccatcaccagcgccgactacgacagggtgctggagaagctgaagaagacagcaacaggctggatgaccacaattaacggcaaggagctgaaggtggagggccagattacctactacaacagatacaagagacagaacgtagtcaaggacctgtccgtcgagctggatagactgagcgaagaatctgtgaacaacgacatctcctcctggacaaagggcagaagcggagaagctctgagcctcctgaagaaaagattctcccatagacccgtgcaggagaagttcgtgtgcctgaactgcggcttcgagacacacgcagccgagcaagccgccctgaacatcgccagatcctggctgttcctgcggagccaggagtacaagaaataccagacaaacaagacaaccggcaacaccgataagagagccttcgtcgagacctggcagtccttttaccggaagaagcttaaggaggtgtggaaacctgccgtgcggtctggcggatctggcggaggctccacaagcgcccaggagagcctgaccttcgacgacgtggccgtggagttcacctgggaggagtggcagctgctggcccccgcccagaaggacctgtacagggacgtgatgctggagaactacagcaacctggtgagcgtgggctaccaggccagcaagcccgacgccctgagcaagctggtgcagggcgagcccccctggaccatggaggacgagatccactgcaggacccacagcgagatctgggaggtgaccagccccaagaaaaagagaaaagtctaagctgccttctgcggggcttgccttctggccatgcccttcttctctcccttgcacctgtacctcttggtctttgaataaagcctgagtaggaaggctagcaaaaaaaaaaaaaaaaaaaaaaaaaaaaaaaaaaaaaaaaaaaaaaaaaaaaaaaaaaaaaaaaaaaaaaaaaaaaaaaa

SEQ ID NO: 6472 - RNA, 5797 nt, synthetic construct
  source 1..5797: mol_type = other RNA
aggaaataagagagaaaagaagagtaagaagaaatataagagccaccatggcccctaagaagaagcgtaaagtgagccggatggaacgcctcgtctacgaggtgcggcagaagtgcagaaacatcgaggacatctgcatctcctgcggatctctgaacgtgaccctggagcacccactgttcatcggcggcatgtgccagaactgtaaaaactgttttctggagtgtgcctatcaatacgacgatgacggctaccagagctactgcaccatctgttgcggcggaagagaggtgctgatgtgtggaaataacaactgctgccggtgcttctgcgtggaatgcgtggacctgctggtgggccccggcgccgcccaggccgctattaaggaagatccttggaactgctacatgtgcggccacaagggcacatacggcctgctgagacggagagaggactggcctagcagactgcagatgttcttcgccaataaccacgaccaggagttcgacccccctaaggtgtaccctcccgtccccgccgagaagagaaagcccatccgggtcctgagcctgttcgatggcatcgccaccggtctgctggtgctgaaggacctgggcatccaggtggataggtacattgcctccgaggtgtgcgaggactccatcaccgtgggaatggtgcgtcatcagggcaagatcatgtacgtgggcgacgtgcggagcgtgacacagaagcatatccaggagtggggccctttcgacctggtgatcggcggcagcccttgcaatgacctgagcatcgtgaacccagcccggaagggcctgtacgagggaaccggcagactgttcttcgagttttacagactgctgcacgacgcccggcctaaggaaggcgacgaccggcccttcttttggctgttcgagaatgtggtggccatgggagtcagcgacaagcgggatattagccggttcctggagagcaaccccgtgatgatcgatgccaaggaagtgagcgccgcccaccgggccagatacttctggggcaatctgcctggcatgaacagacccctggccagcaccgtgaacgacaagctggagctgcaggagtgcctggagcacggccggatcgccaagttcagcaaggtgagaaccatcaccacccgaagcaacagcatcaaacaaggcaaggaccagcactttcctgtgttcatgaacgagaaggaggacatcctgtggtgtaccgagatggagagagtgttcgggttcccagtccactacacagatgtcagcaacatgtctagactggccagacagagactgctgggaagaagctggtccgtccctgtgatcagacacctgttcgcccctctgaaggagtacttcgcctgcgtgagcagcggcaacagcaacgccaacagccggggccccagcttctctagcggcctggtgccactgtccctgagagggagccacatgggccccatggagatctacaaaaccgtgagcgcctggaagcggcagcctgtgcgcgtgctgagcctgtttcggaatatcgataaagtcctgaaaagcctgggattcctggagagcggctctggctccggcggtggcaccctgaagtacgtggaggatgtgacaaacgtggtcagacgggatgtggagaagtggggccccttcgatctggtgtacggcagcacccaacccctgggcagctcttgtgaccggtgccctggctggtacatgtttcagttccaccggatcctgcagtacgccctgccgagacaggagtcccagcggccattcttttggattttcatggacaacttgctgctgaccgaggatgaccaggaaactaccactcggttcctgcagaccgaagccgtgaccctgcaggacgtgagaggccgggactaccagaacgccatgcgggtgtggtccaacatccctggactgaaaagcaagcacgcacctctgacccctaaagaagaggagtacctgcaggcccaggtgcggagcagaagcaagctggacgcccctaaggtggatctgctggtgaagaattgcctcctgcccctgagagagtacttcaagtatttcagccagaatagtctgcccctgggcggcccaagcagcggcgcccctcctcccagcggcggcagcccagccggctccccaacctctaccgaggagggcacctctgagtccgccacccccgagagcggccctggcacctccaccgagcccagcgagggcagcgcacccggcagccctgccggcagccccacctccacagaggagggaaccagcaccgagcccagcgaaggcagcgccccaggcaccagcaccgagcctagtgagggcggctctggcggcggcagcgcccaggagattaaacggatcaacaagatcagaagaagacttgtgaaagacagcaacaccaagaaggccggcaagacaggccccatgaaaaccctgctggttagagtgatgacacccgatctgagagagcggctggaaaacctgagaaagaagcctgaaaatatcccccagcccatcagcaatacatctagagccaacctgaataagctgctgaccgattacaccgaaatgaagaaggcgatcctgcatgtgtactgggaagagttccagaaggaccctgtgggcctgatgagccgggtggcccagcctgccagcaagaagatcgatcagaacaagctgaaacctgagatggacgagaagggcaacctgaccaccgccggctttgcctgctctcagtgtggccagcccctgttcgtgtacaagctggagcaggtgtctgagaagggcaaggcttacaccaactacttcggacggtgcaatgtggccgagcacgaaaagctgatcctgctggcccagctgaagcccgagaaggatagcgacgaagccgtgacatatagcctgggaaagtttgggcagagggccctggatttctacagcattcatgtgaccaaggagtccacccaccccgtgaagcccctggcccagatcgccggaaacagatacgcctccggacctgtgggaaaggccctgagcgacgcatgtatgggcacaatcgcctccttcctgtctaagtaccaggacatcatcatcgaacaccagaaggtggtgaagggcaaccagaagagactggagagcctgcgggagctggccggcaaggaaaacctggaataccctagcgtgaccctgccacctcagcctcacaccaaggagggcgttgatgcctacaacgaagtgatcgcccgggtgcgaatgtgggtgaacctgaacctgtggcagaagctgaagctaagcagagatgatgccaagcctctgctgagactgaagggattcccttcctttcctctggtcgagagacaggccaacgaagtggactggtgggacatggtgtgtaacgtgaagaagctgatcaacgagaaaaaggaggatggcaaggtgttttggcagaatctggctggctacaagagacaggaagccctgagaccatacctgagcagcgaggaagatcggaagaagggaaagaaattcgctcggtaccagctgggcgacctgctgctgcacctggaaaagaagcacggcgaggactggggaaaggtgtacgacgaggcctgggagcggattgacaagaaagtggaaggcctgagcaagcacatcaagctggaagaggaacggagaagcgaggacgcccagagcaaggccgccctgaccgactggctgcgggctaaggccagcttcgtgatcgagggcctgaaggaggccgacaaggacgagttctgcagatgcgagctgaagctgcagaagtggtacggggacctgcggggaaagcccttcgccatcgaagccgagaacagcatcctggacatcagcggcttcagcaagcagtacaactgtgccttcatctggcagaaggacggcgtgaagaagctgaacctgtacctgatcatcaactacttcaagggcggcaagctgcggttcaagaagatcaaacctgaagccttcgaagccaacagattctacaccgtgatcaacaaaaagagcggcgagatcgtgcccatggaggtgaacttcaacttcgacgaccccaacctgatcatcctgcctctggcctttggcaagagacagggcagagaattcatctggaacgacctgctgtccctggaaaccggcagcctgaagctggccaacggaagagtgatcgagaagacactgtacaacagaagaacccggcaggatgagcctgccctgttcgtggccctgaccttcgagcggcgggaggtcctggactcctccaatatcaaaccaatgaacctgatcggcgtggcaagaggcgaaaacatccccgccgtgatcgccctgaccgaccccgagggctgcccactgagccggtttaaggatagcctgggaaacccaacccacatcctgagaatcggcgagagctataaggagaagcagcggaccatccaggccaagaaggaggtggagcagcggagagccggcggctacagccggaagtacgccagcaaagccaagaatctggcagacgatatggtgagaaacaccgctagagatctgctgtactacgccgtgacccaggatgccatgctgatcttcgccaacctgagccggggcttcggccggcagggcaagcggaccttcatggccgagagacagtacacacggatggaggactggctgaccgccaagctggcctacgagggcctgagcaagacctacctgtccaagacactggcccagtacacctccaagacatgcagcaactgtgggtttaccatcaccagcgccgactacgacagggtgctggagaagctgaagaagacagcaacaggctggatgaccacaattaacggcaaggagctgaaggtggagggccagattacctactacaacagatacaagagacagaacgtagtcaaggacctgtccgtcgagctggatagactgagcgaagaatctgtgaacaacgacatctcctcctggacaaagggcagaagcggagaagctctgagcctcctgaagaaaagattctcccatagacccgtgcaggagaagttcgtgtgcctgaactgcggcttcgagacacacgcagccgagcaagccgccctgaacatcgccagatcctggctgttcctgcggagccaggagtacaagaaataccagacaaacaagacaaccggcaacaccgataagagagccttcgtcgagacctggcagtccttttaccggaagaagcttaaggaggtgtggaaacctgccgtgcggtctggcggatctggcggaggctccacaagcttccaggagagcgtgaccttcaaggacgtgaccgtgaacttcacccaggaggagtgggagcagctgaaccccgcccagagggagctgtacagggacgtgatgctggagaactacaggaacctgatcagcctgggcctgcccatcagcaagcccgacgtgatcttccagctggagcagggccaggagccctggatgctggacgtgcagggcaccgagaggcaggccgtgcccaggagcaccagcaccagccccaagaaaaagagaaaagtctaagctgccttctgcggggcttgccttctggccatgcccttcttctctcccttgcacctgtacctcttggtctttgaataaagcctgagtaggaaggctagcaaaaaaaaaaaaaaaaaaaaaaaaaaaaaaaaaaaaaaaaaaaaaaaaaaaaaaaaaaaaaaaaaaaaaaaaaaaaaaaa

SEQ ID NO: 6473 - RNA, 5797 nt, synthetic construct
  source 1..5797: mol_type = other RNA
aggaaataagagagaaaagaagagtaagaagaaatataagagccaccatggcccctaagaagaagcgtaaagtgagccggatggaacgcctcgtctacgaggtgcggcagaagtgcagaaacatcgaggacatctgcatctcctgcggatctctgaacgtgaccctggagcacccactgttcatcggcggcatgtgccagaactgtaaaaactgttttctggagtgtgcctatcaatacgacgatgacggctaccagagctactgcaccatctgttgcggcggaagagaggtgctgatgtgtggaaataacaactgctgccggtgcttctgcgtggaatgcgtggacctgctggtgggccccggcgccgcccaggccgctattaaggaagatccttggaactgctacatgtgcggccacaagggcacatacggcctgctgagacggagagaggactggcctagcagactgcagatgttcttcgccaataaccacgaccaggagttcgacccccctaaggtgtaccctcccgtccccgccgagaagagaaagcccatccgggtcctgagcctgttcgatggcatcgccaccggtctgctggtgctgaaggacctgggcatccaggtggataggtacattgcctccgaggtgtgcgaggactccatcaccgtgggaatggtgcgtcatcagggcaagatcatgtacgtgggcgacgtgcggagcgtgacacagaagcatatccaggagtggggccctttcgacctggtgatcggcggcagcccttgcaatgacctgagcatcgtgaacccagcccggaagggcctgtacgagggaaccggcagactgttcttcgagttttacagactgctgcacgacgcccggcctaaggaaggcgacgaccggcccttcttttggctgttcgagaatgtggtggccatgggagtcagcgacaagcgggatattagccggttcctggagagcaaccccgtgatgatcgatgccaaggaagtgagcgccgcccaccgggccagatacttctggggcaatctgcctggcatgaacagacccctggccagcaccgtgaacgacaagctggagctgcaggagtgcctggagcacggccggatcgccaagttcagcaaggtgagaaccatcaccacccgaagcaacagcatcaaacaaggcaaggaccagcactttcctgtgttcatgaacgagaaggaggacatcctgtggtgtaccgagatggagagagtgttcgggttcccagtccactacacagatgtcagcaacatgtctagactggccagacagagactgctgggaagaagctggtccgtccctgtgatcagacacctgttcgcccctctgaaggagtacttcgcctgcgtgagcagcggcaacagcaacgccaacagccggggccccagcttctctagcggcctggtgccactgtccctgagagggagccacatgggccccatggagatctacaaaaccgtgagcgcctggaagcggcagcctgtgcgcgtgctgagcctgtttcggaatatcgataaagtcctgaaaagcctgggattcctggagagcggctctggctccggcggtggcaccctgaagtacgtggaggatgtgacaaacgtggtcagacgggatgtggagaagtggggccccttcgatctggtgtacggcagcacccaacccctgggcagctcttgtgaccggtgccctggctggtacatgtttcagttccaccggatcctgcagtacgccctgccgagacaggagtcccagcggccattcttttggattttcatggacaacttgctgctgaccgaggatgaccaggaaactaccactcggttcctgcagaccgaagccgtgaccctgcaggacgtgagaggccgggactaccagaacgccatgcgggtgtggtccaacatccctggactgaaaagcaagcacgcacctctgacccctaaagaagaggagtacctgcaggcccaggtgcggagcagaagcaagctggacgcccctaaggtggatctgctggtgaagaattgcctcctgcccctgagagagtacttcaagtatttcagccagaatagtctgcccctgggcggcccaagcagcggcgcccctcctcccagcggcggcagcccagccggctccccaacctctaccgaggagggcacctctgagtccgccacccccgagagcggccctggcacctccaccgagcccagcgagggcagcgcacccggcagccctgccggcagccccacctccacagaggagggaaccagcaccgagcccagcgaaggcagcgccccaggcaccagcaccgagcctagtgagggcggctctggcggcggcagcgcccaggagattaaacggatcaacaagatcagaagaagacttgtgaaagacagcaacaccaagaaggccggcaagacaggccccatgaaaaccctgctggttagagtgatgacacccgatctgagagagcggctggaaaacctgagaaagaagcctgaaaatatcccccagcccatcagcaatacatctagagccaacctgaataagctgctgaccgattacaccgaaatgaagaaggcgatcctgcatgtgtactgggaagagttccagaaggaccctgtgggcctgatgagccgggtggcccagcctgccagcaagaagatcgatcagaacaagctgaaacctgagatggacgagaagggcaacctgaccaccgccggctttgcctgctctcagtgtggccagcccctgttcgtgtacaagctggagcaggtgtctgagaagggcaaggcttacaccaactacttcggacggtgcaatgtggccgagcacgaaaagctgatcctgctggcccagctgaagcccgagaaggatagcgacgaagccgtgacatatagcctgggaaagtttgggcagagggccctggatttctacagcattcatgtgaccaaggagtccacccaccccgtgaagcccctggcccagatcgccggaaacagatacgcctccggacctgtgggaaaggccctgagcgacgcatgtatgggcacaatcgcctccttcctgtctaagtaccaggacatcatcatcgaacaccagaaggtggtgaagggcaaccagaagagactggagagcctgcgggagctggccggcaaggaaaacctggaataccctagcgtgaccctgccacctcagcctcacaccaaggagggcgttgatgcctacaacgaagtgatcgcccgggtgcgaatgtgggtgaacctgaacctgtggcagaagctgaagctaagcagagatgatgccaagcctctgctgagactgaagggattcccttcctttcctctggtcgagagacaggccaacgaagtggactggtgggacatggtgtgtaacgtgaagaagctgatcaacgagaaaaaggaggatggcaaggtgttttggcagaatctggctggctacaagagacaggaagccctgagaccatacctgagcagcgaggaagatcggaagaagggaaagaaattcgctcggtaccagctgggcgacctgctgctgcacctggaaaagaagcacggcgaggactggggaaaggtgtacgacgaggcctgggagcggattgacaagaaagtggaaggcctgagcaagcacatcaagctggaagaggaacggagaagcgaggacgcccagagcaaggccgccctgaccgactggctgcgggctaaggccagcttcgtgatcgagggcctgaaggaggccgacaaggacgagttctgcagatgcgagctgaagctgcagaagtggtacggggacctgcggggaaagcccttcgccatcgaagccgagaacagcatcctggacatcagcggcttcagcaagcagtacaactgtgccttcatctggcagaaggacggcgtgaagaagctgaacctgtacctgatcatcaactacttcaagggcggcaagctgcggttcaagaagatcaaacctgaagccttcgaagccaacagattctacaccgtgatcaacaaaaagagcggcgagatcgtgcccatggaggtgaacttcaacttcgacgaccccaacctgatcatcctgcctctggcctttggcaagagacagggcagagaattcatctggaacgacctgctgtccctggaaaccggcagcctgaagctggccaacggaagagtgatcgagaagacactgtacaacagaagaacccggcaggatgagcctgccctgttcgtggccctgaccttcgagcggcgggaggtcctggactcctccaatatcaaaccaatgaacctgatcggcgtggcaagaggcgaaaacatccccgccgtgatcgccctgaccgaccccgagggctgcccactgagccggtttaaggatagcctgggaaacccaacccacatcctgagaatcggcgagagctataaggagaagcagcggaccatccaggccaagaaggaggtggagcagcggagagccggcggctacagccggaagtacgccagcaaagccaagaatctggcagacgatatggtgagaaacaccgctagagatctgctgtactacgccgtgacccaggatgccatgctgatcttcgccaacctgagccggggcttcggccggcagggcaagcggaccttcatggccgagagacagtacacacggatggaggactggctgaccgccaagctggcctacgagggcctgagcaagacctacctgtccaagacactggcccagtacacctccaagacatgcagcaactgtgggtttaccatcaccagcgccgactacgacagggtgctggagaagctgaagaagacagcaacaggctggatgaccacaattaacggcaaggagctgaaggtggagggccagattacctactacaacagatacaagagacagaacgtagtcaaggacctgtccgtcgagctggatagactgagcgaagaatctgtgaacaacgacatctcctcctggacaaagggcagaagcggagaagctctgagcctcctgaagaaaagattctcccatagacccgtgcaggagaagttcgtgtgcctgaactgcggcttcgagacacacgcagccgagcaagccgccctgaacatcgccagatcctggctgttcctgcggagccaggagtacaagaaataccagacaaacaagacaaccggcaacaccgataagagagccttcgtcgagacctggcagtccttttaccggaagaagcttaaggaggtgtggaaacctgccgtgcggtctggcggatctggcggaggctccacaagcgtggccttcgaggacgtggccgtgtacttcaccgccgaggagtgggacctgctgggccccaaccagaagagcctgtacagcgaggtgatgatggagaactacgagaacgtgagctacctggccgacaactggaagaagaccatcgccttcgcccacagccagaaggacttcatccacaagctgcaccagaggacccacaaggaggacgagcaccacaccagggccgagccctgcgagagcaccaccagccccaagaaaaagagaaaagtctaagctgccttctgcggggcttgccttctggccatgcccttcttctctcccttgcacctgtacctcttggtctttgaataaagcctgagtaggaaggctagcaaaaaaaaaaaaaaaaaaaaaaaaaaaaaaaaaaaaaaaaaaaaaaaaaaaaaaaaaaaaaaaaaaaaaaaaaaaaaaaa

SEQ ID NO: 6474 - RNA, 5797 nt, synthetic construct
  source 1..5797: mol_type = other RNA
aggaaataagagagaaaagaagagtaagaagaaatataagagccaccatggcccctaagaagaagcgtaaagtgagccggatggaacgcctcgtctacgaggtgcggcagaagtgcagaaacatcgaggacatctgcatctcctgcggatctctgaacgtgaccctggagcacccactgttcatcggcggcatgtgccagaactgtaaaaactgttttctggagtgtgcctatcaatacgacgatgacggctaccagagctactgcaccatctgttgcggcggaagagaggtgctgatgtgtggaaataacaactgctgccggtgcttctgcgtggaatgcgtggacctgctggtgggccccggcgccgcccaggccgctattaaggaagatccttggaactgctacatgtgcggccacaagggcacatacggcctgctgagacggagagaggactggcctagcagactgcagatgttcttcgccaataaccacgaccaggagttcgacccccctaaggtgtaccctcccgtccccgccgagaagagaaagcccatccgggtcctgagcctgttcgatggcatcgccaccggtctgctggtgctgaaggacctgggcatccaggtggataggtacattgcctccgaggtgtgcgaggactccatcaccgtgggaatggtgcgtcatcagggcaagatcatgtacgtgggcgacgtgcggagcgtgacacagaagcatatccaggagtggggccctttcgacctggtgatcggcggcagcccttgcaatgacctgagcatcgtgaacccagcccggaagggcctgtacgagggaaccggcagactgttcttcgagttttacagactgctgcacgacgcccggcctaaggaaggcgacgaccggcccttcttttggctgttcgagaatgtggtggccatgggagtcagcgacaagcgggatattagccggttcctggagagcaaccccgtgatgatcgatgccaaggaagtgagcgccgcccaccgggccagatacttctggggcaatctgcctggcatgaacagacccctggccagcaccgtgaacgacaagctggagctgcaggagtgcctggagcacggccggatcgccaagttcagcaaggtgagaaccatcaccacccgaagcaacagcatcaaacaaggcaaggaccagcactttcctgtgttcatgaacgagaaggaggacatcctgtggtgtaccgagatggagagagtgttcgggttcccagtccactacacagatgtcagcaacatgtctagactggccagacagagactgctgggaagaagctggtccgtccctgtgatcagacacctgttcgcccctctgaaggagtacttcgcctgcgtgagcagcggcaacagcaacgccaacagccggggccccagcttctctagcggcctggtgccactgtccctgagagggagccacatgggccccatggagatctacaaaaccgtgagcgcctggaagcggcagcctgtgcgcgtgctgagcctgtttcggaatatcgataaagtcctgaaaagcctgggattcctggagagcggctctggctccggcggtggcaccctgaagtacgtggaggatgtgacaaacgtggtcagacgggatgtggagaagtggggccccttcgatctggtgtacggcagcacccaacccctgggcagctcttgtgaccggtgccctggctggtacatgtttcagttccaccggatcctgcagtacgccctgccgagacaggagtcccagcggccattcttttggattttcatggacaacttgctgctgaccgaggatgaccaggaaactaccactcggttcctgcagaccgaagccgtgaccctgcaggacgtgagaggccgggactaccagaacgccatgcgggtgtggtccaacatccctggactgaaaagcaagcacgcacctctgacccctaaagaagaggagtacctgcaggcccaggtgcggagcagaagcaagctggacgcccctaaggtggatctgctggtgaagaattgcctcctgcccctgagagagtacttcaagtatttcagccagaatagtctgcccctgggcggcccaagcagcggcgcccctcctcccagcggcggcagcccagccggctccccaacctctaccgaggagggcacctctgagtccgccacccccgagagcggccctggcacctccaccgagcccagcgagggcagcgcacccggcagccctgccggcagccccacctccacagaggagggaaccagcaccgagcccagcgaaggcagcgccccaggcaccagcaccgagcctagtgagggcggctctggcggcggcagcgcccaggagattaaacggatcaacaagatcagaagaagacttgtgaaagacagcaacaccaagaaggccggcaagacaggccccatgaaaaccctgctggttagagtgatgacacccgatctgagagagcggctggaaaacctgagaaagaagcctgaaaatatcccccagcccatcagcaatacatctagagccaacctgaataagctgctgaccgattacaccgaaatgaagaaggcgatcctgcatgtgtactgggaagagttccagaaggaccctgtgggcctgatgagccgggtggcccagcctgccagcaagaagatcgatcagaacaagctgaaacctgagatggacgagaagggcaacctgaccaccgccggctttgcctgctctcagtgtggccagcccctgttcgtgtacaagctggagcaggtgtctgagaagggcaaggcttacaccaactacttcggacggtgcaatgtggccgagcacgaaaagctgatcctgctggcccagctgaagcccgagaaggatagcgacgaagccgtgacatatagcctgggaaagtttgggcagagggccctggatttctacagcattcatgtgaccaaggagtccacccaccccgtgaagcccctggcccagatcgccggaaacagatacgcctccggacctgtgggaaaggccctgagcgacgcatgtatgggcacaatcgcctccttcctgtctaagtaccaggacatcatcatcgaacaccagaaggtggtgaagggcaaccagaagagactggagagcctgcgggagctggccggcaaggaaaacctggaataccctagcgtgaccctgccacctcagcctcacaccaaggagggcgttgatgcctacaacgaagtgatcgcccgggtgcgaatgtgggtgaacctgaacctgtggcagaagctgaagctaagcagagatgatgccaagcctctgctgagactgaagggattcccttcctttcctctggtcgagagacaggccaacgaagtggactggtgggacatggtgtgtaacgtgaagaagctgatcaacgagaaaaaggaggatggcaaggtgttttggcagaatctggctggctacaagagacaggaagccctgagaccatacctgagcagcgaggaagatcggaagaagggaaagaaattcgctcggtaccagctgggcgacctgctgctgcacctggaaaagaagcacggcgaggactggggaaaggtgtacgacgaggcctgggagcggattgacaagaaagtggaaggcctgagcaagcacatcaagctggaagaggaacggagaagcgaggacgcccagagcaaggccgccctgaccgactggctgcgggctaaggccagcttcgtgatcgagggcctgaaggaggccgacaaggacgagttctgcagatgcgagctgaagctgcagaagtggtacggggacctgcggggaaagcccttcgccatcgaagccgagaacagcatcctggacatcagcggcttcagcaagcagtacaactgtgccttcatctggcagaaggacggcgtgaagaagctgaacctgtacctgatcatcaactacttcaagggcggcaagctgcggttcaagaagatcaaacctgaagccttcgaagccaacagattctacaccgtgatcaacaaaaagagcggcgagatcgtgcccatggaggtgaacttcaacttcgacgaccccaacctgatcatcctgcctctggcctttggcaagagacagggcagagaattcatctggaacgacctgctgtccctggaaaccggcagcctgaagctggccaacggaagagtgatcgagaagacactgtacaacagaagaacccggcaggatgagcctgccctgttcgtggccctgaccttcgagcggcgggaggtcctggactcctccaatatcaaaccaatgaacctgatcggcgtggcaagaggcgaaaacatccccgccgtgatcgccctgaccgaccccgagggctgcccactgagccggtttaaggatagcctgggaaacccaacccacatcctgagaatcggcgagagctataaggagaagcagcggaccatccaggccaagaaggaggtggagcagcggagagccggcggctacagccggaagtacgccagcaaagccaagaatctggcagacgatatggtgagaaacaccgctagagatctgctgtactacgccgtgacccaggatgccatgctgatcttcgccaacctgagccggggcttcggccggcagggcaagcggaccttcatggccgagagacagtacacacggatggaggactggctgaccgccaagctggcctacgagggcctgagcaagacctacctgtccaagacactggcccagtacacctccaagacatgcagcaactgtgggtttaccatcaccagcgccgactacgacagggtgctggagaagctgaagaagacagcaacaggctggatgaccacaattaacggcaaggagctgaaggtggagggccagattacctactacaacagatacaagagacagaacgtagtcaaggacctgtccgtcgagctggatagactgagcgaagaatctgtgaacaacgacatctcctcctggacaaagggcagaagcggagaagctctgagcctcctgaagaaaagattctcccatagacccgtgcaggagaagttcgtgtgcctgaactgcggcttcgagacacacgcagccgagcaagccgccctgaacatcgccagatcctggctgttcctgcggagccaggagtacaagaaataccagacaaacaagacaaccggcaacaccgataagagagccttcgtcgagacctggcagtccttttaccggaagaagcttaaggaggtgtggaaacctgccgtgcggtctggcggatctggcggaggctccacaagccagcagaggcccgtgagcttcaaggacgtggtggtgggcttcacccaggaggagtggaggaggctgaaccccgcccagagggccctgtacagggacgtgatgctggagacctacagcaacctggtgagcgtgggctacgagggcaccaagcccgacgtgatcctgaggctggagcaggaggaggccccctggatctgcgaggccgtgtgccccggctgccactgccaggaggacttcctgagcaccagccccaagaaaaagagaaaagtctaagctgccttctgcggggcttgccttctggccatgcccttcttctctcccttgcacctgtacctcttggtctttgaataaagcctgagtaggaaggctagcaaaaaaaaaaaaaaaaaaaaaaaaaaaaaaaaaaaaaaaaaaaaaaaaaaaaaaaaaaaaaaaaaaaaaaaaaaaaaaaa

SEQ ID NO: 6475 - RNA, 5797 nt, synthetic construct
  source 1..5797: mol_type = other RNA
aggaaataagagagaaaagaagagtaagaagaaatataagagccaccatggcccctaagaagaagcgtaaagtgagccggatggaacgcctcgtctacgaggtgcggcagaagtgcagaaacatcgaggacatctgcatctcctgcggatctctgaacgtgaccctggagcacccactgttcatcggcggcatgtgccagaactgtaaaaactgttttctggagtgtgcctatcaatacgacgatgacggctaccagagctactgcaccatctgttgcggcggaagagaggtgctgatgtgtggaaataacaactgctgccggtgcttctgcgtggaatgcgtggacctgctggtgggccccggcgccgcccaggccgctattaaggaagatccttggaactgctacatgtgcggccacaagggcacatacggcctgctgagacggagagaggactggcctagcagactgcagatgttcttcgccaataaccacgaccaggagttcgacccccctaaggtgtaccctcccgtccccgccgagaagagaaagcccatccgggtcctgagcctgttcgatggcatcgccaccggtctgctggtgctgaaggacctgggcatccaggtggataggtacattgcctccgaggtgtgcgaggactccatcaccgtgggaatggtgcgtcatcagggcaagatcatgtacgtgggcgacgtgcggagcgtgacacagaagcatatccaggagtggggccctttcgacctggtgatcggcggcagcccttgcaatgacctgagcatcgtgaacccagcccggaagggcctgtacgagggaaccggcagactgttcttcgagttttacagactgctgcacgacgcccggcctaaggaaggcgacgaccggcccttcttttggctgttcgagaatgtggtggccatgggagtcagcgacaagcgggatattagccggttcctggagagcaaccccgtgatgatcgatgccaaggaagtgagcgccgcccaccgggccagatacttctggggcaatctgcctggcatgaacagacccctggccagcaccgtgaacgacaagctggagctgcaggagtgcctggagcacggccggatcgccaagttcagcaaggtgagaaccatcaccacccgaagcaacagcatcaaacaaggcaaggaccagcactttcctgtgttcatgaacgagaaggaggacatcctgtggtgtaccgagatggagagagtgttcgggttcccagtccactacacagatgtcagcaacatgtctagactggccagacagagactgctgggaagaagctggtccgtccctgtgatcagacacctgttcgcccctctgaaggagtacttcgcctgcgtgagcagcggcaacagcaacgccaacagccggggccccagcttctctagcggcctggtgccactgtccctgagagggagccacatgggccccatggagatctacaaaaccgtgagcgcctggaagcggcagcctgtgcgcgtgctgagcctgtttcggaatatcgataaagtcctgaaaagcctgggattcctggagagcggctctggctccggcggtggcaccctgaagtacgtggaggatgtgacaaacgtggtcagacgggatgtggagaagtggggccccttcgatctggtgtacggcagcacccaacccctgggcagctcttgtgaccggtgccctggctggtacatgtttcagttccaccggatcctgcagtacgccctgccgagacaggagtcccagcggccattcttttggattttcatggacaacttgctgctgaccgaggatgaccaggaaactaccactcggttcctgcagaccgaagccgtgaccctgcaggacgtgagaggccgggactaccagaacgccatgcgggtgtggtccaacatccctggactgaaaagcaagcacgcacctctgacccctaaagaagaggagtacctgcaggcccaggtgcggagcagaagcaagctggacgcccctaaggtggatctgctggtgaagaattgcctcctgcccctgagagagtacttcaagtatttcagccagaatagtctgcccctgggcggcccaagcagcggcgcccctcctcccagcggcggcagcccagccggctccccaacctctaccgaggagggcacctctgagtccgccacccccgagagcggccctggcacctccaccgagcccagcgagggcagcgcacccggcagccctgccggcagccccacctccacagaggagggaaccagcaccgagcccagcgaaggcagcgccccaggcaccagcaccgagcctagtgagggcggctctggcggcggcagcgcccaggagattaaacggatcaacaagatcagaagaagacttgtgaaagacagcaacaccaagaaggccggcaagacaggccccatgaaaaccctgctggttagagtgatgacacccgatctgagagagcggctggaaaacctgagaaagaagcctgaaaatatcccccagcccatcagcaatacatctagagccaacctgaataagctgctgaccgattacaccgaaatgaagaaggcgatcctgcatgtgtactgggaagagttccagaaggaccctgtgggcctgatgagccgggtggcccagcctgccagcaagaagatcgatcagaacaagctgaaacctgagatggacgagaagggcaacctgaccaccgccggctttgcctgctctcagtgtggccagcccctgttcgtgtacaagctggagcaggtgtctgagaagggcaaggcttacaccaactacttcggacggtgcaatgtggccgagcacgaaaagctgatcctgctggcccagctgaagcccgagaaggatagcgacgaagccgtgacatatagcctgggaaagtttgggcagagggccctggatttctacagcattcatgtgaccaaggagtccacccaccccgtgaagcccctggcccagatcgccggaaacagatacgcctccggacctgtgggaaaggccctgagcgacgcatgtatgggcacaatcgcctccttcctgtctaagtaccaggacatcatcatcgaacaccagaaggtggtgaagggcaaccagaagagactggagagcctgcgggagctggccggcaaggaaaacctggaataccctagcgtgaccctgccacctcagcctcacaccaaggagggcgttgatgcctacaacgaagtgatcgcccgggtgcgaatgtgggtgaacctgaacctgtggcagaagctgaagctaagcagagatgatgccaagcctctgctgagactgaagggattcccttcctttcctctggtcgagagacaggccaacgaagtggactggtgggacatggtgtgtaacgtgaagaagctgatcaacgagaaaaaggaggatggcaaggtgttttggcagaatctggctggctacaagagacaggaagccctgagaccatacctgagcagcgaggaagatcggaagaagggaaagaaattcgctcggtaccagctgggcgacctgctgctgcacctggaaaagaagcacggcgaggactggggaaaggtgtacgacgaggcctgggagcggattgacaagaaagtggaaggcctgagcaagcacatcaagctggaagaggaacggagaagcgaggacgcccagagcaaggccgccctgaccgactggctgcgggctaaggccagcttcgtgatcgagggcctgaaggaggccgacaaggacgagttctgcagatgcgagctgaagctgcagaagtggtacggggacctgcggggaaagcccttcgccatcgaagccgagaacagcatcctggacatcagcggcttcagcaagcagtacaactgtgccttcatctggcagaaggacggcgtgaagaagctgaacctgtacctgatcatcaactacttcaagggcggcaagctgcggttcaagaagatcaaacctgaagccttcgaagccaacagattctacaccgtgatcaacaaaaagagcggcgagatcgtgcccatggaggtgaacttcaacttcgacgaccccaacctgatcatcctgcctctggcctttggcaagagacagggcagagaattcatctggaacgacctgctgtccctggaaaccggcagcctgaagctggccaacggaagagtgatcgagaagacactgtacaacagaagaacccggcaggatgagcctgccctgttcgtggccctgaccttcgagcggcgggaggtcctggactcctccaatatcaaaccaatgaacctgatcggcgtggcaagaggcgaaaacatccccgccgtgatcgccctgaccgaccccgagggctgcccactgagccggtttaaggatagcctgggaaacccaacccacatcctgagaatcggcgagagctataaggagaagcagcggaccatccaggccaagaaggaggtggagcagcggagagccggcggctacagccggaagtacgccagcaaagccaagaatctggcagacgatatggtgagaaacaccgctagagatctgctgtactacgccgtgacccaggatgccatgctgatcttcgccaacctgagccggggcttcggccggcagggcaagcggaccttcatggccgagagacagtacacacggatggaggactggctgaccgccaagctggcctacgagggcctgagcaagacctacctgtccaagacactggcccagtacacctccaagacatgcagcaactgtgggtttaccatcaccagcgccgactacgacagggtgctggagaagctgaagaagacagcaacaggctggatgaccacaattaacggcaaggagctgaaggtggagggccagattacctactacaacagatacaagagacagaacgtagtcaaggacctgtccgtcgagctggatagactgagcgaagaatctgtgaacaacgacatctcctcctggacaaagggcagaagcggagaagctctgagcctcctgaagaaaagattctcccatagacccgtgcaggagaagttcgtgtgcctgaactgcggcttcgagacacacgcagccgagcaagccgccctgaacatcgccagatcctggctgttcctgcggagccaggagtacaagaaataccagacaaacaagacaaccggcaacaccgataagagagccttcgtcgagacctggcagtccttttaccggaagaagcttaaggaggtgtggaaacctgccgtgcggtctggcggatctggcggaggctccacaagcatggccttcagggacgtggccgtggacttcacccaggacgagtgggtgctgctgagccccgcccagaggagcctgtacagggaggtgatgctggagaactacagcaacctggtgagcctgggcatccccttcagcaagcccaagctgatcacccagctggagcagggcaaggagagctggagggaggagaggaagtgcagccccgtgagctgcctgggcgagtggggccactgggtggtgcagaccagccccaagaaaaagagaaaagtctaagctgccttctgcggggcttgccttctggccatgcccttcttctctcccttgcacctgtacctcttggtctttgaataaagcctgagtaggaaggctagcaaaaaaaaaaaaaaaaaaaaaaaaaaaaaaaaaaaaaaaaaaaaaaaaaaaaaaaaaaaaaaaaaaaaaaaaaaaaaaaa

SEQ ID NO: 6476 - RNA, 5797 nt, synthetic construct
  source 1..5797: mol_type = other RNA
aggaaataagagagaaaagaagagtaagaagaaatataagagccaccatggcccctaagaagaagcgtaaagtgagccggatggaacgcctcgtctacgaggtgcggcagaagtgcagaaacatcgaggacatctgcatctcctgcggatctctgaacgtgaccctggagcacccactgttcatcggcggcatgtgccagaactgtaaaaactgttttctggagtgtgcctatcaatacgacgatgacggctaccagagctactgcaccatctgttgcggcggaagagaggtgctgatgtgtggaaataacaactgctgccggtgcttctgcgtggaatgcgtggacctgctggtgggccccggcgccgcccaggccgctattaaggaagatccttggaactgctacatgtgcggccacaagggcacatacggcctgctgagacggagagaggactggcctagcagactgcagatgttcttcgccaataaccacgaccaggagttcgacccccctaaggtgtaccctcccgtccccgccgagaagagaaagcccatccgggtcctgagcctgttcgatggcatcgccaccggtctgctggtgctgaaggacctgggcatccaggtggataggtacattgcctccgaggtgtgcgaggactccatcaccgtgggaatggtgcgtcatcagggcaagatcatgtacgtgggcgacgtgcggagcgtgacacagaagcatatccaggagtggggccctttcgacctggtgatcggcggcagcccttgcaatgacctgagcatcgtgaacccagcccggaagggcctgtacgagggaaccggcagactgttcttcgagttttacagactgctgcacgacgcccggcctaaggaaggcgacgaccggcccttcttttggctgttcgagaatgtggtggccatgggagtcagcgacaagcgggatattagccggttcctggagagcaaccccgtgatgatcgatgccaaggaagtgagcgccgcccaccgggccagatacttctggggcaatctgcctggcatgaacagacccctggccagcaccgtgaacgacaagctggagctgcaggagtgcctggagcacggccggatcgccaagttcagcaaggtgagaaccatcaccacccgaagcaacagcatcaaacaaggcaaggaccagcactttcctgtgttcatgaacgagaaggaggacatcctgtggtgtaccgagatggagagagtgttcgggttcccagtccactacacagatgtcagcaacatgtctagactggccagacagagactgctgggaagaagctggtccgtccctgtgatcagacacctgttcgcccctctgaaggagtacttcgcctgcgtgagcagcggcaacagcaacgccaacagccggggccccagcttctctagcggcctggtgccactgtccctgagagggagccacatgggccccatggagatctacaaaaccgtgagcgcctggaagcggcagcctgtgcgcgtgctgagcctgtttcggaatatcgataaagtcctgaaaagcctgggattcctggagagcggctctggctccggcggtggcaccctgaagtacgtggaggatgtgacaaacgtggtcagacgggatgtggagaagtggggccccttcgatctggtgtacggcagcacccaacccctgggcagctcttgtgaccggtgccctggctggtacatgtttcagttccaccggatcctgcagtacgccctgccgagacaggagtcccagcggccattcttttggattttcatggacaacttgctgctgaccgaggatgaccaggaaactaccactcggttcctgcagaccgaagccgtgaccctgcaggacgtgagaggccgggactaccagaacgccatgcgggtgtggtccaacatccctggactgaaaagcaagcacgcacctctgacccctaaagaagaggagtacctgcaggcccaggtgcggagcagaagcaagctggacgcccctaaggtggatctgctggtgaagaattgcctcctgcccctgagagagtacttcaagtatttcagccagaatagtctgcccctgggcggcccaagcagcggcgcccctcctcccagcggcggcagcccagccggctccccaacctctaccgaggagggcacctctgagtccgccacccccgagagcggccctggcacctccaccgagcccagcgagggcagcgcacccggcagccctgccggcagccccacctccacagaggagggaaccagcaccgagcccagcgaaggcagcgccccaggcaccagcaccgagcctagtgagggcggctctggcggcggcagcgcccaggagattaaacggatcaacaagatcagaagaagacttgtgaaagacagcaacaccaagaaggccggcaagacaggccccatgaaaaccctgctggttagagtgatgacacccgatctgagagagcggctggaaaacctgagaaagaagcctgaaaatatcccccagcccatcagcaatacatctagagccaacctgaataagctgctgaccgattacaccgaaatgaagaaggcgatcctgcatgtgtactgggaagagttccagaaggaccctgtgggcctgatgagccgggtggcccagcctgccagcaagaagatcgatcagaacaagctgaaacctgagatggacgagaagggcaacctgaccaccgccggctttgcctgctctcagtgtggccagcccctgttcgtgtacaagctggagcaggtgtctgagaagggcaaggcttacaccaactacttcggacggtgcaatgtggccgagcacgaaaagctgatcctgctggcccagctgaagcccgagaaggatagcgacgaagccgtgacatatagcctgggaaagtttgggcagagggccctggatttctacagcattcatgtgaccaaggagtccacccaccccgtgaagcccctggcccagatcgccggaaacagatacgcctccggacctgtgggaaaggccctgagcgacgcatgtatgggcacaatcgcctccttcctgtctaagtaccaggacatcatcatcgaacaccagaaggtggtgaagggcaaccagaagagactggagagcctgcgggagctggccggcaaggaaaacctggaataccctagcgtgaccctgccacctcagcctcacaccaaggagggcgttgatgcctacaacgaagtgatcgcccgggtgcgaatgtgggtgaacctgaacctgtggcagaagctgaagctaagcagagatgatgccaagcctctgctgagactgaagggattcccttcctttcctctggtcgagagacaggccaacgaagtggactggtgggacatggtgtgtaacgtgaagaagctgatcaacgagaaaaaggaggatggcaaggtgttttggcagaatctggctggctacaagagacaggaagccctgagaccatacctgagcagcgaggaagatcggaagaagggaaagaaattcgctcggtaccagctgggcgacctgctgctgcacctggaaaagaagcacggcgaggactggggaaaggtgtacgacgaggcctgggagcggattgacaagaaagtggaaggcctgagcaagcacatcaagctggaagaggaacggagaagcgaggacgcccagagcaaggccgccctgaccgactggctgcgggctaaggccagcttcgtgatcgagggcctgaaggaggccgacaaggacgagttctgcagatgcgagctgaagctgcagaagtggtacggggacctgcggggaaagcccttcgccatcgaagccgagaacagcatcctggacatcagcggcttcagcaagcagtacaactgtgccttcatctggcagaaggacggcgtgaagaagctgaacctgtacctgatcatcaactacttcaagggcggcaagctgcggttcaagaagatcaaacctgaagccttcgaagccaacagattctacaccgtgatcaacaaaaagagcggcgagatcgtgcccatggaggtgaacttcaacttcgacgaccccaacctgatcatcctgcctctggcctttggcaagagacagggcagagaattcatctggaacgacctgctgtccctggaaaccggcagcctgaagctggccaacggaagagtgatcgagaagacactgtacaacagaagaacccggcaggatgagcctgccctgttcgtggccctgaccttcgagcggcgggaggtcctggactcctccaatatcaaaccaatgaacctgatcggcgtggcaagaggcgaaaacatccccgccgtgatcgccctgaccgaccccgagggctgcccactgagccggtttaaggatagcctgggaaacccaacccacatcctgagaatcggcgagagctataaggagaagcagcggaccatccaggccaagaaggaggtggagcagcggagagccggcggctacagccggaagtacgccagcaaagccaagaatctggcagacgatatggtgagaaacaccgctagagatctgctgtactacgccgtgacccaggatgccatgctgatcttcgccaacctgagccggggcttcggccggcagggcaagcggaccttcatggccgagagacagtacacacggatggaggactggctgaccgccaagctggcctacgagggcctgagcaagacctacctgtccaagacactggcccagtacacctccaagacatgcagcaactgtgggtttaccatcaccagcgccgactacgacagggtgctggagaagctgaagaagacagcaacaggctggatgaccacaattaacggcaaggagctgaaggtggagggccagattacctactacaacagatacaagagacagaacgtagtcaaggacctgtccgtcgagctggatagactgagcgaagaatctgtgaacaacgacatctcctcctggacaaagggcagaagcggagaagctctgagcctcctgaagaaaagattctcccatagacccgtgcaggagaagttcgtgtgcctgaactgcggcttcgagacacacgcagccgagcaagccgccctgaacatcgccagatcctggctgttcctgcggagccaggagtacaagaaataccagacaaacaagacaaccggcaacaccgataagagagccttcgtcgagacctggcagtccttttaccggaagaagcttaaggaggtgtggaaacctgccgtgcggtctggcggatctggcggaggctccacaagcgccgcccaggagctggtgaccttccaggacgtgttcgtggacttcagccaggaggagctgaacagcctgagcgccgcccagaggaggctgcacagggaggtgaccctggagaactacaggagcctggtgagcctgggctacaggttccccaagcccgacatcatcgcccagctggaggaggaggagagcagggccatggaggaggacggcgacaccaagaccggccccgactgggagaccggcaccagccccaagaaaaagagaaaagtctaagctgccttctgcggggcttgccttctggccatgcccttcttctctcccttgcacctgtacctcttggtctttgaataaagcctgagtaggaaggctagcaaaaaaaaaaaaaaaaaaaaaaaaaaaaaaaaaaaaaaaaaaaaaaaaaaaaaaaaaaaaaaaaaaaaaaaaaaaaaaaa

SEQ ID NO: 6477 - RNA, 5797 nt, synthetic construct
  source 1..5797: mol_type = other RNA
aggaaataagagagaaaagaagagtaagaagaaatataagagccaccatggcccctaagaagaagcgtaaagtgagccggatggaacgcctcgtctacgaggtgcggcagaagtgcagaaacatcgaggacatctgcatctcctgcggatctctgaacgtgaccctggagcacccactgttcatcggcggcatgtgccagaactgtaaaaactgttttctggagtgtgcctatcaatacgacgatgacggctaccagagctactgcaccatctgttgcggcggaagagaggtgctgatgtgtggaaataacaactgctgccggtgcttctgcgtggaatgcgtggacctgctggtgggccccggcgccgcccaggccgctattaaggaagatccttggaactgctacatgtgcggccacaagggcacatacggcctgctgagacggagagaggactggcctagcagactgcagatgttcttcgccaataaccacgaccaggagttcgacccccctaaggtgtaccctcccgtccccgccgagaagagaaagcccatccgggtcctgagcctgttcgatggcatcgccaccggtctgctggtgctgaaggacctgggcatccaggtggataggtacattgcctccgaggtgtgcgaggactccatcaccgtgggaatggtgcgtcatcagggcaagatcatgtacgtgggcgacgtgcggagcgtgacacagaagcatatccaggagtggggccctttcgacctggtgatcggcggcagcccttgcaatgacctgagcatcgtgaacccagcccggaagggcctgtacgagggaaccggcagactgttcttcgagttttacagactgctgcacgacgcccggcctaaggaaggcgacgaccggcccttcttttggctgttcgagaatgtggtggccatgggagtcagcgacaagcgggatattagccggttcctggagagcaaccccgtgatgatcgatgccaaggaagtgagcgccgcccaccgggccagatacttctggggcaatctgcctggcatgaacagacccctggccagcaccgtgaacgacaagctggagctgcaggagtgcctggagcacggccggatcgccaagttcagcaaggtgagaaccatcaccacccgaagcaacagcatcaaacaaggcaaggaccagcactttcctgtgttcatgaacgagaaggaggacatcctgtggtgtaccgagatggagagagtgttcgggttcccagtccactacacagatgtcagcaacatgtctagactggccagacagagactgctgggaagaagctggtccgtccctgtgatcagacacctgttcgcccctctgaaggagtacttcgcctgcgtgagcagcggcaacagcaacgccaacagccggggccccagcttctctagcggcctggtgccactgtccctgagagggagccacatgggccccatggagatctacaaaaccgtgagcgcctggaagcggcagcctgtgcgcgtgctgagcctgtttcggaatatcgataaagtcctgaaaagcctgggattcctggagagcggctctggctccggcggtggcaccctgaagtacgtggaggatgtgacaaacgtggtcagacgggatgtggagaagtggggccccttcgatctggtgtacggcagcacccaacccctgggcagctcttgtgaccggtgccctggctggtacatgtttcagttccaccggatcctgcagtacgccctgccgagacaggagtcccagcggccattcttttggattttcatggacaacttgctgctgaccgaggatgaccaggaaactaccactcggttcctgcagaccgaagccgtgaccctgcaggacgtgagaggccgggactaccagaacgccatgcgggtgtggtccaacatccctggactgaaaagcaagcacgcacctctgacccctaaagaagaggagtacctgcaggcccaggtgcggagcagaagcaagctggacgcccctaaggtggatctgctggtgaagaattgcctcctgcccctgagagagtacttcaagtatttcagccagaatagtctgcccctgggcggcccaagcagcggcgcccctcctcccagcggcggcagcccagccggctccccaacctctaccgaggagggcacctctgagtccgccacccccgagagcggccctggcacctccaccgagcccagcgagggcagcgcacccggcagccctgccggcagccccacctccacagaggagggaaccagcaccgagcccagcgaaggcagcgccccaggcaccagcaccgagcctagtgagggcggctctggcggcggcagcgcccaggagattaaacggatcaacaagatcagaagaagacttgtgaaagacagcaacaccaagaaggccggcaagacaggccccatgaaaaccctgctggttagagtgatgacacccgatctgagagagcggctggaaaacctgagaaagaagcctgaaaatatcccccagcccatcagcaatacatctagagccaacctgaataagctgctgaccgattacaccgaaatgaagaaggcgatcctgcatgtgtactgggaagagttccagaaggaccctgtgggcctgatgagccgggtggcccagcctgccagcaagaagatcgatcagaacaagctgaaacctgagatggacgagaagggcaacctgaccaccgccggctttgcctgctctcagtgtggccagcccctgttcgtgtacaagctggagcaggtgtctgagaagggcaaggcttacaccaactacttcggacggtgcaatgtggccgagcacgaaaagctgatcctgctggcccagctgaagcccgagaaggatagcgacgaagccgtgacatatagcctgggaaagtttgggcagagggccctggatttctacagcattcatgtgaccaaggagtccacccaccccgtgaagcccctggcccagatcgccggaaacagatacgcctccggacctgtgggaaaggccctgagcgacgcatgtatgggcacaatcgcctccttcctgtctaagtaccaggacatcatcatcgaacaccagaaggtggtgaagggcaaccagaagagactggagagcctgcgggagctggccggcaaggaaaacctggaataccctagcgtgaccctgccacctcagcctcacaccaaggagggcgttgatgcctacaacgaagtgatcgcccgggtgcgaatgtgggtgaacctgaacctgtggcagaagctgaagctaagcagagatgatgccaagcctctgctgagactgaagggattcccttcctttcctctggtcgagagacaggccaacgaagtggactggtgggacatggtgtgtaacgtgaagaagctgatcaacgagaaaaaggaggatggcaaggtgttttggcagaatctggctggctacaagagacaggaagccctgagaccatacctgagcagcgaggaagatcggaagaagggaaagaaattcgctcggtaccagctgggcgacctgctgctgcacctggaaaagaagcacggcgaggactggggaaaggtgtacgacgaggcctgggagcggattgacaagaaagtggaaggcctgagcaagcacatcaagctggaagaggaacggagaagcgaggacgcccagagcaaggccgccctgaccgactggctgcgggctaaggccagcttcgtgatcgagggcctgaaggaggccgacaaggacgagttctgcagatgcgagctgaagctgcagaagtggtacggggacctgcggggaaagcccttcgccatcgaagccgagaacagcatcctggacatcagcggcttcagcaagcagtacaactgtgccttcatctggcagaaggacggcgtgaagaagctgaacctgtacctgatcatcaactacttcaagggcggcaagctgcggttcaagaagatcaaacctgaagccttcgaagccaacagattctacaccgtgatcaacaaaaagagcggcgagatcgtgcccatggaggtgaacttcaacttcgacgaccccaacctgatcatcctgcctctggcctttggcaagagacagggcagagaattcatctggaacgacctgctgtccctggaaaccggcagcctgaagctggccaacggaagagtgatcgagaagacactgtacaacagaagaacccggcaggatgagcctgccctgttcgtggccctgaccttcgagcggcgggaggtcctggactcctccaatatcaaaccaatgaacctgatcggcgtggcaagaggcgaaaacatccccgccgtgatcgccctgaccgaccccgagggctgcccactgagccggtttaaggatagcctgggaaacccaacccacatcctgagaatcggcgagagctataaggagaagcagcggaccatccaggccaagaaggaggtggagcagcggagagccggcggctacagccggaagtacgccagcaaagccaagaatctggcagacgatatggtgagaaacaccgctagagatctgctgtactacgccgtgacccaggatgccatgctgatcttcgccaacctgagccggggcttcggccggcagggcaagcggaccttcatggccgagagacagtacacacggatggaggactggctgaccgccaagctggcctacgagggcctgagcaagacctacctgtccaagacactggcccagtacacctccaagacatgcagcaactgtgggtttaccatcaccagcgccgactacgacagggtgctggagaagctgaagaagacagcaacaggctggatgaccacaattaacggcaaggagctgaaggtggagggccagattacctactacaacagatacaagagacagaacgtagtcaaggacctgtccgtcgagctggatagactgagcgaagaatctgtgaacaacgacatctcctcctggacaaagggcagaagcggagaagctctgagcctcctgaagaaaagattctcccatagacccgtgcaggagaagttcgtgtgcctgaactgcggcttcgagacacacgcagccgagcaagccgccctgaacatcgccagatcctggctgttcctgcggagccaggagtacaagaaataccagacaaacaagacaaccggcaacaccgataagagagccttcgtcgagacctggcagtccttttaccggaagaagcttaaggaggtgtggaaacctgccgtgcggtctggcggatctggcggaggctccacaagcggcaagatgagcgtgaccttcgaggacgtggccctgtacttcagccccgaggagtgggccaagctgagcggctgccagaggcagctgtacagggaggtgatgctggagaactaccagatggtggccagcctgggctgggccaccgtgaagcccgagatcatctgcaagatggagagggaggagaccccctgcgtgctggacccccccggcgagcagcagatgcaccagagccccgtgcccgccaccagccccaagaaaaagagaaaagtctaagctgccttctgcggggcttgccttctggccatgcccttcttctctcccttgcacctgtacctcttggtctttgaataaagcctgagtaggaaggctagcaaaaaaaaaaaaaaaaaaaaaaaaaaaaaaaaaaaaaaaaaaaaaaaaaaaaaaaaaaaaaaaaaaaaaaaaaaaaaaaa

SEQ ID NO: 6478 - RNA, 5797 nt, synthetic construct
  source 1..5797: mol_type = other RNA
aggaaataagagagaaaagaagagtaagaagaaatataagagccaccatggcccctaagaagaagcgtaaagtgagccggatggaacgcctcgtctacgaggtgcggcagaagtgcagaaacatcgaggacatctgcatctcctgcggatctctgaacgtgaccctggagcacccactgttcatcggcggcatgtgccagaactgtaaaaactgttttctggagtgtgcctatcaatacgacgatgacggctaccagagctactgcaccatctgttgcggcggaagagaggtgctgatgtgtggaaataacaactgctgccggtgcttctgcgtggaatgcgtggacctgctggtgggccccggcgccgcccaggccgctattaaggaagatccttggaactgctacatgtgcggccacaagggcacatacggcctgctgagacggagagaggactggcctagcagactgcagatgttcttcgccaataaccacgaccaggagttcgacccccctaaggtgtaccctcccgtccccgccgagaagagaaagcccatccgggtcctgagcctgttcgatggcatcgccaccggtctgctggtgctgaaggacctgggcatccaggtggataggtacattgcctccgaggtgtgcgaggactccatcaccgtgggaatggtgcgtcatcagggcaagatcatgtacgtgggcgacgtgcggagcgtgacacagaagcatatccaggagtggggccctttcgacctggtgatcggcggcagcccttgcaatgacctgagcatcgtgaacccagcccggaagggcctgtacgagggaaccggcagactgttcttcgagttttacagactgctgcacgacgcccggcctaaggaaggcgacgaccggcccttcttttggctgttcgagaatgtggtggccatgggagtcagcgacaagcgggatattagccggttcctggagagcaaccccgtgatgatcgatgccaaggaagtgagcgccgcccaccgggccagatacttctggggcaatctgcctggcatgaacagacccctggccagcaccgtgaacgacaagctggagctgcaggagtgcctggagcacggccggatcgccaagttcagcaaggtgagaaccatcaccacccgaagcaacagcatcaaacaaggcaaggaccagcactttcctgtgttcatgaacgagaaggaggacatcctgtggtgtaccgagatggagagagtgttcgggttcccagtccactacacagatgtcagcaacatgtctagactggccagacagagactgctgggaagaagctggtccgtccctgtgatcagacacctgttcgcccctctgaaggagtacttcgcctgcgtgagcagcggcaacagcaacgccaacagccggggccccagcttctctagcggcctggtgccactgtccctgagagggagccacatgggccccatggagatctacaaaaccgtgagcgcctggaagcggcagcctgtgcgcgtgctgagcctgtttcggaatatcgataaagtcctgaaaagcctgggattcctggagagcggctctggctccggcggtggcaccctgaagtacgtggaggatgtgacaaacgtggtcagacgggatgtggagaagtggggccccttcgatctggtgtacggcagcacccaacccctgggcagctcttgtgaccggtgccctggctggtacatgtttcagttccaccggatcctgcagtacgccctgccgagacaggagtcccagcggccattcttttggattttcatggacaacttgctgctgaccgaggatgaccaggaaactaccactcggttcctgcagaccgaagccgtgaccctgcaggacgtgagaggccgggactaccagaacgccatgcgggtgtggtccaacatccctggactgaaaagcaagcacgcacctctgacccctaaagaagaggagtacctgcaggcccaggtgcggagcagaagcaagctggacgcccctaaggtggatctgctggtgaagaattgcctcctgcccctgagagagtacttcaagtatttcagccagaatagtctgcccctgggcggcccaagcagcggcgcccctcctcccagcggcggcagcccagccggctccccaacctctaccgaggagggcacctctgagtccgccacccccgagagcggccctggcacctccaccgagcccagcgagggcagcgcacccggcagccctgccggcagccccacctccacagaggagggaaccagcaccgagcccagcgaaggcagcgccccaggcaccagcaccgagcctagtgagggcggctctggcggcggcagcgcccaggagattaaacggatcaacaagatcagaagaagacttgtgaaagacagcaacaccaagaaggccggcaagacaggccccatgaaaaccctgctggttagagtgatgacacccgatctgagagagcggctggaaaacctgagaaagaagcctgaaaatatcccccagcccatcagcaatacatctagagccaacctgaataagctgctgaccgattacaccgaaatgaagaaggcgatcctgcatgtgtactgggaagagttccagaaggaccctgtgggcctgatgagccgggtggcccagcctgccagcaagaagatcgatcagaacaagctgaaacctgagatggacgagaagggcaacctgaccaccgccggctttgcctgctctcagtgtggccagcccctgttcgtgtacaagctggagcaggtgtctgagaagggcaaggcttacaccaactacttcggacggtgcaatgtggccgagcacgaaaagctgatcctgctggcccagctgaagcccgagaaggatagcgacgaagccgtgacatatagcctgggaaagtttgggcagagggccctggatttctacagcattcatgtgaccaaggagtccacccaccccgtgaagcccctggcccagatcgccggaaacagatacgcctccggacctgtgggaaaggccctgagcgacgcatgtatgggcacaatcgcctccttcctgtctaagtaccaggacatcatcatcgaacaccagaaggtggtgaagggcaaccagaagagactggagagcctgcgggagctggccggcaaggaaaacctggaataccctagcgtgaccctgccacctcagcctcacaccaaggagggcgttgatgcctacaacgaagtgatcgcccgggtgcgaatgtgggtgaacctgaacctgtggcagaagctgaagctaagcagagatgatgccaagcctctgctgagactgaagggattcccttcctttcctctggtcgagagacaggccaacgaagtggactggtgggacatggtgtgtaacgtgaagaagctgatcaacgagaaaaaggaggatggcaaggtgttttggcagaatctggctggctacaagagacaggaagccctgagaccatacctgagcagcgaggaagatcggaagaagggaaagaaattcgctcggtaccagctgggcgacctgctgctgcacctggaaaagaagcacggcgaggactggggaaaggtgtacgacgaggcctgggagcggattgacaagaaagtggaaggcctgagcaagcacatcaagctggaagaggaacggagaagcgaggacgcccagagcaaggccgccctgaccgactggctgcgggctaaggccagcttcgtgatcgagggcctgaaggaggccgacaaggacgagttctgcagatgcgagctgaagctgcagaagtggtacggggacctgcggggaaagcccttcgccatcgaagccgagaacagcatcctggacatcagcggcttcagcaagcagtacaactgtgccttcatctggcagaaggacggcgtgaagaagctgaacctgtacctgatcatcaactacttcaagggcggcaagctgcggttcaagaagatcaaacctgaagccttcgaagccaacagattctacaccgtgatcaacaaaaagagcggcgagatcgtgcccatggaggtgaacttcaacttcgacgaccccaacctgatcatcctgcctctggcctttggcaagagacagggcagagaattcatctggaacgacctgctgtccctggaaaccggcagcctgaagctggccaacggaagagtgatcgagaagacactgtacaacagaagaacccggcaggatgagcctgccctgttcgtggccctgaccttcgagcggcgggaggtcctggactcctccaatatcaaaccaatgaacctgatcggcgtggcaagaggcgaaaacatccccgccgtgatcgccctgaccgaccccgagggctgcccactgagccggtttaaggatagcctgggaaacccaacccacatcctgagaatcggcgagagctataaggagaagcagcggaccatccaggccaagaaggaggtggagcagcggagagccggcggctacagccggaagtacgccagcaaagccaagaatctggcagacgatatggtgagaaacaccgctagagatctgctgtactacgccgtgacccaggatgccatgctgatcttcgccaacctgagccggggcttcggccggcagggcaagcggaccttcatggccgagagacagtacacacggatggaggactggctgaccgccaagctggcctacgagggcctgagcaagacctacctgtccaagacactggcccagtacacctccaagacatgcagcaactgtgggtttaccatcaccagcgccgactacgacagggtgctggagaagctgaagaagacagcaacaggctggatgaccacaattaacggcaaggagctgaaggtggagggccagattacctactacaacagatacaagagacagaacgtagtcaaggacctgtccgtcgagctggatagactgagcgaagaatctgtgaacaacgacatctcctcctggacaaagggcagaagcggagaagctctgagcctcctgaagaaaagattctcccatagacccgtgcaggagaagttcgtgtgcctgaactgcggcttcgagacacacgcagccgagcaagccgccctgaacatcgccagatcctggctgttcctgcggagccaggagtacaagaaataccagacaaacaagacaaccggcaacaccgataagagagccttcgtcgagacctggcagtccttttaccggaagaagcttaaggaggtgtggaaacctgccgtgcggtctggcggatctggcggaggctccacaagcagccaggagcccgtgagcttcgccgaggtggccgtgtacttcagcagggaggagtgggccctgctggaccccgcccagagggccctgtacagggacgtgatgctggagacctaccagtgcgtggccagcctggcccccctgcccgcccccaagcccatgctgatcagcctgctggagggcggcgaggagccctggatccccgacgtgaggagccccgaggccgtgcccggcgacctgagccccaccagccccaagaaaaagagaaaagtctaagctgccttctgcggggcttgccttctggccatgcccttcttctctcccttgcacctgtacctcttggtctttgaataaagcctgagtaggaaggctagcaaaaaaaaaaaaaaaaaaaaaaaaaaaaaaaaaaaaaaaaaaaaaaaaaaaaaaaaaaaaaaaaaaaaaaaaaaaaaaaa

SEQ ID NO: 6479 - RNA, 5797 nt, synthetic construct
  source 1..5797: mol_type = other RNA
aggaaataagagagaaaagaagagtaagaagaaatataagagccaccatggcccctaagaagaagcgtaaagtgagccggatggaacgcctcgtctacgaggtgcggcagaagtgcagaaacatcgaggacatctgcatctcctgcggatctctgaacgtgaccctggagcacccactgttcatcggcggcatgtgccagaactgtaaaaactgttttctggagtgtgcctatcaatacgacgatgacggctaccagagctactgcaccatctgttgcggcggaagagaggtgctgatgtgtggaaataacaactgctgccggtgcttctgcgtggaatgcgtggacctgctggtgggccccggcgccgcccaggccgctattaaggaagatccttggaactgctacatgtgcggccacaagggcacatacggcctgctgagacggagagaggactggcctagcagactgcagatgttcttcgccaataaccacgaccaggagttcgacccccctaaggtgtaccctcccgtccccgccgagaagagaaagcccatccgggtcctgagcctgttcgatggcatcgccaccggtctgctggtgctgaaggacctgggcatccaggtggataggtacattgcctccgaggtgtgcgaggactccatcaccgtgggaatggtgcgtcatcagggcaagatcatgtacgtgggcgacgtgcggagcgtgacacagaagcatatccaggagtggggccctttcgacctggtgatcggcggcagcccttgcaatgacctgagcatcgtgaacccagcccggaagggcctgtacgagggaaccggcagactgttcttcgagttttacagactgctgcacgacgcccggcctaaggaaggcgacgaccggcccttcttttggctgttcgagaatgtggtggccatgggagtcagcgacaagcgggatattagccggttcctggagagcaaccccgtgatgatcgatgccaaggaagtgagcgccgcccaccgggccagatacttctggggcaatctgcctggcatgaacagacccctggccagcaccgtgaacgacaagctggagctgcaggagtgcctggagcacggccggatcgccaagttcagcaaggtgagaaccatcaccacccgaagcaacagcatcaaacaaggcaaggaccagcactttcctgtgttcatgaacgagaaggaggacatcctgtggtgtaccgagatggagagagtgttcgggttcccagtccactacacagatgtcagcaacatgtctagactggccagacagagactgctgggaagaagctggtccgtccctgtgatcagacacctgttcgcccctctgaaggagtacttcgcctgcgtgagcagcggcaacagcaacgccaacagccggggccccagcttctctagcggcctggtgccactgtccctgagagggagccacatgggccccatggagatctacaaaaccgtgagcgcctggaagcggcagcctgtgcgcgtgctgagcctgtttcggaatatcgataaagtcctgaaaagcctgggattcctggagagcggctctggctccggcggtggcaccctgaagtacgtggaggatgtgacaaacgtggtcagacgggatgtggagaagtggggccccttcgatctggtgtacggcagcacccaacccctgggcagctcttgtgaccggtgccctggctggtacatgtttcagttccaccggatcctgcagtacgccctgccgagacaggagtcccagcggccattcttttggattttcatggacaacttgctgctgaccgaggatgaccaggaaactaccactcggttcctgcagaccgaagccgtgaccctgcaggacgtgagaggccgggactaccagaacgccatgcgggtgtggtccaacatccctggactgaaaagcaagcacgcacctctgacccctaaagaagaggagtacctgcaggcccaggtgcggagcagaagcaagctggacgcccctaaggtggatctgctggtgaagaattgcctcctgcccctgagagagtacttcaagtatttcagccagaatagtctgcccctgggcggcccaagcagcggcgcccctcctcccagcggcggcagcccagccggctccccaacctctaccgaggagggcacctctgagtccgccacccccgagagcggccctggcacctccaccgagcccagcgagggcagcgcacccggcagccctgccggcagccccacctccacagaggagggaaccagcaccgagcccagcgaaggcagcgccccaggcaccagcaccgagcctagtgagggcggctctggcggcggcagcgcccaggagattaaacggatcaacaagatcagaagaagacttgtgaaagacagcaacaccaagaaggccggcaagacaggccccatgaaaaccctgctggttagagtgatgacacccgatctgagagagcggctggaaaacctgagaaagaagcctgaaaatatcccccagcccatcagcaatacatctagagccaacctgaataagctgctgaccgattacaccgaaatgaagaaggcgatcctgcatgtgtactgggaagagttccagaaggaccctgtgggcctgatgagccgggtggcccagcctgccagcaagaagatcgatcagaacaagctgaaacctgagatggacgagaagggcaacctgaccaccgccggctttgcctgctctcagtgtggccagcccctgttcgtgtacaagctggagcaggtgtctgagaagggcaaggcttacaccaactacttcggacggtgcaatgtggccgagcacgaaaagctgatcctgctggcccagctgaagcccgagaaggatagcgacgaagccgtgacatatagcctgggaaagtttgggcagagggccctggatttctacagcattcatgtgaccaaggagtccacccaccccgtgaagcccctggcccagatcgccggaaacagatacgcctccggacctgtgggaaaggccctgagcgacgcatgtatgggcacaatcgcctccttcctgtctaagtaccaggacatcatcatcgaacaccagaaggtggtgaagggcaaccagaagagactggagagcctgcgggagctggccggcaaggaaaacctggaataccctagcgtgaccctgccacctcagcctcacaccaaggagggcgttgatgcctacaacgaagtgatcgcccgggtgcgaatgtgggtgaacctgaacctgtggcagaagctgaagctaagcagagatgatgccaagcctctgctgagactgaagggattcccttcctttcctctggtcgagagacaggccaacgaagtggactggtgggacatggtgtgtaacgtgaagaagctgatcaacgagaaaaaggaggatggcaaggtgttttggcagaatctggctggctacaagagacaggaagccctgagaccatacctgagcagcgaggaagatcggaagaagggaaagaaattcgctcggtaccagctgggcgacctgctgctgcacctggaaaagaagcacggcgaggactggggaaaggtgtacgacgaggcctgggagcggattgacaagaaagtggaaggcctgagcaagcacatcaagctggaagaggaacggagaagcgaggacgcccagagcaaggccgccctgaccgactggctgcgggctaaggccagcttcgtgatcgagggcctgaaggaggccgacaaggacgagttctgcagatgcgagctgaagctgcagaagtggtacggggacctgcggggaaagcccttcgccatcgaagccgagaacagcatcctggacatcagcggcttcagcaagcagtacaactgtgccttcatctggcagaaggacggcgtgaagaagctgaacctgtacctgatcatcaactacttcaagggcggcaagctgcggttcaagaagatcaaacctgaagccttcgaagccaacagattctacaccgtgatcaacaaaaagagcggcgagatcgtgcccatggaggtgaacttcaacttcgacgaccccaacctgatcatcctgcctctggcctttggcaagagacagggcagagaattcatctggaacgacctgctgtccctggaaaccggcagcctgaagctggccaacggaagagtgatcgagaagacactgtacaacagaagaacccggcaggatgagcctgccctgttcgtggccctgaccttcgagcggcgggaggtcctggactcctccaatatcaaaccaatgaacctgatcggcgtggcaagaggcgaaaacatccccgccgtgatcgccctgaccgaccccgagggctgcccactgagccggtttaaggatagcctgggaaacccaacccacatcctgagaatcggcgagagctataaggagaagcagcggaccatccaggccaagaaggaggtggagcagcggagagccggcggctacagccggaagtacgccagcaaagccaagaatctggcagacgatatggtgagaaacaccgctagagatctgctgtactacgccgtgacccaggatgccatgctgatcttcgccaacctgagccggggcttcggccggcagggcaagcggaccttcatggccgagagacagtacacacggatggaggactggctgaccgccaagctggcctacgagggcctgagcaagacctacctgtccaagacactggcccagtacacctccaagacatgcagcaactgtgggtttaccatcaccagcgccgactacgacagggtgctggagaagctgaagaagacagcaacaggctggatgaccacaattaacggcaaggagctgaaggtggagggccagattacctactacaacagatacaagagacagaacgtagtcaaggacctgtccgtcgagctggatagactgagcgaagaatctgtgaacaacgacatctcctcctggacaaagggcagaagcggagaagctctgagcctcctgaagaaaagattctcccatagacccgtgcaggagaagttcgtgtgcctgaactgcggcttcgagacacacgcagccgagcaagccgccctgaacatcgccagatcctggctgttcctgcggagccaggagtacaagaaataccagacaaacaagacaaccggcaacaccgataagagagccttcgtcgagacctggcagtccttttaccggaagaagcttaaggaggtgtggaaacctgccgtgcggtctggcggatctggcggaggctccacaagcctgaggggcctggtgaccttcgaggacgtggccgtggagttcacccaggaggagtgggccctgctggaccccgcccagaggaccctgtacagggacgtgatgctggagaactgcaggaacctggccagcctgggctgcagggtgaacaagcccagcctgatcagccagctggagcaggacaagaaggtgatcaccgaggagaggggcatcctgcccagcacctgccccgacctggagaccctgaccagccccaagaaaaagagaaaagtctaagctgccttctgcggggcttgccttctggccatgcccttcttctctcccttgcacctgtacctcttggtctttgaataaagcctgagtaggaaggctagcaaaaaaaaaaaaaaaaaaaaaaaaaaaaaaaaaaaaaaaaaaaaaaaaaaaaaaaaaaaaaaaaaaaaaaaaaaaaaaaa

SEQ ID NO: 6480 - RNA, 5797 nt, synthetic construct
  source 1..5797: mol_type = other RNA
aggaaataagagagaaaagaagagtaagaagaaatataagagccaccatggcccctaagaagaagcgtaaagtgagccggatggaacgcctcgtctacgaggtgcggcagaagtgcagaaacatcgaggacatctgcatctcctgcggatctctgaacgtgaccctggagcacccactgttcatcggcggcatgtgccagaactgtaaaaactgttttctggagtgtgcctatcaatacgacgatgacggctaccagagctactgcaccatctgttgcggcggaagagaggtgctgatgtgtggaaataacaactgctgccggtgcttctgcgtggaatgcgtggacctgctggtgggccccggcgccgcccaggccgctattaaggaagatccttggaactgctacatgtgcggccacaagggcacatacggcctgctgagacggagagaggactggcctagcagactgcagatgttcttcgccaataaccacgaccaggagttcgacccccctaaggtgtaccctcccgtccccgccgagaagagaaagcccatccgggtcctgagcctgttcgatggcatcgccaccggtctgctggtgctgaaggacctgggcatccaggtggataggtacattgcctccgaggtgtgcgaggactccatcaccgtgggaatggtgcgtcatcagggcaagatcatgtacgtgggcgacgtgcggagcgtgacacagaagcatatccaggagtggggccctttcgacctggtgatcggcggcagcccttgcaatgacctgagcatcgtgaacccagcccggaagggcctgtacgagggaaccggcagactgttcttcgagttttacagactgctgcacgacgcccggcctaaggaaggcgacgaccggcccttcttttggctgttcgagaatgtggtggccatgggagtcagcgacaagcgggatattagccggttcctggagagcaaccccgtgatgatcgatgccaaggaagtgagcgccgcccaccgggccagatacttctggggcaatctgcctggcatgaacagacccctggccagcaccgtgaacgacaagctggagctgcaggagtgcctggagcacggccggatcgccaagttcagcaaggtgagaaccatcaccacccgaagcaacagcatcaaacaaggcaaggaccagcactttcctgtgttcatgaacgagaaggaggacatcctgtggtgtaccgagatggagagagtgttcgggttcccagtccactacacagatgtcagcaacatgtctagactggccagacagagactgctgggaagaagctggtccgtccctgtgatcagacacctgttcgcccctctgaaggagtacttcgcctgcgtgagcagcggcaacagcaacgccaacagccggggccccagcttctctagcggcctggtgccactgtccctgagagggagccacatgggccccatggagatctacaaaaccgtgagcgcctggaagcggcagcctgtgcgcgtgctgagcctgtttcggaatatcgataaagtcctgaaaagcctgggattcctggagagcggctctggctccggcggtggcaccctgaagtacgtggaggatgtgacaaacgtggtcagacgggatgtggagaagtggggccccttcgatctggtgtacggcagcacccaacccctgggcagctcttgtgaccggtgccctggctggtacatgtttcagttccaccggatcctgcagtacgccctgccgagacaggagtcccagcggccattcttttggattttcatggacaacttgctgctgaccgaggatgaccaggaaactaccactcggttcctgcagaccgaagccgtgaccctgcaggacgtgagaggccgggactaccagaacgccatgcgggtgtggtccaacatccctggactgaaaagcaagcacgcacctctgacccctaaagaagaggagtacctgcaggcccaggtgcggagcagaagcaagctggacgcccctaaggtggatctgctggtgaagaattgcctcctgcccctgagagagtacttcaagtatttcagccagaatagtctgcccctgggcggcccaagcagcggcgcccctcctcccagcggcggcagcccagccggctccccaacctctaccgaggagggcacctctgagtccgccacccccgagagcggccctggcacctccaccgagcccagcgagggcagcgcacccggcagccctgccggcagccccacctccacagaggagggaaccagcaccgagcccagcgaaggcagcgccccaggcaccagcaccgagcctagtgagggcggctctggcggcggcagcgcccaggagattaaacggatcaacaagatcagaagaagacttgtgaaagacagcaacaccaagaaggccggcaagacaggccccatgaaaaccctgctggttagagtgatgacacccgatctgagagagcggctggaaaacctgagaaagaagcctgaaaatatcccccagcccatcagcaatacatctagagccaacctgaataagctgctgaccgattacaccgaaatgaagaaggcgatcctgcatgtgtactgggaagagttccagaaggaccctgtgggcctgatgagccgggtggcccagcctgccagcaagaagatcgatcagaacaagctgaaacctgagatggacgagaagggcaacctgaccaccgccggctttgcctgctctcagtgtggccagcccctgttcgtgtacaagctggagcaggtgtctgagaagggcaaggcttacaccaactacttcggacggtgcaatgtggccgagcacgaaaagctgatcctgctggcccagctgaagcccgagaaggatagcgacgaagccgtgacatatagcctgggaaagtttgggcagagggccctggatttctacagcattcatgtgaccaaggagtccacccaccccgtgaagcccctggcccagatcgccggaaacagatacgcctccggacctgtgggaaaggccctgagcgacgcatgtatgggcacaatcgcctccttcctgtctaagtaccaggacatcatcatcgaacaccagaaggtggtgaagggcaaccagaagagactggagagcctgcgggagctggccggcaaggaaaacctggaataccctagcgtgaccctgccacctcagcctcacaccaaggagggcgttgatgcctacaacgaagtgatcgcccgggtgcgaatgtgggtgaacctgaacctgtggcagaagctgaagctaagcagagatgatgccaagcctctgctgagactgaagggattcccttcctttcctctggtcgagagacaggccaacgaagtggactggtgggacatggtgtgtaacgtgaagaagctgatcaacgagaaaaaggaggatggcaaggtgttttggcagaatctggctggctacaagagacaggaagccctgagaccatacctgagcagcgaggaagatcggaagaagggaaagaaattcgctcggtaccagctgggcgacctgctgctgcacctggaaaagaagcacggcgaggactggggaaaggtgtacgacgaggcctgggagcggattgacaagaaagtggaaggcctgagcaagcacatcaagctggaagaggaacggagaagcgaggacgcccagagcaaggccgccctgaccgactggctgcgggctaaggccagcttcgtgatcgagggcctgaaggaggccgacaaggacgagttctgcagatgcgagctgaagctgcagaagtggtacggggacctgcggggaaagcccttcgccatcgaagccgagaacagcatcctggacatcagcggcttcagcaagcagtacaactgtgccttcatctggcagaaggacggcgtgaagaagctgaacctgtacctgatcatcaactacttcaagggcggcaagctgcggttcaagaagatcaaacctgaagccttcgaagccaacagattctacaccgtgatcaacaaaaagagcggcgagatcgtgcccatggaggtgaacttcaacttcgacgaccccaacctgatcatcctgcctctggcctttggcaagagacagggcagagaattcatctggaacgacctgctgtccctggaaaccggcagcctgaagctggccaacggaagagtgatcgagaagacactgtacaacagaagaacccggcaggatgagcctgccctgttcgtggccctgaccttcgagcggcgggaggtcctggactcctccaatatcaaaccaatgaacctgatcggcgtggcaagaggcgaaaacatccccgccgtgatcgccctgaccgaccccgagggctgcccactgagccggtttaaggatagcctgggaaacccaacccacatcctgagaatcggcgagagctataaggagaagcagcggaccatccaggccaagaaggaggtggagcagcggagagccggcggctacagccggaagtacgccagcaaagccaagaatctggcagacgatatggtgagaaacaccgctagagatctgctgtactacgccgtgacccaggatgccatgctgatcttcgccaacctgagccggggcttcggccggcagggcaagcggaccttcatggccgagagacagtacacacggatggaggactggctgaccgccaagctggcctacgagggcctgagcaagacctacctgtccaagacactggcccagtacacctccaagacatgcagcaactgtgggtttaccatcaccagcgccgactacgacagggtgctggagaagctgaagaagacagcaacaggctggatgaccacaattaacggcaaggagctgaaggtggagggccagattacctactacaacagatacaagagacagaacgtagtcaaggacctgtccgtcgagctggatagactgagcgaagaatctgtgaacaacgacatctcctcctggacaaagggcagaagcggagaagctctgagcctcctgaagaaaagattctcccatagacccgtgcaggagaagttcgtgtgcctgaactgcggcttcgagacacacgcagccgagcaagccgccctgaacatcgccagatcctggctgttcctgcggagccaggagtacaagaaataccagacaaacaagacaaccggcaacaccgataagagagccttcgtcgagacctggcagtccttttaccggaagaagcttaaggaggtgtggaaacctgccgtgcggtctggcggatctggcggaggctccacaagcagcctggagcaggtgagcttcaaggacgtgtgcgtggacttcacccaggaggagtggtacctgctggaccccgcccagaagatcctgtacagggacgtgatcctggagaactacagcaacatcgtgagcgtgggccactgcggcaccaagcccgaggtgatcttcaagatcgagcagggcgaggagccctgggtgctgggcgagggcttcagcagcctgcagcaccccgagaggaactggaagaccagccccaagaaaaagagaaaagtctaagctgccttctgcggggcttgccttctggccatgcccttcttctctcccttgcacctgtacctcttggtctttgaataaagcctgagtaggaaggctagcaaaaaaaaaaaaaaaaaaaaaaaaaaaaaaaaaaaaaaaaaaaaaaaaaaaaaaaaaaaaaaaaaaaaaaaaaaaaaaaa

SEQ ID NO: 6481 - RNA, 5797 nt, synthetic construct
  source 1..5797: mol_type = other RNA
aggaaataagagagaaaagaagagtaagaagaaatataagagccaccatggcccctaagaagaagcgtaaagtgagccggatggaacgcctcgtctacgaggtgcggcagaagtgcagaaacatcgaggacatctgcatctcctgcggatctctgaacgtgaccctggagcacccactgttcatcggcggcatgtgccagaactgtaaaaactgttttctggagtgtgcctatcaatacgacgatgacggctaccagagctactgcaccatctgttgcggcggaagagaggtgctgatgtgtggaaataacaactgctgccggtgcttctgcgtggaatgcgtggacctgctggtgggccccggcgccgcccaggccgctattaaggaagatccttggaactgctacatgtgcggccacaagggcacatacggcctgctgagacggagagaggactggcctagcagactgcagatgttcttcgccaataaccacgaccaggagttcgacccccctaaggtgtaccctcccgtccccgccgagaagagaaagcccatccgggtcctgagcctgttcgatggcatcgccaccggtctgctggtgctgaaggacctgggcatccaggtggataggtacattgcctccgaggtgtgcgaggactccatcaccgtgggaatggtgcgtcatcagggcaagatcatgtacgtgggcgacgtgcggagcgtgacacagaagcatatccaggagtggggccctttcgacctggtgatcggcggcagcccttgcaatgacctgagcatcgtgaacccagcccggaagggcctgtacgagggaaccggcagactgttcttcgagttttacagactgctgcacgacgcccggcctaaggaaggcgacgaccggcccttcttttggctgttcgagaatgtggtggccatgggagtcagcgacaagcgggatattagccggttcctggagagcaaccccgtgatgatcgatgccaaggaagtgagcgccgcccaccgggccagatacttctggggcaatctgcctggcatgaacagacccctggccagcaccgtgaacgacaagctggagctgcaggagtgcctggagcacggccggatcgccaagttcagcaaggtgagaaccatcaccacccgaagcaacagcatcaaacaaggcaaggaccagcactttcctgtgttcatgaacgagaaggaggacatcctgtggtgtaccgagatggagagagtgttcgggttcccagtccactacacagatgtcagcaacatgtctagactggccagacagagactgctgggaagaagctggtccgtccctgtgatcagacacctgttcgcccctctgaaggagtacttcgcctgcgtgagcagcggcaacagcaacgccaacagccggggccccagcttctctagcggcctggtgccactgtccctgagagggagccacatgggccccatggagatctacaaaaccgtgagcgcctggaagcggcagcctgtgcgcgtgctgagcctgtttcggaatatcgataaagtcctgaaaagcctgggattcctggagagcggctctggctccggcggtggcaccctgaagtacgtggaggatgtgacaaacgtggtcagacgggatgtggagaagtggggccccttcgatctggtgtacggcagcacccaacccctgggcagctcttgtgaccggtgccctggctggtacatgtttcagttccaccggatcctgcagtacgccctgccgagacaggagtcccagcggccattcttttggattttcatggacaacttgctgctgaccgaggatgaccaggaaactaccactcggttcctgcagaccgaagccgtgaccctgcaggacgtgagaggccgggactaccagaacgccatgcgggtgtggtccaacatccctggactgaaaagcaagcacgcacctctgacccctaaagaagaggagtacctgcaggcccaggtgcggagcagaagcaagctggacgcccctaaggtggatctgctggtgaagaattgcctcctgcccctgagagagtacttcaagtatttcagccagaatagtctgcccctgggcggcccaagcagcggcgcccctcctcccagcggcggcagcccagccggctccccaacctctaccgaggagggcacctctgagtccgccacccccgagagcggccctggcacctccaccgagcccagcgagggcagcgcacccggcagccctgccggcagccccacctccacagaggagggaaccagcaccgagcccagcgaaggcagcgccccaggcaccagcaccgagcctagtgagggcggctctggcggcggcagcgcccaggagattaaacggatcaacaagatcagaagaagacttgtgaaagacagcaacaccaagaaggccggcaagacaggccccatgaaaaccctgctggttagagtgatgacacccgatctgagagagcggctggaaaacctgagaaagaagcctgaaaatatcccccagcccatcagcaatacatctagagccaacctgaataagctgctgaccgattacaccgaaatgaagaaggcgatcctgcatgtgtactgggaagagttccagaaggaccctgtgggcctgatgagccgggtggcccagcctgccagcaagaagatcgatcagaacaagctgaaacctgagatggacgagaagggcaacctgaccaccgccggctttgcctgctctcagtgtggccagcccctgttcgtgtacaagctggagcaggtgtctgagaagggcaaggcttacaccaactacttcggacggtgcaatgtggccgagcacgaaaagctgatcctgctggcccagctgaagcccgagaaggatagcgacgaagccgtgacatatagcctgggaaagtttgggcagagggccctggatttctacagcattcatgtgaccaaggagtccacccaccccgtgaagcccctggcccagatcgccggaaacagatacgcctccggacctgtgggaaaggccctgagcgacgcatgtatgggcacaatcgcctccttcctgtctaagtaccaggacatcatcatcgaacaccagaaggtggtgaagggcaaccagaagagactggagagcctgcgggagctggccggcaaggaaaacctggaataccctagcgtgaccctgccacctcagcctcacaccaaggagggcgttgatgcctacaacgaagtgatcgcccgggtgcgaatgtgggtgaacctgaacctgtggcagaagctgaagctaagcagagatgatgccaagcctctgctgagactgaagggattcccttcctttcctctggtcgagagacaggccaacgaagtggactggtgggacatggtgtgtaacgtgaagaagctgatcaacgagaaaaaggaggatggcaaggtgttttggcagaatctggctggctacaagagacaggaagccctgagaccatacctgagcagcgaggaagatcggaagaagggaaagaaattcgctcggtaccagctgggcgacctgctgctgcacctggaaaagaagcacggcgaggactggggaaaggtgtacgacgaggcctgggagcggattgacaagaaagtggaaggcctgagcaagcacatcaagctggaagaggaacggagaagcgaggacgcccagagcaaggccgccctgaccgactggctgcgggctaaggccagcttcgtgatcgagggcctgaaggaggccgacaaggacgagttctgcagatgcgagctgaagctgcagaagtggtacggggacctgcggggaaagcccttcgccatcgaagccgagaacagcatcctggacatcagcggcttcagcaagcagtacaactgtgccttcatctggcagaaggacggcgtgaagaagctgaacctgtacctgatcatcaactacttcaagggcggcaagctgcggttcaagaagatcaaacctgaagccttcgaagccaacagattctacaccgtgatcaacaaaaagagcggcgagatcgtgcccatggaggtgaacttcaacttcgacgaccccaacctgatcatcctgcctctggcctttggcaagagacagggcagagaattcatctggaacgacctgctgtccctggaaaccggcagcctgaagctggccaacggaagagtgatcgagaagacactgtacaacagaagaacccggcaggatgagcctgccctgttcgtggccctgaccttcgagcggcgggaggtcctggactcctccaatatcaaaccaatgaacctgatcggcgtggcaagaggcgaaaacatccccgccgtgatcgccctgaccgaccccgagggctgcccactgagccggtttaaggatagcctgggaaacccaacccacatcctgagaatcggcgagagctataaggagaagcagcggaccatccaggccaagaaggaggtggagcagcggagagccggcggctacagccggaagtacgccagcaaagccaagaatctggcagacgatatggtgagaaacaccgctagagatctgctgtactacgccgtgacccaggatgccatgctgatcttcgccaacctgagccggggcttcggccggcagggcaagcggaccttcatggccgagagacagtacacacggatggaggactggctgaccgccaagctggcctacgagggcctgagcaagacctacctgtccaagacactggcccagtacacctccaagacatgcagcaactgtgggtttaccatcaccagcgccgactacgacagggtgctggagaagctgaagaagacagcaacaggctggatgaccacaattaacggcaaggagctgaaggtggagggccagattacctactacaacagatacaagagacagaacgtagtcaaggacctgtccgtcgagctggatagactgagcgaagaatctgtgaacaacgacatctcctcctggacaaagggcagaagcggagaagctctgagcctcctgaagaaaagattctcccatagacccgtgcaggagaagttcgtgtgcctgaactgcggcttcgagacacacgcagccgagcaagccgccctgaacatcgccagatcctggctgttcctgcggagccaggagtacaagaaataccagacaaacaagacaaccggcaacaccgataagagagccttcgtcgagacctggcagtccttttaccggaagaagcttaaggaggtgtggaaacctgccgtgcggtctggcggatctggcggaggctccacaagcctgaagggcctggtgaccttcgaggacgtggccgtggagttcacccaggaggagtgggccctgctggaccccgcccagaggaccctgtacagggacgtgatgctggagaacttcaggaacctggccagcctgggcaaccaggtggacaagcccggcctgatcagccagctggagcaggaggacaaggtgatgaccgaggagaggggcatcttccccggcgcctgccccgacgtggagaaccccaccagccccaagaaaaagagaaaagtctaagctgccttctgcggggcttgccttctggccatgcccttcttctctcccttgcacctgtacctcttggtctttgaataaagcctgagtaggaaggctagcaaaaaaaaaaaaaaaaaaaaaaaaaaaaaaaaaaaaaaaaaaaaaaaaaaaaaaaaaaaaaaaaaaaaaaaaaaaaaaaa

SEQ ID NO: 6482 - RNA, 5797 nt, synthetic construct
  source 1..5797: mol_type = other RNA
aggaaataagagagaaaagaagagtaagaagaaatataagagccaccatggcccctaagaagaagcgtaaagtgagccggatggaacgcctcgtctacgaggtgcggcagaagtgcagaaacatcgaggacatctgcatctcctgcggatctctgaacgtgaccctggagcacccactgttcatcggcggcatgtgccagaactgtaaaaactgttttctggagtgtgcctatcaatacgacgatgacggctaccagagctactgcaccatctgttgcggcggaagagaggtgctgatgtgtggaaataacaactgctgccggtgcttctgcgtggaatgcgtggacctgctggtgggccccggcgccgcccaggccgctattaaggaagatccttggaactgctacatgtgcggccacaagggcacatacggcctgctgagacggagagaggactggcctagcagactgcagatgttcttcgccaataaccacgaccaggagttcgacccccctaaggtgtaccctcccgtccccgccgagaagagaaagcccatccgggtcctgagcctgttcgatggcatcgccaccggtctgctggtgctgaaggacctgggcatccaggtggataggtacattgcctccgaggtgtgcgaggactccatcaccgtgggaatggtgcgtcatcagggcaagatcatgtacgtgggcgacgtgcggagcgtgacacagaagcatatccaggagtggggccctttcgacctggtgatcggcggcagcccttgcaatgacctgagcatcgtgaacccagcccggaagggcctgtacgagggaaccggcagactgttcttcgagttttacagactgctgcacgacgcccggcctaaggaaggcgacgaccggcccttcttttggctgttcgagaatgtggtggccatgggagtcagcgacaagcgggatattagccggttcctggagagcaaccccgtgatgatcgatgccaaggaagtgagcgccgcccaccgggccagatacttctggggcaatctgcctggcatgaacagacccctggccagcaccgtgaacgacaagctggagctgcaggagtgcctggagcacggccggatcgccaagttcagcaaggtgagaaccatcaccacccgaagcaacagcatcaaacaaggcaaggaccagcactttcctgtgttcatgaacgagaaggaggacatcctgtggtgtaccgagatggagagagtgttcgggttcccagtccactacacagatgtcagcaacatgtctagactggccagacagagactgctgggaagaagctggtccgtccctgtgatcagacacctgttcgcccctctgaaggagtacttcgcctgcgtgagcagcggcaacagcaacgccaacagccggggccccagcttctctagcggcctggtgccactgtccctgagagggagccacatgggccccatggagatctacaaaaccgtgagcgcctggaagcggcagcctgtgcgcgtgctgagcctgtttcggaatatcgataaagtcctgaaaagcctgggattcctggagagcggctctggctccggcggtggcaccctgaagtacgtggaggatgtgacaaacgtggtcagacgggatgtggagaagtggggccccttcgatctggtgtacggcagcacccaacccctgggcagctcttgtgaccggtgccctggctggtacatgtttcagttccaccggatcctgcagtacgccctgccgagacaggagtcccagcggccattcttttggattttcatggacaacttgctgctgaccgaggatgaccaggaaactaccactcggttcctgcagaccgaagccgtgaccctgcaggacgtgagaggccgggactaccagaacgccatgcgggtgtggtccaacatccctggactgaaaagcaagcacgcacctctgacccctaaagaagaggagtacctgcaggcccaggtgcggagcagaagcaagctggacgcccctaaggtggatctgctggtgaagaattgcctcctgcccctgagagagtacttcaagtatttcagccagaatagtctgcccctgggcggcccaagcagcggcgcccctcctcccagcggcggcagcccagccggctccccaacctctaccgaggagggcacctctgagtccgccacccccgagagcggccctggcacctccaccgagcccagcgagggcagcgcacccggcagccctgccggcagccccacctccacagaggagggaaccagcaccgagcccagcgaaggcagcgccccaggcaccagcaccgagcctagtgagggcggctctggcggcggcagcgcccaggagattaaacggatcaacaagatcagaagaagacttgtgaaagacagcaacaccaagaaggccggcaagacaggccccatgaaaaccctgctggttagagtgatgacacccgatctgagagagcggctggaaaacctgagaaagaagcctgaaaatatcccccagcccatcagcaatacatctagagccaacctgaataagctgctgaccgattacaccgaaatgaagaaggcgatcctgcatgtgtactgggaagagttccagaaggaccctgtgggcctgatgagccgggtggcccagcctgccagcaagaagatcgatcagaacaagctgaaacctgagatggacgagaagggcaacctgaccaccgccggctttgcctgctctcagtgtggccagcccctgttcgtgtacaagctggagcaggtgtctgagaagggcaaggcttacaccaactacttcggacggtgcaatgtggccgagcacgaaaagctgatcctgctggcccagctgaagcccgagaaggatagcgacgaagccgtgacatatagcctgggaaagtttgggcagagggccctggatttctacagcattcatgtgaccaaggagtccacccaccccgtgaagcccctggcccagatcgccggaaacagatacgcctccggacctgtgggaaaggccctgagcgacgcatgtatgggcacaatcgcctccttcctgtctaagtaccaggacatcatcatcgaacaccagaaggtggtgaagggcaaccagaagagactggagagcctgcgggagctggccggcaaggaaaacctggaataccctagcgtgaccctgccacctcagcctcacaccaaggagggcgttgatgcctacaacgaagtgatcgcccgggtgcgaatgtgggtgaacctgaacctgtggcagaagctgaagctaagcagagatgatgccaagcctctgctgagactgaagggattcccttcctttcctctggtcgagagacaggccaacgaagtggactggtgggacatggtgtgtaacgtgaagaagctgatcaacgagaaaaaggaggatggcaaggtgttttggcagaatctggctggctacaagagacaggaagccctgagaccatacctgagcagcgaggaagatcggaagaagggaaagaaattcgctcggtaccagctgggcgacctgctgctgcacctggaaaagaagcacggcgaggactggggaaaggtgtacgacgaggcctgggagcggattgacaagaaagtggaaggcctgagcaagcacatcaagctggaagaggaacggagaagcgaggacgcccagagcaaggccgccctgaccgactggctgcgggctaaggccagcttcgtgatcgagggcctgaaggaggccgacaaggacgagttctgcagatgcgagctgaagctgcagaagtggtacggggacctgcggggaaagcccttcgccatcgaagccgagaacagcatcctggacatcagcggcttcagcaagcagtacaactgtgccttcatctggcagaaggacggcgtgaagaagctgaacctgtacctgatcatcaactacttcaagggcggcaagctgcggttcaagaagatcaaacctgaagccttcgaagccaacagattctacaccgtgatcaacaaaaagagcggcgagatcgtgcccatggaggtgaacttcaacttcgacgaccccaacctgatcatcctgcctctggcctttggcaagagacagggcagagaattcatctggaacgacctgctgtccctggaaaccggcagcctgaagctggccaacggaagagtgatcgagaagacactgtacaacagaagaacccggcaggatgagcctgccctgttcgtggccctgaccttcgagcggcgggaggtcctggactcctccaatatcaaaccaatgaacctgatcggcgtggcaagaggcgaaaacatccccgccgtgatcgccctgaccgaccccgagggctgcccactgagccggtttaaggatagcctgggaaacccaacccacatcctgagaatcggcgagagctataaggagaagcagcggaccatccaggccaagaaggaggtggagcagcggagagccggcggctacagccggaagtacgccagcaaagccaagaatctggcagacgatatggtgagaaacaccgctagagatctgctgtactacgccgtgacccaggatgccatgctgatcttcgccaacctgagccggggcttcggccggcagggcaagcggaccttcatggccgagagacagtacacacggatggaggactggctgaccgccaagctggcctacgagggcctgagcaagacctacctgtccaagacactggcccagtacacctccaagacatgcagcaactgtgggtttaccatcaccagcgccgactacgacagggtgctggagaagctgaagaagacagcaacaggctggatgaccacaattaacggcaaggagctgaaggtggagggccagattacctactacaacagatacaagagacagaacgtagtcaaggacctgtccgtcgagctggatagactgagcgaagaatctgtgaacaacgacatctcctcctggacaaagggcagaagcggagaagctctgagcctcctgaagaaaagattctcccatagacccgtgcaggagaagttcgtgtgcctgaactgcggcttcgagacacacgcagccgagcaagccgccctgaacatcgccagatcctggctgttcctgcggagccaggagtacaagaaataccagacaaacaagacaaccggcaacaccgataagagagccttcgtcgagacctggcagtccttttaccggaagaagcttaaggaggtgtggaaacctgccgtgcggtctggcggatctggcggaggctccacaagcgacaagaccatcatcgccttcggcgacgtggccgtggccttcaccgagagggagtggaagctgctgagccccgcccagaggaccctgtacagggacgtgatgctggagacctacagccacctggtgagcctgggcatcgccttcagcaagcccaagttcatcacccagctggagcagggcgacgagccctggagggaggagagcgagtgcctgctggagctgtgccccgagcccaggaccgagaccagccccaagaaaaagagaaaagtctaagctgccttctgcggggcttgccttctggccatgcccttcttctctcccttgcacctgtacctcttggtctttgaataaagcctgagtaggaaggctagcaaaaaaaaaaaaaaaaaaaaaaaaaaaaaaaaaaaaaaaaaaaaaaaaaaaaaaaaaaaaaaaaaaaaaaaaaaaaaaaa

SEQ ID NO: 6483 - RNA, 5797 nt, synthetic construct
  source 1..5797: mol_type = other RNA
aggaaataagagagaaaagaagagtaagaagaaatataagagccaccatggcccctaagaagaagcgtaaagtgagccggatggaacgcctcgtctacgaggtgcggcagaagtgcagaaacatcgaggacatctgcatctcctgcggatctctgaacgtgaccctggagcacccactgttcatcggcggcatgtgccagaactgtaaaaactgttttctggagtgtgcctatcaatacgacgatgacggctaccagagctactgcaccatctgttgcggcggaagagaggtgctgatgtgtggaaataacaactgctgccggtgcttctgcgtggaatgcgtggacctgctggtgggccccggcgccgcccaggccgctattaaggaagatccttggaactgctacatgtgcggccacaagggcacatacggcctgctgagacggagagaggactggcctagcagactgcagatgttcttcgccaataaccacgaccaggagttcgacccccctaaggtgtaccctcccgtccccgccgagaagagaaagcccatccgggtcctgagcctgttcgatggcatcgccaccggtctgctggtgctgaaggacctgggcatccaggtggataggtacattgcctccgaggtgtgcgaggactccatcaccgtgggaatggtgcgtcatcagggcaagatcatgtacgtgggcgacgtgcggagcgtgacacagaagcatatccaggagtggggccctttcgacctggtgatcggcggcagcccttgcaatgacctgagcatcgtgaacccagcccggaagggcctgtacgagggaaccggcagactgttcttcgagttttacagactgctgcacgacgcccggcctaaggaaggcgacgaccggcccttcttttggctgttcgagaatgtggtggccatgggagtcagcgacaagcgggatattagccggttcctggagagcaaccccgtgatgatcgatgccaaggaagtgagcgccgcccaccgggccagatacttctggggcaatctgcctggcatgaacagacccctggccagcaccgtgaacgacaagctggagctgcaggagtgcctggagcacggccggatcgccaagttcagcaaggtgagaaccatcaccacccgaagcaacagcatcaaacaaggcaaggaccagcactttcctgtgttcatgaacgagaaggaggacatcctgtggtgtaccgagatggagagagtgttcgggttcccagtccactacacagatgtcagcaacatgtctagactggccagacagagactgctgggaagaagctggtccgtccctgtgatcagacacctgttcgcccctctgaaggagtacttcgcctgcgtgagcagcggcaacagcaacgccaacagccggggccccagcttctctagcggcctggtgccactgtccctgagagggagccacatgggccccatggagatctacaaaaccgtgagcgcctggaagcggcagcctgtgcgcgtgctgagcctgtttcggaatatcgataaagtcctgaaaagcctgggattcctggagagcggctctggctccggcggtggcaccctgaagtacgtggaggatgtgacaaacgtggtcagacgggatgtggagaagtggggccccttcgatctggtgtacggcagcacccaacccctgggcagctcttgtgaccggtgccctggctggtacatgtttcagttccaccggatcctgcagtacgccctgccgagacaggagtcccagcggccattcttttggattttcatggacaacttgctgctgaccgaggatgaccaggaaactaccactcggttcctgcagaccgaagccgtgaccctgcaggacgtgagaggccgggactaccagaacgccatgcgggtgtggtccaacatccctggactgaaaagcaagcacgcacctctgacccctaaagaagaggagtacctgcaggcccaggtgcggagcagaagcaagctggacgcccctaaggtggatctgctggtgaagaattgcctcctgcccctgagagagtacttcaagtatttcagccagaatagtctgcccctgggcggcccaagcagcggcgcccctcctcccagcggcggcagcccagccggctccccaacctctaccgaggagggcacctctgagtccgccacccccgagagcggccctggcacctccaccgagcccagcgagggcagcgcacccggcagccctgccggcagccccacctccacagaggagggaaccagcaccgagcccagcgaaggcagcgccccaggcaccagcaccgagcctagtgagggcggctctggcggcggcagcgcccaggagattaaacggatcaacaagatcagaagaagacttgtgaaagacagcaacaccaagaaggccggcaagacaggccccatgaaaaccctgctggttagagtgatgacacccgatctgagagagcggctggaaaacctgagaaagaagcctgaaaatatcccccagcccatcagcaatacatctagagccaacctgaataagctgctgaccgattacaccgaaatgaagaaggcgatcctgcatgtgtactgggaagagttccagaaggaccctgtgggcctgatgagccgggtggcccagcctgccagcaagaagatcgatcagaacaagctgaaacctgagatggacgagaagggcaacctgaccaccgccggctttgcctgctctcagtgtggccagcccctgttcgtgtacaagctggagcaggtgtctgagaagggcaaggcttacaccaactacttcggacggtgcaatgtggccgagcacgaaaagctgatcctgctggcccagctgaagcccgagaaggatagcgacgaagccgtgacatatagcctgggaaagtttgggcagagggccctggatttctacagcattcatgtgaccaaggagtccacccaccccgtgaagcccctggcccagatcgccggaaacagatacgcctccggacctgtgggaaaggccctgagcgacgcatgtatgggcacaatcgcctccttcctgtctaagtaccaggacatcatcatcgaacaccagaaggtggtgaagggcaaccagaagagactggagagcctgcgggagctggccggcaaggaaaacctggaataccctagcgtgaccctgccacctcagcctcacaccaaggagggcgttgatgcctacaacgaagtgatcgcccgggtgcgaatgtgggtgaacctgaacctgtggcagaagctgaagctaagcagagatgatgccaagcctctgctgagactgaagggattcccttcctttcctctggtcgagagacaggccaacgaagtggactggtgggacatggtgtgtaacgtgaagaagctgatcaacgagaaaaaggaggatggcaaggtgttttggcagaatctggctggctacaagagacaggaagccctgagaccatacctgagcagcgaggaagatcggaagaagggaaagaaattcgctcggtaccagctgggcgacctgctgctgcacctggaaaagaagcacggcgaggactggggaaaggtgtacgacgaggcctgggagcggattgacaagaaagtggaaggcctgagcaagcacatcaagctggaagaggaacggagaagcgaggacgcccagagcaaggccgccctgaccgactggctgcgggctaaggccagcttcgtgatcgagggcctgaaggaggccgacaaggacgagttctgcagatgcgagctgaagctgcagaagtggtacggggacctgcggggaaagcccttcgccatcgaagccgagaacagcatcctggacatcagcggcttcagcaagcagtacaactgtgccttcatctggcagaaggacggcgtgaagaagctgaacctgtacctgatcatcaactacttcaagggcggcaagctgcggttcaagaagatcaaacctgaagccttcgaagccaacagattctacaccgtgatcaacaaaaagagcggcgagatcgtgcccatggaggtgaacttcaacttcgacgaccccaacctgatcatcctgcctctggcctttggcaagagacagggcagagaattcatctggaacgacctgctgtccctggaaaccggcagcctgaagctggccaacggaagagtgatcgagaagacactgtacaacagaagaacccggcaggatgagcctgccctgttcgtggccctgaccttcgagcggcgggaggtcctggactcctccaatatcaaaccaatgaacctgatcggcgtggcaagaggcgaaaacatccccgccgtgatcgccctgaccgaccccgagggctgcccactgagccggtttaaggatagcctgggaaacccaacccacatcctgagaatcggcgagagctataaggagaagcagcggaccatccaggccaagaaggaggtggagcagcggagagccggcggctacagccggaagtacgccagcaaagccaagaatctggcagacgatatggtgagaaacaccgctagagatctgctgtactacgccgtgacccaggatgccatgctgatcttcgccaacctgagccggggcttcggccggcagggcaagcggaccttcatggccgagagacagtacacacggatggaggactggctgaccgccaagctggcctacgagggcctgagcaagacctacctgtccaagacactggcccagtacacctccaagacatgcagcaactgtgggtttaccatcaccagcgccgactacgacagggtgctggagaagctgaagaagacagcaacaggctggatgaccacaattaacggcaaggagctgaaggtggagggccagattacctactacaacagatacaagagacagaacgtagtcaaggacctgtccgtcgagctggatagactgagcgaagaatctgtgaacaacgacatctcctcctggacaaagggcagaagcggagaagctctgagcctcctgaagaaaagattctcccatagacccgtgcaggagaagttcgtgtgcctgaactgcggcttcgagacacacgcagccgagcaagccgccctgaacatcgccagatcctggctgttcctgcggagccaggagtacaagaaataccagacaaacaagacaaccggcaacaccgataagagagccttcgtcgagacctggcagtccttttaccggaagaagcttaaggaggtgtggaaacctgccgtgcggtctggcggatctggcggaggctccacaagcggcaagatgcccgtgaccttcgaggacgtggccgtgtacttcagccccgaggagtgggccgagctggccggctggcagaggaggctgtacagggaggtgatgctggagaactaccaggccgtggccagcctgggctggcccgccgtgaagcccgagatcatctgcaagatggagagggaggagatgccctgcatgcccgccccccccagggccaggtggaggcacaggacccccgtgcccgccaccagccccaagaaaaagagaaaagtctaagctgccttctgcggggcttgccttctggccatgcccttcttctctcccttgcacctgtacctcttggtctttgaataaagcctgagtaggaaggctagcaaaaaaaaaaaaaaaaaaaaaaaaaaaaaaaaaaaaaaaaaaaaaaaaaaaaaaaaaaaaaaaaaaaaaaaaaaaaaaaa

SEQ ID NO: 6484 - RNA, 5797 nt, synthetic construct
  source 1..5797: mol_type = other RNA
aggaaataagagagaaaagaagagtaagaagaaatataagagccaccatggcccctaagaagaagcgtaaagtgagccggatggaacgcctcgtctacgaggtgcggcagaagtgcagaaacatcgaggacatctgcatctcctgcggatctctgaacgtgaccctggagcacccactgttcatcggcggcatgtgccagaactgtaaaaactgttttctggagtgtgcctatcaatacgacgatgacggctaccagagctactgcaccatctgttgcggcggaagagaggtgctgatgtgtggaaataacaactgctgccggtgcttctgcgtggaatgcgtggacctgctggtgggccccggcgccgcccaggccgctattaaggaagatccttggaactgctacatgtgcggccacaagggcacatacggcctgctgagacggagagaggactggcctagcagactgcagatgttcttcgccaataaccacgaccaggagttcgacccccctaaggtgtaccctcccgtccccgccgagaagagaaagcccatccgggtcctgagcctgttcgatggcatcgccaccggtctgctggtgctgaaggacctgggcatccaggtggataggtacattgcctccgaggtgtgcgaggactccatcaccgtgggaatggtgcgtcatcagggcaagatcatgtacgtgggcgacgtgcggagcgtgacacagaagcatatccaggagtggggccctttcgacctggtgatcggcggcagcccttgcaatgacctgagcatcgtgaacccagcccggaagggcctgtacgagggaaccggcagactgttcttcgagttttacagactgctgcacgacgcccggcctaaggaaggcgacgaccggcccttcttttggctgttcgagaatgtggtggccatgggagtcagcgacaagcgggatattagccggttcctggagagcaaccccgtgatgatcgatgccaaggaagtgagcgccgcccaccgggccagatacttctggggcaatctgcctggcatgaacagacccctggccagcaccgtgaacgacaagctggagctgcaggagtgcctggagcacggccggatcgccaagttcagcaaggtgagaaccatcaccacccgaagcaacagcatcaaacaaggcaaggaccagcactttcctgtgttcatgaacgagaaggaggacatcctgtggtgtaccgagatggagagagtgttcgggttcccagtccactacacagatgtcagcaacatgtctagactggccagacagagactgctgggaagaagctggtccgtccctgtgatcagacacctgttcgcccctctgaaggagtacttcgcctgcgtgagcagcggcaacagcaacgccaacagccggggccccagcttctctagcggcctggtgccactgtccctgagagggagccacatgggccccatggagatctacaaaaccgtgagcgcctggaagcggcagcctgtgcgcgtgctgagcctgtttcggaatatcgataaagtcctgaaaagcctgggattcctggagagcggctctggctccggcggtggcaccctgaagtacgtggaggatgtgacaaacgtggtcagacgggatgtggagaagtggggccccttcgatctggtgtacggcagcacccaacccctgggcagctcttgtgaccggtgccctggctggtacatgtttcagttccaccggatcctgcagtacgccctgccgagacaggagtcccagcggccattcttttggattttcatggacaacttgctgctgaccgaggatgaccaggaaactaccactcggttcctgcagaccgaagccgtgaccctgcaggacgtgagaggccgggactaccagaacgccatgcgggtgtggtccaacatccctggactgaaaagcaagcacgcacctctgacccctaaagaagaggagtacctgcaggcccaggtgcggagcagaagcaagctggacgcccctaaggtggatctgctggtgaagaattgcctcctgcccctgagagagtacttcaagtatttcagccagaatagtctgcccctgggcggcccaagcagcggcgcccctcctcccagcggcggcagcccagccggctccccaacctctaccgaggagggcacctctgagtccgccacccccgagagcggccctggcacctccaccgagcccagcgagggcagcgcacccggcagccctgccggcagccccacctccacagaggagggaaccagcaccgagcccagcgaaggcagcgccccaggcaccagcaccgagcctagtgagggcggctctggcggcggcagcgcccaggagattaaacggatcaacaagatcagaagaagacttgtgaaagacagcaacaccaagaaggccggcaagacaggccccatgaaaaccctgctggttagagtgatgacacccgatctgagagagcggctggaaaacctgagaaagaagcctgaaaatatcccccagcccatcagcaatacatctagagccaacctgaataagctgctgaccgattacaccgaaatgaagaaggcgatcctgcatgtgtactgggaagagttccagaaggaccctgtgggcctgatgagccgggtggcccagcctgccagcaagaagatcgatcagaacaagctgaaacctgagatggacgagaagggcaacctgaccaccgccggctttgcctgctctcagtgtggccagcccctgttcgtgtacaagctggagcaggtgtctgagaagggcaaggcttacaccaactacttcggacggtgcaatgtggccgagcacgaaaagctgatcctgctggcccagctgaagcccgagaaggatagcgacgaagccgtgacatatagcctgggaaagtttgggcagagggccctggatttctacagcattcatgtgaccaaggagtccacccaccccgtgaagcccctggcccagatcgccggaaacagatacgcctccggacctgtgggaaaggccctgagcgacgcatgtatgggcacaatcgcctccttcctgtctaagtaccaggacatcatcatcgaacaccagaaggtggtgaagggcaaccagaagagactggagagcctgcgggagctggccggcaaggaaaacctggaataccctagcgtgaccctgccacctcagcctcacaccaaggagggcgttgatgcctacaacgaagtgatcgcccgggtgcgaatgtgggtgaacctgaacctgtggcagaagctgaagctaagcagagatgatgccaagcctctgctgagactgaagggattcccttcctttcctctggtcgagagacaggccaacgaagtggactggtgggacatggtgtgtaacgtgaagaagctgatcaacgagaaaaaggaggatggcaaggtgttttggcagaatctggctggctacaagagacaggaagccctgagaccatacctgagcagcgaggaagatcggaagaagggaaagaaattcgctcggtaccagctgggcgacctgctgctgcacctggaaaagaagcacggcgaggactggggaaaggtgtacgacgaggcctgggagcggattgacaagaaagtggaaggcctgagcaagcacatcaagctggaagaggaacggagaagcgaggacgcccagagcaaggccgccctgaccgactggctgcgggctaaggccagcttcgtgatcgagggcctgaaggaggccgacaaggacgagttctgcagatgcgagctgaagctgcagaagtggtacggggacctgcggggaaagcccttcgccatcgaagccgagaacagcatcctggacatcagcggcttcagcaagcagtacaactgtgccttcatctggcagaaggacggcgtgaagaagctgaacctgtacctgatcatcaactacttcaagggcggcaagctgcggttcaagaagatcaaacctgaagccttcgaagccaacagattctacaccgtgatcaacaaaaagagcggcgagatcgtgcccatggaggtgaacttcaacttcgacgaccccaacctgatcatcctgcctctggcctttggcaagagacagggcagagaattcatctggaacgacctgctgtccctggaaaccggcagcctgaagctggccaacggaagagtgatcgagaagacactgtacaacagaagaacccggcaggatgagcctgccctgttcgtggccctgaccttcgagcggcgggaggtcctggactcctccaatatcaaaccaatgaacctgatcggcgtggcaagaggcgaaaacatccccgccgtgatcgccctgaccgaccccgagggctgcccactgagccggtttaaggatagcctgggaaacccaacccacatcctgagaatcggcgagagctataaggagaagcagcggaccatccaggccaagaaggaggtggagcagcggagagccggcggctacagccggaagtacgccagcaaagccaagaatctggcagacgatatggtgagaaacaccgctagagatctgctgtactacgccgtgacccaggatgccatgctgatcttcgccaacctgagccggggcttcggccggcagggcaagcggaccttcatggccgagagacagtacacacggatggaggactggctgaccgccaagctggcctacgagggcctgagcaagacctacctgtccaagacactggcccagtacacctccaagacatgcagcaactgtgggtttaccatcaccagcgccgactacgacagggtgctggagaagctgaagaagacagcaacaggctggatgaccacaattaacggcaaggagctgaaggtggagggccagattacctactacaacagatacaagagacagaacgtagtcaaggacctgtccgtcgagctggatagactgagcgaagaatctgtgaacaacgacatctcctcctggacaaagggcagaagcggagaagctctgagcctcctgaagaaaagattctcccatagacccgtgcaggagaagttcgtgtgcctgaactgcggcttcgagacacacgcagccgagcaagccgccctgaacatcgccagatcctggctgttcctgcggagccaggagtacaagaaataccagacaaacaagacaaccggcaacaccgataagagagccttcgtcgagacctggcagtccttttaccggaagaagcttaaggaggtgtggaaacctgccgtgcggtctggcggatctggcggaggctccacaagccagtgcggcctgctgaccttcggcgacgtggccatcgagttcagccaggaggagtggaggtgcctgagccacacccagagggagctgtacagggacgtgatgctggagaactacggccacctgctgttcctgggcctgatcgtgagcaagcccgacctggtgagcctgctggagcagagcaaggagccctgggacgtgaggaggaagaagacccagaggcccagcgtgctgatgggccacgtgaccagccccaagaaaaagagaaaagtctaagctgccttctgcggggcttgccttctggccatgcccttcttctctcccttgcacctgtacctcttggtctttgaataaagcctgagtaggaaggctagcaaaaaaaaaaaaaaaaaaaaaaaaaaaaaaaaaaaaaaaaaaaaaaaaaaaaaaaaaaaaaaaaaaaaaaaaaaaaaaaa

SEQ ID NO: 6485 - RNA, 5797 nt, synthetic construct
  source 1..5797: mol_type = other RNA
aggaaataagagagaaaagaagagtaagaagaaatataagagccaccatggcccctaagaagaagcgtaaagtgagccggatggaacgcctcgtctacgaggtgcggcagaagtgcagaaacatcgaggacatctgcatctcctgcggatctctgaacgtgaccctggagcacccactgttcatcggcggcatgtgccagaactgtaaaaactgttttctggagtgtgcctatcaatacgacgatgacggctaccagagctactgcaccatctgttgcggcggaagagaggtgctgatgtgtggaaataacaactgctgccggtgcttctgcgtggaatgcgtggacctgctggtgggccccggcgccgcccaggccgctattaaggaagatccttggaactgctacatgtgcggccacaagggcacatacggcctgctgagacggagagaggactggcctagcagactgcagatgttcttcgccaataaccacgaccaggagttcgacccccctaaggtgtaccctcccgtccccgccgagaagagaaagcccatccgggtcctgagcctgttcgatggcatcgccaccggtctgctggtgctgaaggacctgggcatccaggtggataggtacattgcctccgaggtgtgcgaggactccatcaccgtgggaatggtgcgtcatcagggcaagatcatgtacgtgggcgacgtgcggagcgtgacacagaagcatatccaggagtggggccctttcgacctggtgatcggcggcagcccttgcaatgacctgagcatcgtgaacccagcccggaagggcctgtacgagggaaccggcagactgttcttcgagttttacagactgctgcacgacgcccggcctaaggaaggcgacgaccggcccttcttttggctgttcgagaatgtggtggccatgggagtcagcgacaagcgggatattagccggttcctggagagcaaccccgtgatgatcgatgccaaggaagtgagcgccgcccaccgggccagatacttctggggcaatctgcctggcatgaacagacccctggccagcaccgtgaacgacaagctggagctgcaggagtgcctggagcacggccggatcgccaagttcagcaaggtgagaaccatcaccacccgaagcaacagcatcaaacaaggcaaggaccagcactttcctgtgttcatgaacgagaaggaggacatcctgtggtgtaccgagatggagagagtgttcgggttcccagtccactacacagatgtcagcaacatgtctagactggccagacagagactgctgggaagaagctggtccgtccctgtgatcagacacctgttcgcccctctgaaggagtacttcgcctgcgtgagcagcggcaacagcaacgccaacagccggggccccagcttctctagcggcctggtgccactgtccctgagagggagccacatgggccccatggagatctacaaaaccgtgagcgcctggaagcggcagcctgtgcgcgtgctgagcctgtttcggaatatcgataaagtcctgaaaagcctgggattcctggagagcggctctggctccggcggtggcaccctgaagtacgtggaggatgtgacaaacgtggtcagacgggatgtggagaagtggggccccttcgatctggtgtacggcagcacccaacccctgggcagctcttgtgaccggtgccctggctggtacatgtttcagttccaccggatcctgcagtacgccctgccgagacaggagtcccagcggccattcttttggattttcatggacaacttgctgctgaccgaggatgaccaggaaactaccactcggttcctgcagaccgaagccgtgaccctgcaggacgtgagaggccgggactaccagaacgccatgcgggtgtggtccaacatccctggactgaaaagcaagcacgcacctctgacccctaaagaagaggagtacctgcaggcccaggtgcggagcagaagcaagctggacgcccctaaggtggatctgctggtgaagaattgcctcctgcccctgagagagtacttcaagtatttcagccagaatagtctgcccctgggcggcccaagcagcggcgcccctcctcccagcggcggcagcccagccggctccccaacctctaccgaggagggcacctctgagtccgccacccccgagagcggccctggcacctccaccgagcccagcgagggcagcgcacccggcagccctgccggcagccccacctccacagaggagggaaccagcaccgagcccagcgaaggcagcgccccaggcaccagcaccgagcctagtgagggcggctctggcggcggcagcgcccaggagattaaacggatcaacaagatcagaagaagacttgtgaaagacagcaacaccaagaaggccggcaagacaggccccatgaaaaccctgctggttagagtgatgacacccgatctgagagagcggctggaaaacctgagaaagaagcctgaaaatatcccccagcccatcagcaatacatctagagccaacctgaataagctgctgaccgattacaccgaaatgaagaaggcgatcctgcatgtgtactgggaagagttccagaaggaccctgtgggcctgatgagccgggtggcccagcctgccagcaagaagatcgatcagaacaagctgaaacctgagatggacgagaagggcaacctgaccaccgccggctttgcctgctctcagtgtggccagcccctgttcgtgtacaagctggagcaggtgtctgagaagggcaaggcttacaccaactacttcggacggtgcaatgtggccgagcacgaaaagctgatcctgctggcccagctgaagcccgagaaggatagcgacgaagccgtgacatatagcctgggaaagtttgggcagagggccctggatttctacagcattcatgtgaccaaggagtccacccaccccgtgaagcccctggcccagatcgccggaaacagatacgcctccggacctgtgggaaaggccctgagcgacgcatgtatgggcacaatcgcctccttcctgtctaagtaccaggacatcatcatcgaacaccagaaggtggtgaagggcaaccagaagagactggagagcctgcgggagctggccggcaaggaaaacctggaataccctagcgtgaccctgccacctcagcctcacaccaaggagggcgttgatgcctacaacgaagtgatcgcccgggtgcgaatgtgggtgaacctgaacctgtggcagaagctgaagctaagcagagatgatgccaagcctctgctgagactgaagggattcccttcctttcctctggtcgagagacaggccaacgaagtggactggtgggacatggtgtgtaacgtgaagaagctgatcaacgagaaaaaggaggatggcaaggtgttttggcagaatctggctggctacaagagacaggaagccctgagaccatacctgagcagcgaggaagatcggaagaagggaaagaaattcgctcggtaccagctgggcgacctgctgctgcacctggaaaagaagcacggcgaggactggggaaaggtgtacgacgaggcctgggagcggattgacaagaaagtggaaggcctgagcaagcacatcaagctggaagaggaacggagaagcgaggacgcccagagcaaggccgccctgaccgactggctgcgggctaaggccagcttcgtgatcgagggcctgaaggaggccgacaaggacgagttctgcagatgcgagctgaagctgcagaagtggtacggggacctgcggggaaagcccttcgccatcgaagccgagaacagcatcctggacatcagcggcttcagcaagcagtacaactgtgccttcatctggcagaaggacggcgtgaagaagctgaacctgtacctgatcatcaactacttcaagggcggcaagctgcggttcaagaagatcaaacctgaagccttcgaagccaacagattctacaccgtgatcaacaaaaagagcggcgagatcgtgcccatggaggtgaacttcaacttcgacgaccccaacctgatcatcctgcctctggcctttggcaagagacagggcagagaattcatctggaacgacctgctgtccctggaaaccggcagcctgaagctggccaacggaagagtgatcgagaagacactgtacaacagaagaacccggcaggatgagcctgccctgttcgtggccctgaccttcgagcggcgggaggtcctggactcctccaatatcaaaccaatgaacctgatcggcgtggcaagaggcgaaaacatccccgccgtgatcgccctgaccgaccccgagggctgcccactgagccggtttaaggatagcctgggaaacccaacccacatcctgagaatcggcgagagctataaggagaagcagcggaccatccaggccaagaaggaggtggagcagcggagagccggcggctacagccggaagtacgccagcaaagccaagaatctggcagacgatatggtgagaaacaccgctagagatctgctgtactacgccgtgacccaggatgccatgctgatcttcgccaacctgagccggggcttcggccggcagggcaagcggaccttcatggccgagagacagtacacacggatggaggactggctgaccgccaagctggcctacgagggcctgagcaagacctacctgtccaagacactggcccagtacacctccaagacatgcagcaactgtgggtttaccatcaccagcgccgactacgacagggtgctggagaagctgaagaagacagcaacaggctggatgaccacaattaacggcaaggagctgaaggtggagggccagattacctactacaacagatacaagagacagaacgtagtcaaggacctgtccgtcgagctggatagactgagcgaagaatctgtgaacaacgacatctcctcctggacaaagggcagaagcggagaagctctgagcctcctgaagaaaagattctcccatagacccgtgcaggagaagttcgtgtgcctgaactgcggcttcgagacacacgcagccgagcaagccgccctgaacatcgccagatcctggctgttcctgcggagccaggagtacaagaaataccagacaaacaagacaaccggcaacaccgataagagagccttcgtcgagacctggcagtccttttaccggaagaagcttaaggaggtgtggaaacctgccgtgcggtctggcggatctggcggaggctccacaagcttccaggaggccgtgaccttcaaggacgtggccgtggccttcaccgaggaggagctgggcctgctggaccccgcccagaggaagctgtacagggacgtgatgctggagaacttcaggaacctggtgagcgtgggccaccagagcttcaagcccgacatgatcagccagctggagagggaggagaagctgtggatgaaggagttccagacccagaggggcaagcacagcggcgacaggaacctgaccagccccaagaaaaagagaaaagtctaagctgccttctgcggggcttgccttctggccatgcccttcttctctcccttgcacctgtacctcttggtctttgaataaagcctgagtaggaaggctagcaaaaaaaaaaaaaaaaaaaaaaaaaaaaaaaaaaaaaaaaaaaaaaaaaaaaaaaaaaaaaaaaaaaaaaaaaaaaaaaa

SEQ ID NO: 6486 - RNA, 5797 nt, synthetic construct
  source 1..5797: mol_type = other RNA
aggaaataagagagaaaagaagagtaagaagaaatataagagccaccatggcccctaagaagaagcgtaaagtgagccggatggaacgcctcgtctacgaggtgcggcagaagtgcagaaacatcgaggacatctgcatctcctgcggatctctgaacgtgaccctggagcacccactgttcatcggcggcatgtgccagaactgtaaaaactgttttctggagtgtgcctatcaatacgacgatgacggctaccagagctactgcaccatctgttgcggcggaagagaggtgctgatgtgtggaaataacaactgctgccggtgcttctgcgtggaatgcgtggacctgctggtgggccccggcgccgcccaggccgctattaaggaagatccttggaactgctacatgtgcggccacaagggcacatacggcctgctgagacggagagaggactggcctagcagactgcagatgttcttcgccaataaccacgaccaggagttcgacccccctaaggtgtaccctcccgtccccgccgagaagagaaagcccatccgggtcctgagcctgttcgatggcatcgccaccggtctgctggtgctgaaggacctgggcatccaggtggataggtacattgcctccgaggtgtgcgaggactccatcaccgtgggaatggtgcgtcatcagggcaagatcatgtacgtgggcgacgtgcggagcgtgacacagaagcatatccaggagtggggccctttcgacctggtgatcggcggcagcccttgcaatgacctgagcatcgtgaacccagcccggaagggcctgtacgagggaaccggcagactgttcttcgagttttacagactgctgcacgacgcccggcctaaggaaggcgacgaccggcccttcttttggctgttcgagaatgtggtggccatgggagtcagcgacaagcgggatattagccggttcctggagagcaaccccgtgatgatcgatgccaaggaagtgagcgccgcccaccgggccagatacttctggggcaatctgcctggcatgaacagacccctggccagcaccgtgaacgacaagctggagctgcaggagtgcctggagcacggccggatcgccaagttcagcaaggtgagaaccatcaccacccgaagcaacagcatcaaacaaggcaaggaccagcactttcctgtgttcatgaacgagaaggaggacatcctgtggtgtaccgagatggagagagtgttcgggttcccagtccactacacagatgtcagcaacatgtctagactggccagacagagactgctgggaagaagctggtccgtccctgtgatcagacacctgttcgcccctctgaaggagtacttcgcctgcgtgagcagcggcaacagcaacgccaacagccggggccccagcttctctagcggcctggtgccactgtccctgagagggagccacatgggccccatggagatctacaaaaccgtgagcgcctggaagcggcagcctgtgcgcgtgctgagcctgtttcggaatatcgataaagtcctgaaaagcctgggattcctggagagcggctctggctccggcggtggcaccctgaagtacgtggaggatgtgacaaacgtggtcagacgggatgtggagaagtggggccccttcgatctggtgtacggcagcacccaacccctgggcagctcttgtgaccggtgccctggctggtacatgtttcagttccaccggatcctgcagtacgccctgccgagacaggagtcccagcggccattcttttggattttcatggacaacttgctgctgaccgaggatgaccaggaaactaccactcggttcctgcagaccgaagccgtgaccctgcaggacgtgagaggccgggactaccagaacgccatgcgggtgtggtccaacatccctggactgaaaagcaagcacgcacctctgacccctaaagaagaggagtacctgcaggcccaggtgcggagcagaagcaagctggacgcccctaaggtggatctgctggtgaagaattgcctcctgcccctgagagagtacttcaagtatttcagccagaatagtctgcccctgggcggcccaagcagcggcgcccctcctcccagcggcggcagcccagccggctccccaacctctaccgaggagggcacctctgagtccgccacccccgagagcggccctggcacctccaccgagcccagcgagggcagcgcacccggcagccctgccggcagccccacctccacagaggagggaaccagcaccgagcccagcgaaggcagcgccccaggcaccagcaccgagcctagtgagggcggctctggcggcggcagcgcccaggagattaaacggatcaacaagatcagaagaagacttgtgaaagacagcaacaccaagaaggccggcaagacaggccccatgaaaaccctgctggttagagtgatgacacccgatctgagagagcggctggaaaacctgagaaagaagcctgaaaatatcccccagcccatcagcaatacatctagagccaacctgaataagctgctgaccgattacaccgaaatgaagaaggcgatcctgcatgtgtactgggaagagttccagaaggaccctgtgggcctgatgagccgggtggcccagcctgccagcaagaagatcgatcagaacaagctgaaacctgagatggacgagaagggcaacctgaccaccgccggctttgcctgctctcagtgtggccagcccctgttcgtgtacaagctggagcaggtgtctgagaagggcaaggcttacaccaactacttcggacggtgcaatgtggccgagcacgaaaagctgatcctgctggcccagctgaagcccgagaaggatagcgacgaagccgtgacatatagcctgggaaagtttgggcagagggccctggatttctacagcattcatgtgaccaaggagtccacccaccccgtgaagcccctggcccagatcgccggaaacagatacgcctccggacctgtgggaaaggccctgagcgacgcatgtatgggcacaatcgcctccttcctgtctaagtaccaggacatcatcatcgaacaccagaaggtggtgaagggcaaccagaagagactggagagcctgcgggagctggccggcaaggaaaacctggaataccctagcgtgaccctgccacctcagcctcacaccaaggagggcgttgatgcctacaacgaagtgatcgcccgggtgcgaatgtgggtgaacctgaacctgtggcagaagctgaagctaagcagagatgatgccaagcctctgctgagactgaagggattcccttcctttcctctggtcgagagacaggccaacgaagtggactggtgggacatggtgtgtaacgtgaagaagctgatcaacgagaaaaaggaggatggcaaggtgttttggcagaatctggctggctacaagagacaggaagccctgagaccatacctgagcagcgaggaagatcggaagaagggaaagaaattcgctcggtaccagctgggcgacctgctgctgcacctggaaaagaagcacggcgaggactggggaaaggtgtacgacgaggcctgggagcggattgacaagaaagtggaaggcctgagcaagcacatcaagctggaagaggaacggagaagcgaggacgcccagagcaaggccgccctgaccgactggctgcgggctaaggccagcttcgtgatcgagggcctgaaggaggccgacaaggacgagttctgcagatgcgagctgaagctgcagaagtggtacggggacctgcggggaaagcccttcgccatcgaagccgagaacagcatcctggacatcagcggcttcagcaagcagtacaactgtgccttcatctggcagaaggacggcgtgaagaagctgaacctgtacctgatcatcaactacttcaagggcggcaagctgcggttcaagaagatcaaacctgaagccttcgaagccaacagattctacaccgtgatcaacaaaaagagcggcgagatcgtgcccatggaggtgaacttcaacttcgacgaccccaacctgatcatcctgcctctggcctttggcaagagacagggcagagaattcatctggaacgacctgctgtccctggaaaccggcagcctgaagctggccaacggaagagtgatcgagaagacactgtacaacagaagaacccggcaggatgagcctgccctgttcgtggccctgaccttcgagcggcgggaggtcctggactcctccaatatcaaaccaatgaacctgatcggcgtggcaagaggcgaaaacatccccgccgtgatcgccctgaccgaccccgagggctgcccactgagccggtttaaggatagcctgggaaacccaacccacatcctgagaatcggcgagagctataaggagaagcagcggaccatccaggccaagaaggaggtggagcagcggagagccggcggctacagccggaagtacgccagcaaagccaagaatctggcagacgatatggtgagaaacaccgctagagatctgctgtactacgccgtgacccaggatgccatgctgatcttcgccaacctgagccggggcttcggccggcagggcaagcggaccttcatggccgagagacagtacacacggatggaggactggctgaccgccaagctggcctacgagggcctgagcaagacctacctgtccaagacactggcccagtacacctccaagacatgcagcaactgtgggtttaccatcaccagcgccgactacgacagggtgctggagaagctgaagaagacagcaacaggctggatgaccacaattaacggcaaggagctgaaggtggagggccagattacctactacaacagatacaagagacagaacgtagtcaaggacctgtccgtcgagctggatagactgagcgaagaatctgtgaacaacgacatctcctcctggacaaagggcagaagcggagaagctctgagcctcctgaagaaaagattctcccatagacccgtgcaggagaagttcgtgtgcctgaactgcggcttcgagacacacgcagccgagcaagccgccctgaacatcgccagatcctggctgttcctgcggagccaggagtacaagaaataccagacaaacaagacaaccggcaacaccgataagagagccttcgtcgagacctggcagtccttttaccggaagaagcttaaggaggtgtggaaacctgccgtgcggtctggcggatctggcggaggctccacaagcagccaggtgagcgtgaccttcgaggacgtggccgtgctgttcaccagggacgagtggaagaagctggtgcccagccagaggagcctgtacagggaggtgatgctggagaactacagcaacctggccagcctggccggcttccccttcaccaagcccaaggtgatcagcctgctgcagcagggcgaggacccctggaaggtggaggaggagggccccggcggcttcagcctgggcctgaagtgcaccagccccaagaaaaagagaaaagtctaagctgccttctgcggggcttgccttctggccatgcccttcttctctcccttgcacctgtacctcttggtctttgaataaagcctgagtaggaaggctagcaaaaaaaaaaaaaaaaaaaaaaaaaaaaaaaaaaaaaaaaaaaaaaaaaaaaaaaaaaaaaaaaaaaaaaaaaaaaaaaa

SEQ ID NO: 6487 - RNA, 5797 nt, synthetic construct
  source 1..5797: mol_type = other RNA
aggaaataagagagaaaagaagagtaagaagaaatataagagccaccatggcccctaagaagaagcgtaaagtgagccggatggaacgcctcgtctacgaggtgcggcagaagtgcagaaacatcgaggacatctgcatctcctgcggatctctgaacgtgaccctggagcacccactgttcatcggcggcatgtgccagaactgtaaaaactgttttctggagtgtgcctatcaatacgacgatgacggctaccagagctactgcaccatctgttgcggcggaagagaggtgctgatgtgtggaaataacaactgctgccggtgcttctgcgtggaatgcgtggacctgctggtgggccccggcgccgcccaggccgctattaaggaagatccttggaactgctacatgtgcggccacaagggcacatacggcctgctgagacggagagaggactggcctagcagactgcagatgttcttcgccaataaccacgaccaggagttcgacccccctaaggtgtaccctcccgtccccgccgagaagagaaagcccatccgggtcctgagcctgttcgatggcatcgccaccggtctgctggtgctgaaggacctgggcatccaggtggataggtacattgcctccgaggtgtgcgaggactccatcaccgtgggaatggtgcgtcatcagggcaagatcatgtacgtgggcgacgtgcggagcgtgacacagaagcatatccaggagtggggccctttcgacctggtgatcggcggcagcccttgcaatgacctgagcatcgtgaacccagcccggaagggcctgtacgagggaaccggcagactgttcttcgagttttacagactgctgcacgacgcccggcctaaggaaggcgacgaccggcccttcttttggctgttcgagaatgtggtggccatgggagtcagcgacaagcgggatattagccggttcctggagagcaaccccgtgatgatcgatgccaaggaagtgagcgccgcccaccgggccagatacttctggggcaatctgcctggcatgaacagacccctggccagcaccgtgaacgacaagctggagctgcaggagtgcctggagcacggccggatcgccaagttcagcaaggtgagaaccatcaccacccgaagcaacagcatcaaacaaggcaaggaccagcactttcctgtgttcatgaacgagaaggaggacatcctgtggtgtaccgagatggagagagtgttcgggttcccagtccactacacagatgtcagcaacatgtctagactggccagacagagactgctgggaagaagctggtccgtccctgtgatcagacacctgttcgcccctctgaaggagtacttcgcctgcgtgagcagcggcaacagcaacgccaacagccggggccccagcttctctagcggcctggtgccactgtccctgagagggagccacatgggccccatggagatctacaaaaccgtgagcgcctggaagcggcagcctgtgcgcgtgctgagcctgtttcggaatatcgataaagtcctgaaaagcctgggattcctggagagcggctctggctccggcggtggcaccctgaagtacgtggaggatgtgacaaacgtggtcagacgggatgtggagaagtggggccccttcgatctggtgtacggcagcacccaacccctgggcagctcttgtgaccggtgccctggctggtacatgtttcagttccaccggatcctgcagtacgccctgccgagacaggagtcccagcggccattcttttggattttcatggacaacttgctgctgaccgaggatgaccaggaaactaccactcggttcctgcagaccgaagccgtgaccctgcaggacgtgagaggccgggactaccagaacgccatgcgggtgtggtccaacatccctggactgaaaagcaagcacgcacctctgacccctaaagaagaggagtacctgcaggcccaggtgcggagcagaagcaagctggacgcccctaaggtggatctgctggtgaagaattgcctcctgcccctgagagagtacttcaagtatttcagccagaatagtctgcccctgggcggcccaagcagcggcgcccctcctcccagcggcggcagcccagccggctccccaacctctaccgaggagggcacctctgagtccgccacccccgagagcggccctggcacctccaccgagcccagcgagggcagcgcacccggcagccctgccggcagccccacctccacagaggagggaaccagcaccgagcccagcgaaggcagcgccccaggcaccagcaccgagcctagtgagggcggctctggcggcggcagcgcccaggagattaaacggatcaacaagatcagaagaagacttgtgaaagacagcaacaccaagaaggccggcaagacaggccccatgaaaaccctgctggttagagtgatgacacccgatctgagagagcggctggaaaacctgagaaagaagcctgaaaatatcccccagcccatcagcaatacatctagagccaacctgaataagctgctgaccgattacaccgaaatgaagaaggcgatcctgcatgtgtactgggaagagttccagaaggaccctgtgggcctgatgagccgggtggcccagcctgccagcaagaagatcgatcagaacaagctgaaacctgagatggacgagaagggcaacctgaccaccgccggctttgcctgctctcagtgtggccagcccctgttcgtgtacaagctggagcaggtgtctgagaagggcaaggcttacaccaactacttcggacggtgcaatgtggccgagcacgaaaagctgatcctgctggcccagctgaagcccgagaaggatagcgacgaagccgtgacatatagcctgggaaagtttgggcagagggccctggatttctacagcattcatgtgaccaaggagtccacccaccccgtgaagcccctggcccagatcgccggaaacagatacgcctccggacctgtgggaaaggccctgagcgacgcatgtatgggcacaatcgcctccttcctgtctaagtaccaggacatcatcatcgaacaccagaaggtggtgaagggcaaccagaagagactggagagcctgcgggagctggccggcaaggaaaacctggaataccctagcgtgaccctgccacctcagcctcacaccaaggagggcgttgatgcctacaacgaagtgatcgcccgggtgcgaatgtgggtgaacctgaacctgtggcagaagctgaagctaagcagagatgatgccaagcctctgctgagactgaagggattcccttcctttcctctggtcgagagacaggccaacgaagtggactggtgggacatggtgtgtaacgtgaagaagctgatcaacgagaaaaaggaggatggcaaggtgttttggcagaatctggctggctacaagagacaggaagccctgagaccatacctgagcagcgaggaagatcggaagaagggaaagaaattcgctcggtaccagctgggcgacctgctgctgcacctggaaaagaagcacggcgaggactggggaaaggtgtacgacgaggcctgggagcggattgacaagaaagtggaaggcctgagcaagcacatcaagctggaagaggaacggagaagcgaggacgcccagagcaaggccgccctgaccgactggctgcgggctaaggccagcttcgtgatcgagggcctgaaggaggccgacaaggacgagttctgcagatgcgagctgaagctgcagaagtggtacggggacctgcggggaaagcccttcgccatcgaagccgagaacagcatcctggacatcagcggcttcagcaagcagtacaactgtgccttcatctggcagaaggacggcgtgaagaagctgaacctgtacctgatcatcaactacttcaagggcggcaagctgcggttcaagaagatcaaacctgaagccttcgaagccaacagattctacaccgtgatcaacaaaaagagcggcgagatcgtgcccatggaggtgaacttcaacttcgacgaccccaacctgatcatcctgcctctggcctttggcaagagacagggcagagaattcatctggaacgacctgctgtccctggaaaccggcagcctgaagctggccaacggaagagtgatcgagaagacactgtacaacagaagaacccggcaggatgagcctgccctgttcgtggccctgaccttcgagcggcgggaggtcctggactcctccaatatcaaaccaatgaacctgatcggcgtggcaagaggcgaaaacatccccgccgtgatcgccctgaccgaccccgagggctgcccactgagccggtttaaggatagcctgggaaacccaacccacatcctgagaatcggcgagagctataaggagaagcagcggaccatccaggccaagaaggaggtggagcagcggagagccggcggctacagccggaagtacgccagcaaagccaagaatctggcagacgatatggtgagaaacaccgctagagatctgctgtactacgccgtgacccaggatgccatgctgatcttcgccaacctgagccggggcttcggccggcagggcaagcggaccttcatggccgagagacagtacacacggatggaggactggctgaccgccaagctggcctacgagggcctgagcaagacctacctgtccaagacactggcccagtacacctccaagacatgcagcaactgtgggtttaccatcaccagcgccgactacgacagggtgctggagaagctgaagaagacagcaacaggctggatgaccacaattaacggcaaggagctgaaggtggagggccagattacctactacaacagatacaagagacagaacgtagtcaaggacctgtccgtcgagctggatagactgagcgaagaatctgtgaacaacgacatctcctcctggacaaagggcagaagcggagaagctctgagcctcctgaagaaaagattctcccatagacccgtgcaggagaagttcgtgtgcctgaactgcggcttcgagacacacgcagccgagcaagccgccctgaacatcgccagatcctggctgttcctgcggagccaggagtacaagaaataccagacaaacaagacaaccggcaacaccgataagagagccttcgtcgagacctggcagtccttttaccggaagaagcttaaggaggtgtggaaacctgccgtgcggtctggcggatctggcggaggctccacaagcttccaggtgcccgtgaccttcagggacgtggccgtgtacttctgcagggaggagtgggagtgcctgagccccagccagaggaccctgtacaggaacgtgatgctggagaacttcaggaacctgaacgagctgggctgctgcagcaggaggcccggcctgatcaccaggctggagcagtgggacgagccctgggtggacgactgggacaggagcgagttccccgacggccagaagagcttctgcaccagccccaagaaaaagagaaaagtctaagctgccttctgcggggcttgccttctggccatgcccttcttctctcccttgcacctgtacctcttggtctttgaataaagcctgagtaggaaggctagcaaaaaaaaaaaaaaaaaaaaaaaaaaaaaaaaaaaaaaaaaaaaaaaaaaaaaaaaaaaaaaaaaaaaaaaaaaaaaaaa

SEQ ID NO: 6488 - RNA, 5797 nt, synthetic construct
  source 1..5797: mol_type = other RNA
aggaaataagagagaaaagaagagtaagaagaaatataagagccaccatggcccctaagaagaagcgtaaagtgagccggatggaacgcctcgtctacgaggtgcggcagaagtgcagaaacatcgaggacatctgcatctcctgcggatctctgaacgtgaccctggagcacccactgttcatcggcggcatgtgccagaactgtaaaaactgttttctggagtgtgcctatcaatacgacgatgacggctaccagagctactgcaccatctgttgcggcggaagagaggtgctgatgtgtggaaataacaactgctgccggtgcttctgcgtggaatgcgtggacctgctggtgggccccggcgccgcccaggccgctattaaggaagatccttggaactgctacatgtgcggccacaagggcacatacggcctgctgagacggagagaggactggcctagcagactgcagatgttcttcgccaataaccacgaccaggagttcgacccccctaaggtgtaccctcccgtccccgccgagaagagaaagcccatccgggtcctgagcctgttcgatggcatcgccaccggtctgctggtgctgaaggacctgggcatccaggtggataggtacattgcctccgaggtgtgcgaggactccatcaccgtgggaatggtgcgtcatcagggcaagatcatgtacgtgggcgacgtgcggagcgtgacacagaagcatatccaggagtggggccctttcgacctggtgatcggcggcagcccttgcaatgacctgagcatcgtgaacccagcccggaagggcctgtacgagggaaccggcagactgttcttcgagttttacagactgctgcacgacgcccggcctaaggaaggcgacgaccggcccttcttttggctgttcgagaatgtggtggccatgggagtcagcgacaagcgggatattagccggttcctggagagcaaccccgtgatgatcgatgccaaggaagtgagcgccgcccaccgggccagatacttctggggcaatctgcctggcatgaacagacccctggccagcaccgtgaacgacaagctggagctgcaggagtgcctggagcacggccggatcgccaagttcagcaaggtgagaaccatcaccacccgaagcaacagcatcaaacaaggcaaggaccagcactttcctgtgttcatgaacgagaaggaggacatcctgtggtgtaccgagatggagagagtgttcgggttcccagtccactacacagatgtcagcaacatgtctagactggccagacagagactgctgggaagaagctggtccgtccctgtgatcagacacctgttcgcccctctgaaggagtacttcgcctgcgtgagcagcggcaacagcaacgccaacagccggggccccagcttctctagcggcctggtgccactgtccctgagagggagccacatgggccccatggagatctacaaaaccgtgagcgcctggaagcggcagcctgtgcgcgtgctgagcctgtttcggaatatcgataaagtcctgaaaagcctgggattcctggagagcggctctggctccggcggtggcaccctgaagtacgtggaggatgtgacaaacgtggtcagacgggatgtggagaagtggggccccttcgatctggtgtacggcagcacccaacccctgggcagctcttgtgaccggtgccctggctggtacatgtttcagttccaccggatcctgcagtacgccctgccgagacaggagtcccagcggccattcttttggattttcatggacaacttgctgctgaccgaggatgaccaggaaactaccactcggttcctgcagaccgaagccgtgaccctgcaggacgtgagaggccgggactaccagaacgccatgcgggtgtggtccaacatccctggactgaaaagcaagcacgcacctctgacccctaaagaagaggagtacctgcaggcccaggtgcggagcagaagcaagctggacgcccctaaggtggatctgctggtgaagaattgcctcctgcccctgagagagtacttcaagtatttcagccagaatagtctgcccctgggcggcccaagcagcggcgcccctcctcccagcggcggcagcccagccggctccccaacctctaccgaggagggcacctctgagtccgccacccccgagagcggccctggcacctccaccgagcccagcgagggcagcgcacccggcagccctgccggcagccccacctccacagaggagggaaccagcaccgagcccagcgaaggcagcgccccaggcaccagcaccgagcctagtgagggcggctctggcggcggcagcgcccaggagattaaacggatcaacaagatcagaagaagacttgtgaaagacagcaacaccaagaaggccggcaagacaggccccatgaaaaccctgctggttagagtgatgacacccgatctgagagagcggctggaaaacctgagaaagaagcctgaaaatatcccccagcccatcagcaatacatctagagccaacctgaataagctgctgaccgattacaccgaaatgaagaaggcgatcctgcatgtgtactgggaagagttccagaaggaccctgtgggcctgatgagccgggtggcccagcctgccagcaagaagatcgatcagaacaagctgaaacctgagatggacgagaagggcaacctgaccaccgccggctttgcctgctctcagtgtggccagcccctgttcgtgtacaagctggagcaggtgtctgagaagggcaaggcttacaccaactacttcggacggtgcaatgtggccgagcacgaaaagctgatcctgctggcccagctgaagcccgagaaggatagcgacgaagccgtgacatatagcctgggaaagtttgggcagagggccctggatttctacagcattcatgtgaccaaggagtccacccaccccgtgaagcccctggcccagatcgccggaaacagatacgcctccggacctgtgggaaaggccctgagcgacgcatgtatgggcacaatcgcctccttcctgtctaagtaccaggacatcatcatcgaacaccagaaggtggtgaagggcaaccagaagagactggagagcctgcgggagctggccggcaaggaaaacctggaataccctagcgtgaccctgccacctcagcctcacaccaaggagggcgttgatgcctacaacgaagtgatcgcccgggtgcgaatgtgggtgaacctgaacctgtggcagaagctgaagctaagcagagatgatgccaagcctctgctgagactgaagggattcccttcctttcctctggtcgagagacaggccaacgaagtggactggtgggacatggtgtgtaacgtgaagaagctgatcaacgagaaaaaggaggatggcaaggtgttttggcagaatctggctggctacaagagacaggaagccctgagaccatacctgagcagcgaggaagatcggaagaagggaaagaaattcgctcggtaccagctgggcgacctgctgctgcacctggaaaagaagcacggcgaggactggggaaaggtgtacgacgaggcctgggagcggattgacaagaaagtggaaggcctgagcaagcacatcaagctggaagaggaacggagaagcgaggacgcccagagcaaggccgccctgaccgactggctgcgggctaaggccagcttcgtgatcgagggcctgaaggaggccgacaaggacgagttctgcagatgcgagctgaagctgcagaagtggtacggggacctgcggggaaagcccttcgccatcgaagccgagaacagcatcctggacatcagcggcttcagcaagcagtacaactgtgccttcatctggcagaaggacggcgtgaagaagctgaacctgtacctgatcatcaactacttcaagggcggcaagctgcggttcaagaagatcaaacctgaagccttcgaagccaacagattctacaccgtgatcaacaaaaagagcggcgagatcgtgcccatggaggtgaacttcaacttcgacgaccccaacctgatcatcctgcctctggcctttggcaagagacagggcagagaattcatctggaacgacctgctgtccctggaaaccggcagcctgaagctggccaacggaagagtgatcgagaagacactgtacaacagaagaacccggcaggatgagcctgccctgttcgtggccctgaccttcgagcggcgggaggtcctggactcctccaatatcaaaccaatgaacctgatcggcgtggcaagaggcgaaaacatccccgccgtgatcgccctgaccgaccccgagggctgcccactgagccggtttaaggatagcctgggaaacccaacccacatcctgagaatcggcgagagctataaggagaagcagcggaccatccaggccaagaaggaggtggagcagcggagagccggcggctacagccggaagtacgccagcaaagccaagaatctggcagacgatatggtgagaaacaccgctagagatctgctgtactacgccgtgacccaggatgccatgctgatcttcgccaacctgagccggggcttcggccggcagggcaagcggaccttcatggccgagagacagtacacacggatggaggactggctgaccgccaagctggcctacgagggcctgagcaagacctacctgtccaagacactggcccagtacacctccaagacatgcagcaactgtgggtttaccatcaccagcgccgactacgacagggtgctggagaagctgaagaagacagcaacaggctggatgaccacaattaacggcaaggagctgaaggtggagggccagattacctactacaacagatacaagagacagaacgtagtcaaggacctgtccgtcgagctggatagactgagcgaagaatctgtgaacaacgacatctcctcctggacaaagggcagaagcggagaagctctgagcctcctgaagaaaagattctcccatagacccgtgcaggagaagttcgtgtgcctgaactgcggcttcgagacacacgcagccgagcaagccgccctgaacatcgccagatcctggctgttcctgcggagccaggagtacaagaaataccagacaaacaagacaaccggcaacaccgataagagagccttcgtcgagacctggcagtccttttaccggaagaagcttaaggaggtgtggaaacctgccgtgcggtctggcggatctggcggaggctccacaagcagcgtgaccttcgaggacgtggccgtgtacttcagctgggaggagtgggccctgctggacgaggcccagaggtgcctgtaccacgacgtgatgctggagaacttcgccctgaccagcagcctgggctgctggcacggcgccgaggacaagggcgcccccagcgagaagagcatcagcgtggagggcgtgagccagatcaagaccctgaaggccgacagctgcccccagaagggccagcccttcaccagccccaagaaaaagagaaaagtctaagctgccttctgcggggcttgccttctggccatgcccttcttctctcccttgcacctgtacctcttggtctttgaataaagcctgagtaggaaggctagcaaaaaaaaaaaaaaaaaaaaaaaaaaaaaaaaaaaaaaaaaaaaaaaaaaaaaaaaaaaaaaaaaaaaaaaaaaaaaaaa

SEQ ID NO: 6489 - RNA, 5797 nt, synthetic construct
  source 1..5797: mol_type = other RNA
aggaaataagagagaaaagaagagtaagaagaaatataagagccaccatggcccctaagaagaagcgtaaagtgagccggatggaacgcctcgtctacgaggtgcggcagaagtgcagaaacatcgaggacatctgcatctcctgcggatctctgaacgtgaccctggagcacccactgttcatcggcggcatgtgccagaactgtaaaaactgttttctggagtgtgcctatcaatacgacgatgacggctaccagagctactgcaccatctgttgcggcggaagagaggtgctgatgtgtggaaataacaactgctgccggtgcttctgcgtggaatgcgtggacctgctggtgggccccggcgccgcccaggccgctattaaggaagatccttggaactgctacatgtgcggccacaagggcacatacggcctgctgagacggagagaggactggcctagcagactgcagatgttcttcgccaataaccacgaccaggagttcgacccccctaaggtgtaccctcccgtccccgccgagaagagaaagcccatccgggtcctgagcctgttcgatggcatcgccaccggtctgctggtgctgaaggacctgggcatccaggtggataggtacattgcctccgaggtgtgcgaggactccatcaccgtgggaatggtgcgtcatcagggcaagatcatgtacgtgggcgacgtgcggagcgtgacacagaagcatatccaggagtggggccctttcgacctggtgatcggcggcagcccttgcaatgacctgagcatcgtgaacccagcccggaagggcctgtacgagggaaccggcagactgttcttcgagttttacagactgctgcacgacgcccggcctaaggaaggcgacgaccggcccttcttttggctgttcgagaatgtggtggccatgggagtcagcgacaagcgggatattagccggttcctggagagcaaccccgtgatgatcgatgccaaggaagtgagcgccgcccaccgggccagatacttctggggcaatctgcctggcatgaacagacccctggccagcaccgtgaacgacaagctggagctgcaggagtgcctggagcacggccggatcgccaagttcagcaaggtgagaaccatcaccacccgaagcaacagcatcaaacaaggcaaggaccagcactttcctgtgttcatgaacgagaaggaggacatcctgtggtgtaccgagatggagagagtgttcgggttcccagtccactacacagatgtcagcaacatgtctagactggccagacagagactgctgggaagaagctggtccgtccctgtgatcagacacctgttcgcccctctgaaggagtacttcgcctgcgtgagcagcggcaacagcaacgccaacagccggggccccagcttctctagcggcctggtgccactgtccctgagagggagccacatgggccccatggagatctacaaaaccgtgagcgcctggaagcggcagcctgtgcgcgtgctgagcctgtttcggaatatcgataaagtcctgaaaagcctgggattcctggagagcggctctggctccggcggtggcaccctgaagtacgtggaggatgtgacaaacgtggtcagacgggatgtggagaagtggggccccttcgatctggtgtacggcagcacccaacccctgggcagctcttgtgaccggtgccctggctggtacatgtttcagttccaccggatcctgcagtacgccctgccgagacaggagtcccagcggccattcttttggattttcatggacaacttgctgctgaccgaggatgaccaggaaactaccactcggttcctgcagaccgaagccgtgaccctgcaggacgtgagaggccgggactaccagaacgccatgcgggtgtggtccaacatccctggactgaaaagcaagcacgcacctctgacccctaaagaagaggagtacctgcaggcccaggtgcggagcagaagcaagctggacgcccctaaggtggatctgctggtgaagaattgcctcctgcccctgagagagtacttcaagtatttcagccagaatagtctgcccctgggcggcccaagcagcggcgcccctcctcccagcggcggcagcccagccggctccccaacctctaccgaggagggcacctctgagtccgccacccccgagagcggccctggcacctccaccgagcccagcgagggcagcgcacccggcagccctgccggcagccccacctccacagaggagggaaccagcaccgagcccagcgaaggcagcgccccaggcaccagcaccgagcctagtgagggcggctctggcggcggcagcgcccaggagattaaacggatcaacaagatcagaagaagacttgtgaaagacagcaacaccaagaaggccggcaagacaggccccatgaaaaccctgctggttagagtgatgacacccgatctgagagagcggctggaaaacctgagaaagaagcctgaaaatatcccccagcccatcagcaatacatctagagccaacctgaataagctgctgaccgattacaccgaaatgaagaaggcgatcctgcatgtgtactgggaagagttccagaaggaccctgtgggcctgatgagccgggtggcccagcctgccagcaagaagatcgatcagaacaagctgaaacctgagatggacgagaagggcaacctgaccaccgccggctttgcctgctctcagtgtggccagcccctgttcgtgtacaagctggagcaggtgtctgagaagggcaaggcttacaccaactacttcggacggtgcaatgtggccgagcacgaaaagctgatcctgctggcccagctgaagcccgagaaggatagcgacgaagccgtgacatatagcctgggaaagtttgggcagagggccctggatttctacagcattcatgtgaccaaggagtccacccaccccgtgaagcccctggcccagatcgccggaaacagatacgcctccggacctgtgggaaaggccctgagcgacgcatgtatgggcacaatcgcctccttcctgtctaagtaccaggacatcatcatcgaacaccagaaggtggtgaagggcaaccagaagagactggagagcctgcgggagctggccggcaaggaaaacctggaataccctagcgtgaccctgccacctcagcctcacaccaaggagggcgttgatgcctacaacgaagtgatcgcccgggtgcgaatgtgggtgaacctgaacctgtggcagaagctgaagctaagcagagatgatgccaagcctctgctgagactgaagggattcccttcctttcctctggtcgagagacaggccaacgaagtggactggtgggacatggtgtgtaacgtgaagaagctgatcaacgagaaaaaggaggatggcaaggtgttttggcagaatctggctggctacaagagacaggaagccctgagaccatacctgagcagcgaggaagatcggaagaagggaaagaaattcgctcggtaccagctgggcgacctgctgctgcacctggaaaagaagcacggcgaggactggggaaaggtgtacgacgaggcctgggagcggattgacaagaaagtggaaggcctgagcaagcacatcaagctggaagaggaacggagaagcgaggacgcccagagcaaggccgccctgaccgactggctgcgggctaaggccagcttcgtgatcgagggcctgaaggaggccgacaaggacgagttctgcagatgcgagctgaagctgcagaagtggtacggggacctgcggggaaagcccttcgccatcgaagccgagaacagcatcctggacatcagcggcttcagcaagcagtacaactgtgccttcatctggcagaaggacggcgtgaagaagctgaacctgtacctgatcatcaactacttcaagggcggcaagctgcggttcaagaagatcaaacctgaagccttcgaagccaacagattctacaccgtgatcaacaaaaagagcggcgagatcgtgcccatggaggtgaacttcaacttcgacgaccccaacctgatcatcctgcctctggcctttggcaagagacagggcagagaattcatctggaacgacctgctgtccctggaaaccggcagcctgaagctggccaacggaagagtgatcgagaagacactgtacaacagaagaacccggcaggatgagcctgccctgttcgtggccctgaccttcgagcggcgggaggtcctggactcctccaatatcaaaccaatgaacctgatcggcgtggcaagaggcgaaaacatccccgccgtgatcgccctgaccgaccccgagggctgcccactgagccggtttaaggatagcctgggaaacccaacccacatcctgagaatcggcgagagctataaggagaagcagcggaccatccaggccaagaaggaggtggagcagcggagagccggcggctacagccggaagtacgccagcaaagccaagaatctggcagacgatatggtgagaaacaccgctagagatctgctgtactacgccgtgacccaggatgccatgctgatcttcgccaacctgagccggggcttcggccggcagggcaagcggaccttcatggccgagagacagtacacacggatggaggactggctgaccgccaagctggcctacgagggcctgagcaagacctacctgtccaagacactggcccagtacacctccaagacatgcagcaactgtgggtttaccatcaccagcgccgactacgacagggtgctggagaagctgaagaagacagcaacaggctggatgaccacaattaacggcaaggagctgaaggtggagggccagattacctactacaacagatacaagagacagaacgtagtcaaggacctgtccgtcgagctggatagactgagcgaagaatctgtgaacaacgacatctcctcctggacaaagggcagaagcggagaagctctgagcctcctgaagaaaagattctcccatagacccgtgcaggagaagttcgtgtgcctgaactgcggcttcgagacacacgcagccgagcaagccgccctgaacatcgccagatcctggctgttcctgcggagccaggagtacaagaaataccagacaaacaagacaaccggcaacaccgataagagagccttcgtcgagacctggcagtccttttaccggaagaagcttaaggaggtgtggaaacctgccgtgcggtctggcggatctggcggaggctccacaagcatggcccacctgatgatgttcagggacgtggccgtggacttcagccaggaggagtgggagtgcctggacctggagcagagggacctgtacagggacgtgatgctggagaactacagcaacatggtgagcctgggcctgtgcatctaccagcccgaggccttcagcctgctggagaagggcaaggacccctggaagatcctgagggacgagaccaggaggccctgccccgacatgcagagcaggaccagccccaagaaaaagagaaaagtctaagctgccttctgcggggcttgccttctggccatgcccttcttctctcccttgcacctgtacctcttggtctttgaataaagcctgagtaggaaggctagcaaaaaaaaaaaaaaaaaaaaaaaaaaaaaaaaaaaaaaaaaaaaaaaaaaaaaaaaaaaaaaaaaaaaaaaaaaaaaaaa

SEQ ID NO: 6490 - RNA, 5797 nt, synthetic construct
  source 1..5797: mol_type = other RNA
aggaaataagagagaaaagaagagtaagaagaaatataagagccaccatggcccctaagaagaagcgtaaagtgagccggatggaacgcctcgtctacgaggtgcggcagaagtgcagaaacatcgaggacatctgcatctcctgcggatctctgaacgtgaccctggagcacccactgttcatcggcggcatgtgccagaactgtaaaaactgttttctggagtgtgcctatcaatacgacgatgacggctaccagagctactgcaccatctgttgcggcggaagagaggtgctgatgtgtggaaataacaactgctgccggtgcttctgcgtggaatgcgtggacctgctggtgggccccggcgccgcccaggccgctattaaggaagatccttggaactgctacatgtgcggccacaagggcacatacggcctgctgagacggagagaggactggcctagcagactgcagatgttcttcgccaataaccacgaccaggagttcgacccccctaaggtgtaccctcccgtccccgccgagaagagaaagcccatccgggtcctgagcctgttcgatggcatcgccaccggtctgctggtgctgaaggacctgggcatccaggtggataggtacattgcctccgaggtgtgcgaggactccatcaccgtgggaatggtgcgtcatcagggcaagatcatgtacgtgggcgacgtgcggagcgtgacacagaagcatatccaggagtggggccctttcgacctggtgatcggcggcagcccttgcaatgacctgagcatcgtgaacccagcccggaagggcctgtacgagggaaccggcagactgttcttcgagttttacagactgctgcacgacgcccggcctaaggaaggcgacgaccggcccttcttttggctgttcgagaatgtggtggccatgggagtcagcgacaagcgggatattagccggttcctggagagcaaccccgtgatgatcgatgccaaggaagtgagcgccgcccaccgggccagatacttctggggcaatctgcctggcatgaacagacccctggccagcaccgtgaacgacaagctggagctgcaggagtgcctggagcacggccggatcgccaagttcagcaaggtgagaaccatcaccacccgaagcaacagcatcaaacaaggcaaggaccagcactttcctgtgttcatgaacgagaaggaggacatcctgtggtgtaccgagatggagagagtgttcgggttcccagtccactacacagatgtcagcaacatgtctagactggccagacagagactgctgggaagaagctggtccgtccctgtgatcagacacctgttcgcccctctgaaggagtacttcgcctgcgtgagcagcggcaacagcaacgccaacagccggggccccagcttctctagcggcctggtgccactgtccctgagagggagccacatgggccccatggagatctacaaaaccgtgagcgcctggaagcggcagcctgtgcgcgtgctgagcctgtttcggaatatcgataaagtcctgaaaagcctgggattcctggagagcggctctggctccggcggtggcaccctgaagtacgtggaggatgtgacaaacgtggtcagacgggatgtggagaagtggggccccttcgatctggtgtacggcagcacccaacccctgggcagctcttgtgaccggtgccctggctggtacatgtttcagttccaccggatcctgcagtacgccctgccgagacaggagtcccagcggccattcttttggattttcatggacaacttgctgctgaccgaggatgaccaggaaactaccactcggttcctgcagaccgaagccgtgaccctgcaggacgtgagaggccgggactaccagaacgccatgcgggtgtggtccaacatccctggactgaaaagcaagcacgcacctctgacccctaaagaagaggagtacctgcaggcccaggtgcggagcagaagcaagctggacgcccctaaggtggatctgctggtgaagaattgcctcctgcccctgagagagtacttcaagtatttcagccagaatagtctgcccctgggcggcccaagcagcggcgcccctcctcccagcggcggcagcccagccggctccccaacctctaccgaggagggcacctctgagtccgccacccccgagagcggccctggcacctccaccgagcccagcgagggcagcgcacccggcagccctgccggcagccccacctccacagaggagggaaccagcaccgagcccagcgaaggcagcgccccaggcaccagcaccgagcctagtgagggcggctctggcggcggcagcgcccaggagattaaacggatcaacaagatcagaagaagacttgtgaaagacagcaacaccaagaaggccggcaagacaggccccatgaaaaccctgctggttagagtgatgacacccgatctgagagagcggctggaaaacctgagaaagaagcctgaaaatatcccccagcccatcagcaatacatctagagccaacctgaataagctgctgaccgattacaccgaaatgaagaaggcgatcctgcatgtgtactgggaagagttccagaaggaccctgtgggcctgatgagccgggtggcccagcctgccagcaagaagatcgatcagaacaagctgaaacctgagatggacgagaagggcaacctgaccaccgccggctttgcctgctctcagtgtggccagcccctgttcgtgtacaagctggagcaggtgtctgagaagggcaaggcttacaccaactacttcggacggtgcaatgtggccgagcacgaaaagctgatcctgctggcccagctgaagcccgagaaggatagcgacgaagccgtgacatatagcctgggaaagtttgggcagagggccctggatttctacagcattcatgtgaccaaggagtccacccaccccgtgaagcccctggcccagatcgccggaaacagatacgcctccggacctgtgggaaaggccctgagcgacgcatgtatgggcacaatcgcctccttcctgtctaagtaccaggacatcatcatcgaacaccagaaggtggtgaagggcaaccagaagagactggagagcctgcgggagctggccggcaaggaaaacctggaataccctagcgtgaccctgccacctcagcctcacaccaaggagggcgttgatgcctacaacgaagtgatcgcccgggtgcgaatgtgggtgaacctgaacctgtggcagaagctgaagctaagcagagatgatgccaagcctctgctgagactgaagggattcccttcctttcctctggtcgagagacaggccaacgaagtggactggtgggacatggtgtgtaacgtgaagaagctgatcaacgagaaaaaggaggatggcaaggtgttttggcagaatctggctggctacaagagacaggaagccctgagaccatacctgagcagcgaggaagatcggaagaagggaaagaaattcgctcggtaccagctgggcgacctgctgctgcacctggaaaagaagcacggcgaggactggggaaaggtgtacgacgaggcctgggagcggattgacaagaaagtggaaggcctgagcaagcacatcaagctggaagaggaacggagaagcgaggacgcccagagcaaggccgccctgaccgactggctgcgggctaaggccagcttcgtgatcgagggcctgaaggaggccgacaaggacgagttctgcagatgcgagctgaagctgcagaagtggtacggggacctgcggggaaagcccttcgccatcgaagccgagaacagcatcctggacatcagcggcttcagcaagcagtacaactgtgccttcatctggcagaaggacggcgtgaagaagctgaacctgtacctgatcatcaactacttcaagggcggcaagctgcggttcaagaagatcaaacctgaagccttcgaagccaacagattctacaccgtgatcaacaaaaagagcggcgagatcgtgcccatggaggtgaacttcaacttcgacgaccccaacctgatcatcctgcctctggcctttggcaagagacagggcagagaattcatctggaacgacctgctgtccctggaaaccggcagcctgaagctggccaacggaagagtgatcgagaagacactgtacaacagaagaacccggcaggatgagcctgccctgttcgtggccctgaccttcgagcggcgggaggtcctggactcctccaatatcaaaccaatgaacctgatcggcgtggcaagaggcgaaaacatccccgccgtgatcgccctgaccgaccccgagggctgcccactgagccggtttaaggatagcctgggaaacccaacccacatcctgagaatcggcgagagctataaggagaagcagcggaccatccaggccaagaaggaggtggagcagcggagagccggcggctacagccggaagtacgccagcaaagccaagaatctggcagacgatatggtgagaaacaccgctagagatctgctgtactacgccgtgacccaggatgccatgctgatcttcgccaacctgagccggggcttcggccggcagggcaagcggaccttcatggccgagagacagtacacacggatggaggactggctgaccgccaagctggcctacgagggcctgagcaagacctacctgtccaagacactggcccagtacacctccaagacatgcagcaactgtgggtttaccatcaccagcgccgactacgacagggtgctggagaagctgaagaagacagcaacaggctggatgaccacaattaacggcaaggagctgaaggtggagggccagattacctactacaacagatacaagagacagaacgtagtcaaggacctgtccgtcgagctggatagactgagcgaagaatctgtgaacaacgacatctcctcctggacaaagggcagaagcggagaagctctgagcctcctgaagaaaagattctcccatagacccgtgcaggagaagttcgtgtgcctgaactgcggcttcgagacacacgcagccgagcaagccgccctgaacatcgccagatcctggctgttcctgcggagccaggagtacaagaaataccagacaaacaagacaaccggcaacaccgataagagagccttcgtcgagacctggcagtccttttaccggaagaagcttaaggaggtgtggaaacctgccgtgcggtctggcggatctggcggaggctccacaagcaggcccagggccgtgaagttcgccgacgtggccgtgtacttcagcaccgaggagtggggctgcctgaggcccgcccagagggccctgtacagggacgtgatgcaggagacctacggccacctgggcgccctgggctgcgccggccccaagcccgccctgatcagctggctggagaggaacaccgacgactgggagcccgccgccctggacccccaggagtgccccaggggcgtggccgtgcagaccagccccaagaaaaagagaaaagtctaagctgccttctgcggggcttgccttctggccatgcccttcttctctcccttgcacctgtacctcttggtctttgaataaagcctgagtaggaaggctagcaaaaaaaaaaaaaaaaaaaaaaaaaaaaaaaaaaaaaaaaaaaaaaaaaaaaaaaaaaaaaaaaaaaaaaaaaaaaaaaa

SEQ ID NO: 6491 - RNA, 5797 nt, synthetic construct
  source 1..5797: mol_type = other RNA
aggaaataagagagaaaagaagagtaagaagaaatataagagccaccatggcccctaagaagaagcgtaaagtgagccggatggaacgcctcgtctacgaggtgcggcagaagtgcagaaacatcgaggacatctgcatctcctgcggatctctgaacgtgaccctggagcacccactgttcatcggcggcatgtgccagaactgtaaaaactgttttctggagtgtgcctatcaatacgacgatgacggctaccagagctactgcaccatctgttgcggcggaagagaggtgctgatgtgtggaaataacaactgctgccggtgcttctgcgtggaatgcgtggacctgctggtgggccccggcgccgcccaggccgctattaaggaagatccttggaactgctacatgtgcggccacaagggcacatacggcctgctgagacggagagaggactggcctagcagactgcagatgttcttcgccaataaccacgaccaggagttcgacccccctaaggtgtaccctcccgtccccgccgagaagagaaagcccatccgggtcctgagcctgttcgatggcatcgccaccggtctgctggtgctgaaggacctgggcatccaggtggataggtacattgcctccgaggtgtgcgaggactccatcaccgtgggaatggtgcgtcatcagggcaagatcatgtacgtgggcgacgtgcggagcgtgacacagaagcatatccaggagtggggccctttcgacctggtgatcggcggcagcccttgcaatgacctgagcatcgtgaacccagcccggaagggcctgtacgagggaaccggcagactgttcttcgagttttacagactgctgcacgacgcccggcctaaggaaggcgacgaccggcccttcttttggctgttcgagaatgtggtggccatgggagtcagcgacaagcgggatattagccggttcctggagagcaaccccgtgatgatcgatgccaaggaagtgagcgccgcccaccgggccagatacttctggggcaatctgcctggcatgaacagacccctggccagcaccgtgaacgacaagctggagctgcaggagtgcctggagcacggccggatcgccaagttcagcaaggtgagaaccatcaccacccgaagcaacagcatcaaacaaggcaaggaccagcactttcctgtgttcatgaacgagaaggaggacatcctgtggtgtaccgagatggagagagtgttcgggttcccagtccactacacagatgtcagcaacatgtctagactggccagacagagactgctgggaagaagctggtccgtccctgtgatcagacacctgttcgcccctctgaaggagtacttcgcctgcgtgagcagcggcaacagcaacgccaacagccggggccccagcttctctagcggcctggtgccactgtccctgagagggagccacatgggccccatggagatctacaaaaccgtgagcgcctggaagcggcagcctgtgcgcgtgctgagcctgtttcggaatatcgataaagtcctgaaaagcctgggattcctggagagcggctctggctccggcggtggcaccctgaagtacgtggaggatgtgacaaacgtggtcagacgggatgtggagaagtggggccccttcgatctggtgtacggcagcacccaacccctgggcagctcttgtgaccggtgccctggctggtacatgtttcagttccaccggatcctgcagtacgccctgccgagacaggagtcccagcggccattcttttggattttcatggacaacttgctgctgaccgaggatgaccaggaaactaccactcggttcctgcagaccgaagccgtgaccctgcaggacgtgagaggccgggactaccagaacgccatgcgggtgtggtccaacatccctggactgaaaagcaagcacgcacctctgacccctaaagaagaggagtacctgcaggcccaggtgcggagcagaagcaagctggacgcccctaaggtggatctgctggtgaagaattgcctcctgcccctgagagagtacttcaagtatttcagccagaatagtctgcccctgggcggcccaagcagcggcgcccctcctcccagcggcggcagcccagccggctccccaacctctaccgaggagggcacctctgagtccgccacccccgagagcggccctggcacctccaccgagcccagcgagggcagcgcacccggcagccctgccggcagccccacctccacagaggagggaaccagcaccgagcccagcgaaggcagcgccccaggcaccagcaccgagcctagtgagggcggctctggcggcggcagcgcccaggagattaaacggatcaacaagatcagaagaagacttgtgaaagacagcaacaccaagaaggccggcaagacaggccccatgaaaaccctgctggttagagtgatgacacccgatctgagagagcggctggaaaacctgagaaagaagcctgaaaatatcccccagcccatcagcaatacatctagagccaacctgaataagctgctgaccgattacaccgaaatgaagaaggcgatcctgcatgtgtactgggaagagttccagaaggaccctgtgggcctgatgagccgggtggcccagcctgccagcaagaagatcgatcagaacaagctgaaacctgagatggacgagaagggcaacctgaccaccgccggctttgcctgctctcagtgtggccagcccctgttcgtgtacaagctggagcaggtgtctgagaagggcaaggcttacaccaactacttcggacggtgcaatgtggccgagcacgaaaagctgatcctgctggcccagctgaagcccgagaaggatagcgacgaagccgtgacatatagcctgggaaagtttgggcagagggccctggatttctacagcattcatgtgaccaaggagtccacccaccccgtgaagcccctggcccagatcgccggaaacagatacgcctccggacctgtgggaaaggccctgagcgacgcatgtatgggcacaatcgcctccttcctgtctaagtaccaggacatcatcatcgaacaccagaaggtggtgaagggcaaccagaagagactggagagcctgcgggagctggccggcaaggaaaacctggaataccctagcgtgaccctgccacctcagcctcacaccaaggagggcgttgatgcctacaacgaagtgatcgcccgggtgcgaatgtgggtgaacctgaacctgtggcagaagctgaagctaagcagagatgatgccaagcctctgctgagactgaagggattcccttcctttcctctggtcgagagacaggccaacgaagtggactggtgggacatggtgtgtaacgtgaagaagctgatcaacgagaaaaaggaggatggcaaggtgttttggcagaatctggctggctacaagagacaggaagccctgagaccatacctgagcagcgaggaagatcggaagaagggaaagaaattcgctcggtaccagctgggcgacctgctgctgcacctggaaaagaagcacggcgaggactggggaaaggtgtacgacgaggcctgggagcggattgacaagaaagtggaaggcctgagcaagcacatcaagctggaagaggaacggagaagcgaggacgcccagagcaaggccgccctgaccgactggctgcgggctaaggccagcttcgtgatcgagggcctgaaggaggccgacaaggacgagttctgcagatgcgagctgaagctgcagaagtggtacggggacctgcggggaaagcccttcgccatcgaagccgagaacagcatcctggacatcagcggcttcagcaagcagtacaactgtgccttcatctggcagaaggacggcgtgaagaagctgaacctgtacctgatcatcaactacttcaagggcggcaagctgcggttcaagaagatcaaacctgaagccttcgaagccaacagattctacaccgtgatcaacaaaaagagcggcgagatcgtgcccatggaggtgaacttcaacttcgacgaccccaacctgatcatcctgcctctggcctttggcaagagacagggcagagaattcatctggaacgacctgctgtccctggaaaccggcagcctgaagctggccaacggaagagtgatcgagaagacactgtacaacagaagaacccggcaggatgagcctgccctgttcgtggccctgaccttcgagcggcgggaggtcctggactcctccaatatcaaaccaatgaacctgatcggcgtggcaagaggcgaaaacatccccgccgtgatcgccctgaccgaccccgagggctgcccactgagccggtttaaggatagcctgggaaacccaacccacatcctgagaatcggcgagagctataaggagaagcagcggaccatccaggccaagaaggaggtggagcagcggagagccggcggctacagccggaagtacgccagcaaagccaagaatctggcagacgatatggtgagaaacaccgctagagatctgctgtactacgccgtgacccaggatgccatgctgatcttcgccaacctgagccggggcttcggccggcagggcaagcggaccttcatggccgagagacagtacacacggatggaggactggctgaccgccaagctggcctacgagggcctgagcaagacctacctgtccaagacactggcccagtacacctccaagacatgcagcaactgtgggtttaccatcaccagcgccgactacgacagggtgctggagaagctgaagaagacagcaacaggctggatgaccacaattaacggcaaggagctgaaggtggagggccagattacctactacaacagatacaagagacagaacgtagtcaaggacctgtccgtcgagctggatagactgagcgaagaatctgtgaacaacgacatctcctcctggacaaagggcagaagcggagaagctctgagcctcctgaagaaaagattctcccatagacccgtgcaggagaagttcgtgtgcctgaactgcggcttcgagacacacgcagccgagcaagccgccctgaacatcgccagatcctggctgttcctgcggagccaggagtacaagaaataccagacaaacaagacaaccggcaacaccgataagagagccttcgtcgagacctggcagtccttttaccggaagaagcttaaggaggtgtggaaacctgccgtgcggtctggcggatctggcggaggctccacaagcaggcccgagagcgtgaccttcgaggacgtggccatctacttcagcgagaacgagtggaccggcctggcccccgcccagagggccctgtacagggacgtgatgctggagaactacggcgccctggccagcctggccgccttccccttccccaagcccgccctgatcttccagctggagcagggcgaggccccctggagcagcgccccccagggcgccctggacggcgagggccccaggggcatcaccagccccaagaaaaagagaaaagtctaagctgccttctgcggggcttgccttctggccatgcccttcttctctcccttgcacctgtacctcttggtctttgaataaagcctgagtaggaaggctagcaaaaaaaaaaaaaaaaaaaaaaaaaaaaaaaaaaaaaaaaaaaaaaaaaaaaaaaaaaaaaaaaaaaaaaaaaaaaaaaa
